United States Patent Application Publication US 2014/0057251 A1 - sequence listing, part 49

SEQ ID NO: 60726 - DNA, 1343 bp, Cannabis sativa
  modified_base (50)..(56): a, c, t, g, unknown or other
aattagaaaatatatttaaattgacattaatttattaattaattttggannnnnnnaaattagaatattttcttaaatattaaattagaattaattagtatcaaagggttgggaaaaaaaattacacttcgcactcgataataagtttcatacaattatttatatattattttaaataaataataatcatgttaagtgatgttaaaaaattgaaaaggtataatatttttttaaaaaaatatatttaaattttcatgatcataaaattactgtttaattatttaaattatatgttttttaatatttggagaaaattatgtcattatgagaatataaacttttgatttagtatcaaagagttaaacaaaaatgctccacttggttgcctgagaattaatttcatacaattatttatcttattaatttataaaaatattaaatttattaaatgatgtttaaaactgcaaatgtattatttttatatagtcaaatataatttttaataattataaaataaaacttttaattattatgccattactaatattcaactcacttcatatttttaatctattttttcaagtaaaagaaaacaagaaaaatgaaagagttattaattattataaataatttaatgcaatgaacattttaaattttaatgtaaaattaaaacatattagattttaaattccattcataattaaacaaaaatataatttactttaatataaaattaaaaaaatatatattaataccgcacgaagcgcaaacttattccgtagtttatatataaaagtgattagtggtaaatttattgtttaatttattttatgtatagagtaaatctattggataatacagtaattaatgataacgattttaaatatagtgatgactacaaataagatgttgtgatgacaacggttttgaaatcatatgatgataagctttttataaagttatcagtaattataatttttgtttttccttttaattgttttaaaggaaatacatatatcataaaaactaactgtataataatatatatataattaattaaaaataattgaaaaagttaagatctatcatattaattaggggaatcatttcatatactatttttaatttttacagtttgtgttgctctggtggttgctatatggaatgctatgtggatttgattgcgatttattttatttcgttggttgctatgtagatttctataaaaacacaaaaatactggtttgaaatataaaaattaaaaaacctctattaattattaagcgaaaaaaattaaaaaacctctattaattcttatatagtagaggtatactttgttaata

SEQ ID NO: 60727 - DNA, 715 bp, Cannabis sativa
tgttctcttatttcctttctctttagttatcttggcttagctttcaaatttgccgactgtaaatacgtctctaaggtattaaatttcatctctcataaagacttatatatgtttatgtatatttttcattatggttcttttttcatttcatgaatattttttttgtctttaaggtgttcttttgtcatttcatgactcgttcttgtcaaaatattattcaaatacaagaaatttaaataaattactgcagcgtgagttccacggattaaaattgctagaaataaatacatggtacgcgcttgggggtaaagtatttacttcacattgtataccttactcggtagtgaagctttctaaatattaattagattctgacttctatacctcccttcgacaaatgttctttaacagagtgaattggtacctcctttcgatgaatattaaaattccatttcattactaatcatagattttatattattcgatcttgaagaatattattaatagcataaacatatcatatttatgtttcttcttttttttgtgtgttttttcgtgggttcttgtggctgaatttttagtataacagcaattgatgaatgcattttaaaacaactgtgatagtagctttgtaaaatttcattccattgaaagagaatgaacaataattatgtgatagaaatagaaatgaagattgaagatgagtcagtaagga

SEQ ID NO: 60728 - DNA, 2380 bp, Cannabis sativa
attaaactattgttagaggagttcatgttgttagtgttttgagttgttactacctagcaggtactagtagtttgtaacaaccaaaagctgtgtaaaatacctctttctgtccgattttgtatttttcacacactccgtgatctaacgtcataattgcttcaatccctctatgatctataaattttgcggtccttgatgattggattgcaataatatttcccaccgcatacttgtgtgcgaagctatagtctctttgcaagtgtcctagaactcgattctccattgggttgtaagcggaaacatctgtgcttattgaatgtaatgcactaacattagctataaggcaataatcttccatttggtaaatgatgagtatgcgtcatgtttaattatttgggatcataaataaaaatcaattaatattggtacatattacaaaattaagttgttgaaaaaataattgttacataattatcttaaattattgataattatgcggatgcataagtatgcgactttatttaatttggaggaatactttattcgatgtgcaaaacttaattaagtaaccataaatcagagaacatatcatttataccaatttaattaagcaaccataaatagagaacatatcaaagtatttttgtaaataagattaattttagatacaataattaaaaaaccccattactaattctaatttgtttaatctgttattagtttatttttttatgctctacaaaaaataatcatactcgaaattaattttttttccatatccacttacattttatttttataattttataaaatacatttaacatatataatagtacaatcttttttttatatataatatagtaatagcacaatttcaagaaaaaagaaattcattttacgaaaaaaaaaaaaagttaatttcctattgtactatttttattttatagattctttttggcatttatttaatagtatattttttggcaaatatttggccaaatgaaaatgcacttttatgattccaaggcattttatagggtagtagactagtgtcttatcaaaaaatacttttaatcctcactttttcaattaggtgtgagattttttttcttttttttaaaaaagaaaattttgataaactttgtgaagaagtgttgcttttagcaaaaataaactttgtggattggtatgatgctcaaaaagaagacatggattctttattgatgccaatagagatcgaaatgagcactggacaccccagatttcaaccaaatcaaagtaaatgtggatggcgtactttttgctaatgagaggaggtacgacataagattggttgctcgttcttcagatggagcaattattcagccaaaaaatatgaataaggttggtacttttccgccccatgaagtagaagctattggaataattaaaagaggctttgagttggatcaaggatatgggttggcctaatgtgattgttgagtctgattgtttgagagtgactaatgatttaaataagaataaaactatggcctctccatatggcaaaataatttctgattgtaaggctttgttggccgatgttagtagtgtttctttccaatttgttaagcggtctgctaataaggttgcgcatgttctggcgcgatcttctcatgttgagactgaccgtacttttagtagcgttactttacctactgtaattgcttccctggttttgcaagacttaaattaaagaagtttcttcatgattattcaaaaaaaaaaaaattaataacctacaaacaaatacatcatacacaattttaacttttaaaagttatataaattaatggttacaaaaatataagtatagtatcggaacaaaaatatagtcactaccatagaattattcaatctatatataatatatatataaatatataagtatataaatttgtagtaaccattcatgggtaatactcattaagaagtgttcaatatatatatttatatggatcatttcttaatggaaacgtcaccaccgatggaaaccaaaatatactattttattgctgatgtgacacggtcaccaacttgccatagcaagtttttaacaactttgaaacgtcaaattggtgacgtggcataatggaatcttccattttattttatatttaattcgagattctttttttttttggccaaaaggaatggtgattccacccaatcaaaacaagctctcttttgaatgtattgactatatatttccaatgtaatgtttgaatagttttaaattttttttggattattatagaaaattaagggtgcactcttaatgagtattacccatgaatgggtaaattagaaaattttaagtttttatgcttaatttttctat

SEQ ID NO: 60729 - DNA, 980 bp, Cannabis sativa
  modified_base (941)..(955): a, c, t, g, unknown or other
aaaataatcaatatcagtaattaattttattttttttttgcttaaaagtaataataaaattgaaaatagactttaaaaattgcgatgaaactgaaaggcatgaaaaaaatatattggaccctttattttttgaggcccagtagcataacttgcacacctatagggccatcaaaataaatatttaatatttaagtgtcttcatgaagcttagaatgtgtattgtcactcccctcaaatgaaatggtgtggacacgtaccatttttagtttggtcttcaaatagagaaagcattctgtagtgagagcctttgtaagtatgccaatcgtttgatcatgagcagagacatattgaaataatagttgtttgtcaagaatttgatctcttacaaagttaaaattcagtatgtttagactgtgcgtgaaagactggattagtagccacactgatgcactttgattgtccacccatataactggagcatgaattaaagtgacttgcaattcagtgagtaaagattaaatccactttagttcagctgttgcattggccaaggctctgaattcactttcagtactggacctggccactatctgttgcttcttggcaaaccaacttactggattttgaccaaaaaaaccaagaaacctcctatggacctacgatcgtcaatgcaactagcccaatctgtatctgagtatgttgtgagagttagtgcagatgcaagaatgagacatataccatccttgacagtgctcttaaggtacctaactaaccttttgcaagcttcccaatgtaagtgagtaggagagtttgtttacaataaatgctacattaggtctagtaagagacaagtattgaagtgcccccaagatacttcgatacagagtaatatcagtaaatggttcacctgttgggttttgtaccctaaataaaactcattnnnnnnnnnnnnnnnttactaattaataaaagatcagaaa

SEQ ID NO: 60730 - DNA, 2403 bp, Cannabis sativa
ctttgaagtgacaacaacaccatcctcattatgcaacgatttgattgtgttgttggtctttcgtgaagacgcataagcatgaaaacattttgtattctcatctccacattgtaaccaatcaattcttgatctttcctgccaataaacctcttcttgggagagcaattcatctagagtatcctccattttttttagattgcacattgaaacatcagttcggacttgttggttattaagaagttctacctctttatgagcagctgtgattttcttcttgaaattgctatatttatggtgatgccattgttgtaaagaactggaacaagcctctatattagtgcagaaattgtcaattgcagtaccttgcaaactttttttccaagtctgatggatgatatcggttgctgcagaatcggacagccataatttttcaaatctgaaccgtgagagcctcttaacttcaggttgttggtgtgccaaaggaacaacttcaactgttattgctctatggtctgatttataatagtccaggtgtttggttaaaatcggctgaaaagtattactccattgatcatttacaaaacaccaatcaagcctttccttcattgcattgacattgtgacgccctttaatccaagtgaaaggatctccgtcaaaaggttgctcataaaggtagcatatgtccaaaactgatcgaaatttgtccatttgttgctcacatcgtaacgccccgccatgtttattttcatttgaaagaatttcattgaaatcgccaatcacaagccaaggcatcaaaggagcgacatccttacatctctcaaggagtttccaggtgtgaattcgattgtgagtttcagaagcgccataaaaagcagagaaatgccaagatggcccattatcacacttcatgtagcaatcaaatatatttatattataattaagaagatttacatctacattgtctttccataacaaaaacaaacccccacttaactcgaccctaggaacctctaacccattaggaaaatgtaaagcttgacgaaaacgagtaacttcattacatactaatttagtttccataataaataatacatgaggagattgttgcttcacaagcaaacgaagttgtctgaatgcgctaggattccccaaaccacgcgcattccagctaaggattttcatggctggttgcggggctgtgagacagcctccgcaaagttgtccaaagaaacggatggatctgcatcagtgtcagaagcattccggttcacctcagcatcagtggacagaactgaatttgaggaagcaagttgaagacccctgcaatgcttaagagcctttctcattgacaagtttcctggcagtctcttggaagatcggtttggtgactggttttctttgccaaaagatgcagcagtagtcatggagattgtggaatcggttatgataggagcgtggacttgtgggctagccatgttggagagggtggtgtaagtatctgagttgcttacatcaggcggatatgtagcaacatatcccataggtggtccaatgtttggcataaaaatatcagataagtcaatctcagttgtggaagaaggtaaaatattgggtgaggatggtgatggaactgtgggaattttggtttttccataaacttgtgtaagtgttgatacctttgttgctggaggtgatagatgagtaatttttggcccattaattgtatcaggaaaagcagaagcacccttatgagttggtggactgatgttcatcgttgctttatttttccctgcatccttaacctgagatgtatgagccattgatgtgtcattatgcaccagagaagccgagtttaaagttgctggtgtaaaggagaaggcaccactggtatgtgaggaattgatttcgaagatgaaaaattcccattatctagatctgaattggtgatgccactaggatatacatttttttggcctgatgattccccatatagcagtgttgtttgctgtggctgaccacgaagagacaaggcagggatggtacttgttatggttttccttgcaagtcgagtaactaaaggccaaacatggcctttggagaaatctgtcctgtatcgatcgtaaccagaagttggcaaggcagcccctttgattgcaggcccataagcaagttctggttccacaccattatctattaattcaaggaaagtagagcatttctgatatggatggcccaaacaaccacattccatacaccattcgggcaacctttcataacgaaaatccattttttactctattctttaaaatatattattaattttttttttattttaactcaaacttttactttacaatatgaaatatctttactaatttttctgtacattactaaaatattata

SEQ ID NO: 60731 - DNA, 945 bp, Cannabis sativa
gttgaaggtggtaatatcgagtttgacctgtgtgagaggagggaaaatgaggtcgaagggagtgtaggaggtcgagcgcgcaggtgcgggcgggcacgcgggcgcgggcgggtgcgtggagctccccttgtcgaactttcgagcataacactaatgacttcgaatattacacttagtaatttttgggggtcaacacttgccccctaatctagaagaattctttccagtgttcttgtagactaagtttggtgagcttcatctctacgacttaatttttcttctctactcctttttgttacccttcgcgaggcgcataggttttatgatttatctctgccccttttgagatttgtgttcaccacaatgagggagtgttagcttattgagcatcctcaacctcttatgggttactcgctcggtataagggagctcatggctccttaggccgcgcttgacctttttataaatttaagaccatattaggggaacttatggccttttaggcaacgctcaacctcttacattgtatctgtggtactttgagcgtattttgggtgctagaaaatgggtactccttttaaagaggtgtccatctcagagtcgtattcgattcctcttttccttttaatactttaaggaagatgatagttctgtgaaccgactcgaccttttgctttcgatatttttaggggagatgatagttttgtgaaccgactcaatcttttgtttttgatattttaagagagatgatggttccgcgaactgacttgaccttttgtttttgatattttattcatttcattgcacatgctttagagctaactttgaagagcatcctcctcatcattgtgagtgctcttttttgtggaactaccttcaggctttcactctcttcttgggccattaggggtagtcaatccctgtagtcataagagtttttttttt

SEQ ID NO: 60732 - DNA, 995 bp, Cannabis sativa
aggggattagggtttcataagcattttgggtagcgtgcctaattatttagagcgttacactgatggcaaagctttgacaccatttgaaaattgagaggattctgagtgtataaggagagtaaggagtagaaggcaccagtggaggactccaaatagtgttttttctcttccatctctatcttttatgttttttattgaattttttttttattttagaatgtcttttagtagctaaattcttttaaggattattatgtaaatcacttgagattattttatggattaatgtgattatacaatttcttcttcttcttattcttcttcttctttctacttttaattttgtaattatttagtgaccatctataattgttatttatgaattcaagtcaaaattgtgaaatgtgagatttgaatatgctctattaatatagatgcaaattgatttaagacgaaagtacctggattgtttgtatgattttattagttgctatatttaatgttatttgtgtgattaaacttaccatagaaatataagaagttttcacatagattgggtttaagtcgtaaccagattataaacttcttaactcaacttatcaattgaataggatgaagaaaaaatgggtaattacattatgaagtaaaataaaaaatagttggggatcataataatcctgtatttagaattattattatttttttctaaattttaattatttcattattttatttccttttatccaacaattattatttatgaaacagaattaaagaattaataattggtacttgataatcaatcctcgtgggaacaatactttacttatcattatattacttgtttcgattgcatatacttgcataccaattttaccaaacaagaaccttcaaacataaactttaaagaaaaatgtattatttataatttcatgtgtaactaatttatttatttatttatttggatgattttagtctatatatctcaaattata

SEQ ID NO: 60733 - DNA, 1003 bp, Cannabis sativa
agtttttagggagtatcgctagccaatcgcaatgtgacatgtcgagaagttgctagataccactggtgcctaatagcaatgctcttaatatttttgtcttataaacttttttcactaataacttatgcttttataacatacgatttgttaatgatacctctcaaaatataacttttatagtagcatggtccttctatcatattctatttaattttatcgtaaaacaagtgacatgctaaatagtagttgataaatgaattcaaatcaaatatctttacctttaatttctactttaaagatgaaatataaattattatataaaaaatattttattattgttcattaatatgaaaagagtgaatgatatttaatttgcatcactttattatttatcatcagtcacttttttcattttacgataaaattaaataaaatgcgatagaagaactatgttagtgtaaaatttatattttgaagagtattattaatatgttgtatactatatgaggcacaacttagtaattcaaaatatttaggtggcaaaaatactaattattttttaaaattatgtatttggaaaatagagaattttaggttaattaccttaaactaattatatttggcggaaaaagaccattaaatactacaagttgttctcttttctttttctttcacttgattatgatttttaaagtatacatcacccattaaacctttcatctaggccccatactatatcacttccaatttttgtagctatcagaggacaataaaggcatctgtccaccaaaatatatagtcccacaacagtgagactacataactcactcacacaacatggtgaaaaattttctaatcaaacaaacttagattttttggatccaaaatcaaatttagatattttttttcaaataataattaaaaaaaaaaacttgtttttaccttaaaagtggtggacgacaaaggggaacccgtctccggaccctgagagatacacgacctg

SEQ ID NO: 60734 - DNA, 735 bp, Cannabis sativa
tcatgcaaaaatctcgacaactcggaattgctagctggatgagccgatttgtatagttaccaaggaagacttatagctcatgactgtcctaacttgccatttcccttacctgcaccataaagtacctgtgagttataaagactcaacaagaaacgcaatagcacaaacattacatatcaatacataaaaccacttgaggctagctcaagtcgccataggtgggtgtgtgtgtgttggaggtcctaggttcgagtcccaaattaaacatggttgtaatatataaacgcttaaataaaaaaaaattcatatcaatacataaacatatccaggtatacacatttatgttagacattttctatgaaaacttgaagcatatataatcatgtataaatatgcagaataaacgaacatatatacgatataactaaatgatcgaaatacctccaaccgttaattctttgagcttcaatcctacataagctttggatctgcaaagaaaaagaaactgattagtgtaggtaattgggctttcaagttctctttactctctttagatggatttactgcatttttacaaaatgagtagtgagctcaggaatcgagaccctatatttatacataggttagatattctattaaagtctctgccacaattaattgccagaatattttgacaattaattctcgaaattaaatcgagtaactaaaatattataaaatatcgttgacttcgaa

SEQ ID NO: 60735 - DNA, 1454 bp, Cannabis sativa
cctagtttacatcttgtcagacaattagagagtttgagacttcttcttcttcttttctctcttctattttcaaaattctatagagttcttcacaaacaaattcgagccaattagtgattgagtgcatgcccacccataacaagttagccctcaatcatagtgtgtaagactgtgaagaattcaaacaactaaaggagtgtgaggctcaaatcttaattatactctacaacaaaaatgaacaatagttagagatctgagtgaaatgagtcatttaattccgcttcaatcaatgtaaagttcctcatactttatatgtattaattaagtttcattgctttagaaattcatatttaggatgttaaaaacatacttattaataaacctaaattctggtaaaatatattctaacaatatcagcccacataagcgcctacagttgggcttctccacacgccaaccccatgctcccaatagagtgatatatcaatatcacatacaaaatagttttaattgggatcaatcaacatcaataataaacatacatatatcttaatagtatcaaattattattatcactactattattgttgctgttttctctttgtaccccttaacttatttcattttgcattttaattcttttgagattataaattagagctcatttttattgttttggtgtgtaatttttagtgtagaaaaattatagcaaaatttttctttactttttttctcatctttttattgatcgcttgatttatattacaattaccgctagtagaagtcacatttttgggcgttaaacaactcccctaatgaaaaatactaagtagttgttaattaagagtttttgagtttaattagagcactaaaaaacatactaaaaataatgtatttatataagctaacaaagttttctagaagatactaaaaagattgagatttaaaactaaaaaaagatagataatgtgcttcggagccccagccccctacactagagtcgcagctccaccacccaacaatccttttttcacgcgagcttttaccctttttttttcaacattccctccaagagtgcaacttcctatagtggagtcgcagctcttgggccattcatactattttgtctcttctagtgccatggtttcagatttcggagccatggtcccataactcgttaatttttccaatttttgtccttttgctcaattctagcttatgaacattgtcaaactcaccaagataaaaaataactctatttatgtccacttttctacaaatttatggtgcatttggcaacacttttttaattaatattttgttttgaaaattacaaaagtgaaatattttctaaaatcatgttctataaatctattttcattgtgcaattttttaattgagaattaaaattttaaaaattttgaaaacaaaaaaacaaatcacttttaaatttt

SEQ ID NO: 60736 - DNA, 528 bp, Cannabis sativa
ggtttgggactgcattcaagtcctaagttttagtccaagtattggtctgggttcgagtctaggtctgggtcccaggttctgatctcagttttggtcttggtcttggtccgagttcgggttttggtttgttctacattcaggtcagggtcccgggttttgattcatctttgggtttgggttcgggtctaggtctgggtcccaggttttgatcccagtttgagtcttggtttgggtccgagtcggttttgggtttgatctaggttcgggtcagggtctcgagtttcgattccagtctgggtctgtgttcgggttcgcattcgggttctgttcaccgaggttttcggcaaccaataaaataatacgagtttagagagctgtaagaaattaagagagagatttttacgtggtttgggcgttaatgagccttagcccacgagtctgtatatttatgtttgtatttaatatagagaatgttcttggtgagaatttactcttcttgcacttatgcaacctagaattctcgacccc

SEQ ID NO: 60737 - DNA, 2252 bp, Cannabis sativa
agagagagctgaaagagtatgagagagatcctagaaagatagatccaacaccctcaatttgatattagaaaaaaaaaattacaggatatatgatatgaaatgaataacataactatatacaccaatgacttttctcaaagttttttcttttaatttttacaattaatcatgattgacattcaagaccaccatcaattcaaagattctataaactattcatatttacactactacaatttacctttttagtaacactatctagttacccgtagaaaagtacaggtcactagagagttgagagtgattttcagtgacatgcacaattagactctaaaaattcaatgttagtctcttgtaatgcaggtcactaaaaatatggactgtcactaaaaattttaattaataaaaaaactattggcatatagtgacgcgccaagcgcgaatggataaatatatcgccacccatctagtgtgtcactatatcataacttaatttttaataaaaaaagtacaattaaataaaaaataaaaaatatatttaacaatggtaaatcctaattatacacgccactctctcttttttaatcaattacaattctcaatcaattcaaacatttatcaacctataaaaataataataaaatataaataaatattaaataaaaaaagctagatataatcaacctatttaaaaaaaacccacagctgttagtgttaccctatttctctctctaaatttatttattaaaagaaattataaaaaaaaactaaaaagaggtataaaagggatatgttagagtaaaaatcctaaaattcctttctctactgatctctatctcactctcccctgtttggtgcggcgatactcctcaatctgtgactatctctctttccctcttccagtcatgctccggccatcaacgatcctcaagctctacccactaaactccgaagcccttaacccctttcccatccctcgttccctcttcttttgattggcggagttgctaggtgaatgatgatggtccaaatagaacacatcacagtgctcgcagcacccgaaattctgagcgatgagaagagcaaaggtctcgacgtacggccagagtagtcaccggtggccattcgcaggcctcgacgaacgacggccatccatttcgcacctccagtttaagctttctgaggtttgatattgggctgttcatttgtagttttttttatatatagatttagagattttagttttgatttaaattgtatgttgtttgtgtccattacttttattgttttaaggtttatcatttagttcaaatgatgtataaattttttactaatgtttactcattttgtttgttaattctagatttttgttttttaatgaagaaaagagactatttgtatatagatttgttattattaattatgtatagatttttgatgaattggtttttaattttgttatattggtttattaataattttataactaaaattaaaatatattaatttataattgataaatatatagttaactaaattgtatcattaattaaattatttttataaatttataatatataatttgaattttaaaaaaataacattaattttttatatatgaaaagcatattaacattaataaaaataaaaaaaaagggatatagtgacacttcatgtctgtggttgttaccttttcagtctgacaaaacctgactctatacgcctataatgacgcacagaaagtgaatatgcgtaaaaaggttcagtgacacgtgtgaagtgtcactaaaaactgtctttccagtcaccctcattagtggcgtgttgaagtgtcactaaacagttttagagttactcaatgtgtgttactaaaacccgattttctagtagtgttatgatgatatcattataattcaaaactattagtctcagtaagtgttgttcgaatttttgtaagctcgacacgtgaattatagtcaagaaaggttaagataaaatttgttgataaactctcttgaccactgttccaggaaggttaagatatattcggctttgactcgtggaaaggcctccatgattggaactcccctaatagtcagtgatgcaagggatatccgccatctggagtcttccccattcttgggaatggaagccatctactcttgctggaccgaagtcaagtgctcccgcaaagggtatgaatttattgttgggatttattttaccaggatcttagatctacttacaagtat

SEQ ID NO: 60738 - DNA, 739 bp, Cannabis sativa
  modified_base (709)..(713): a, c, t, g, unknown or other
gttttaattctagttacataaatttacataattattctttttttttaagacatatatcaatcattttaaaacaattgatttttgaaggtcttaattcaaagtttttttaaaataaacctatcattgaggatatatattattgaaaatgttatgatccatcgatctctaaaaatataggtgaatcgattcattacttttatatttttaacctcgaaataatttcatcttaattttttgatataacattgtatattgtaattatttaatacattttataaatatttaaaaaaattaaaaatagtttaaattattataaattttcaaaaaaaaaaaaaacaattacagtaatataattaaacaactaccgtatacatcattattgatatcataattaactatttaaatatcaaaatacaaataaataaaaatatagtacataaatacaactattttttagggtgcaatctgaaatcgcccattaattataagaataattacttaaggtactattttttgtaaaaataattacatttttacgtttaaatagttttttttacattttcacttttaacataaaaacaataagaaaattatataaaaataacatcaaaataacatacagatgaaaaaaaaaatcgacaccaaattaacaagagtacaacataaaaagaccgtattttgtgtaaataaaataaaaaaaaatcgtaannnnntttaaaatttcgtaaaaccgtatttt

SEQ ID NO: 60739 - DNA, 1738 bp, Cannabis sativa
agaactagttggtgatcttactctaagtcaccacaagtgcttcttttgcctccttcttcagttttagggtacaatttctaagtatattgcttctaaaatacgagacccttatatagaaattaggactctgaatggcaaaattccaaaactgcctaaaattcccgtgtttatcccatagtcgcgactacataaagcctagtcgcgaccataggcaaaactcaaaaatcaagctttctacctatgcttcatggtcgcgaccatagtcgcaaccacataatttatcacgactatggtctgtggtggtcgcgactactgaaacaaacttgtcagcttcagtagatttttctccaatttgccccatcttttcaccaattgatagaattcgaactctaatacctcacaaatctgaaacaagggaaatcaagtgtaaaaccattccaaaagataacattaacaaagaaaacaactctaaaatcgatccaaaacttaggctaaaaatagcctaacaaaattctcccaaactagattcgtactcatcctcgaataaggctcagactaacactaaaaccaaaacccaattaactaagctgtcagacaattaagctactgctggctcatgtaaaatttccttcaaataacttattcttgatcatgtatgtgttctaatatatatgttacaatagtaatagtaaattgataccactgaagtccctagatatagaatcatattaccttatctcagtgggaggatttttctagcccattatttgaatgagactagtgattaacctactatgatatgttcaaaaaaggaactttaaaataatacaaaaaaaagttaatgtaaccattcacatggatagcaataacttatcaaaattatgaggataaaataggaaaccttgcaatgtctatttgaaagacttaggcacaattcttggtccttatgaaatgtttatggtatctctagttattattttatcttaagcaagtattttacattaatgttaatactagaatgctatgttgatggcttagtctagaagaaacttaatgtttccagactaagataaaatgtcacaacaagatatccttaagtaccaatagtaagaggtcaaatgcacacttgagtatgcattcagcaagactcctactgttgggtgggagccatcaacgatgtaatcaaacaaggaaacattgagagacaatcaagaaagaatctatgaaagtgacctatatgttagaagatgggtgtaaattagaatccttatatctacaccaactcagaacttaaatatcaaagatggttgtttctctgaggatggaggaattattttggaagggcgtaaaaatccatctataataatttagttccaccagtgaagctaaaataactgagttgcttctgaagggcactagaaagttattcaaactgaagaaagttcttaattgtttttatctatattccattttggatagaattagagttgtgtcttctgtacattcagatgcaatatcaagaagtaatgaattcactattcctataggagtaatgcatatagaagattgatgttgcataatattttatgaatacaaaggaactagtgatggagaaagttattgcttatcatagtcttacagttcctaatatttgcgtatagtcaaacacactacacttgatatggatatcaagacaatagattgattgaaatgcacttctaattttatgttagtgcaa

SEQ ID NO: 60740 - DNA, 1360 bp, Cannabis sativa
tcttcttccaattgtcttattttttaatttttttatatatctttcatttcgtatatatataatggctattacctgtagttctactttttcatctccattgtaaaaataaaaaacttcaaaaatgggtcataaatcagttgctagcaaggctaaatgaaaatgcccagtaatcgacgatgatgattcagatttcgctcctcatgtagctaatggtgctagtcaatgtaataagaaaatttttctgaaattctaactaatattttaaatatggtgttgttaatgctttgcggttttgatgatatgttggatctgacattcaactacaaaacaactattgtgcaattttttaaaagccaataatgtattaaacgtaataacagtatattaaagtaatatttctgcctgtaaaagttcatagaaaaaaaaaattaaattaatattttctcaacattcaattgcttggttatgggatgtcttctgattttttttttttggccacatttgccgtgcttattctattttttgtttcccatgcacctagaagtcttcttttccttagtattttagttgcatttgagtgttttcttggttacattctagaattgtgtcagcttgtgtattagttcatcatatttgcaatcaattgagatgaattgcccaccaattttgtaatttgcttaattgattccttcatcaaactatcagttgtaaaatatgagaaatggaattgcgtctttttctcttaaaagtataaaaatttaagtactgtgtaagttgtgttaacacggtgaaaactcgtcaactaacttatgggtagaaaaccaacttgagctttaggttcagaattgggatggagaagaatatgaaagacaaactcagattactaccttgaaatggagagaatagttgagtaaattcttatattgtttgaacctttgtaagtctagttgttgtgacctttgtttctctgttggagaaccgtgttgctaatgctttagtcaattgggctagagctccaaaggtcaaaaactctggtttattaggggaagtggccccctctgtgatttctattttggtttagtttcgttcaataaaagtttttaattgtcaaaaaaagttgtgatgatataattaaatgctattattgttacaatttttttttgtatgaaggggtgaattttagattgaagggtttatatatgttgagatatttaatatttggagttgaattttttttaggctatgaaaaataataattaaaaatattatatttatttgaaagacattgaaatgtgaaaacattttttagtataaaaaaaaattaaaaattagaggtcattggttccttctacacactttt

SEQ ID NO: 60741 - DNA, 869 bp, Cannabis sativa
gaaatgttaaaaagtatcagtggtactacctaatatattcttacgtgttaatatcactattagtctagttaagtatcggatctcatatagtttaatgaaataacttctagggagtatcgctagccaatcgcaagacgactgattttgatggtattaagcactactgatacccaataacaatgctcatatttatgagatgtgaatatttaaaataaaagttttaataattagtaaaatgtacgtgattaaacttaattattttaggaaactataaaaattgaagaatataattgagatcacttaaattatcttcaaaaatggttctgtataattacatgtccaagcaaatatgtcaatttaagtaatcaagtacaagtagtattacatctaaatccaattatagggtagctttcaattccgaattttttaatagaattttggaaattagctagctaggatcaagaagatcaagactagtgaggtaagatataaatgctacatcactgaaatttaaacctatgtctatagtcaattaaaagataggatcatatatatacatacataacatttgtatatatagttatatatatgtgtgcatactatattacttgatgtgaatgcacttcttaatcatttgtgttcaagatttgcttgacgaccccgttgaagaaaatgtagctcaaagtctattaattcatctaacattttgctaccagtgcattgtaactattgaccatatctaaaaataattaattaaaaaaaaacaaaaaagataaaatgaaaataaaatacatttgatcgaatttattattgcaatgcaagacaccgacaataatatctgatcagtgtttatatttgacaattttgca

SEQ ID NO: 60742 - DNA, 892 bp, Cannabis sativa
atataattattattgtacatattttatatacaattttattaaactagttttactttttatcttttttaaagtctcaattattcattacattattttattataacttgatgtatttacgtattacacacatttataaaataatacgagttttttactataagtcatttaccatattagtagaacatataatttgagcaaatttaaaaaagttaattttacattatttattttataaagaaaattttgttcttaaattatatgacatttgatacaatactctaatttttttagttttcaaataattatagaaaatttaaagactttttttttttaaaaaaaaaaaatgaagctcggtttaaaccgaccaaaccgtggattaaaacagccgattttttttacagttatataatgatcagtcatttttcgaattataaccatgaaaatcgaaaatcgaattttagatttttttgtgtaaaaaaccgactgttgctcacccctatttctcggttcatgactacgaatcataacttcatatcaagactagtcattgcttgtttaaatgtaaacagatcatcatcatgagtgtcaccaacaaccaagttgatttcaccatccaagtcataacgaagtagtttgattgaaactcttccactacggcgaggtaatgtgactttcagaaaagaacttcagtggtaatgtcctattcagttgtctcaatttacattggttcaacagaaagagtgagattattctctacaggagtagaagatgaaagaacatctcttgtagatataaatctgaaagcatttcttttaacactattttgctacatgctttgagatttttgatatgattattttctaaaaaagtagcatttgtagaaacaaatact

SEQ ID NO: 60743 - DNA, 1846 bp, Cannabis sativa
tctctctctctctctctataattcggccctatagtgtattgagtaccagcccactctaatcaaggtggtactcagatctctatggaaaactgcgtggtttgtcgttgttcgtgttagggaaagttgtttaggttcatgatttggcaataccttgttaaagaaatagaatcaagggttagagtgattaagcagaaggagtcacttatttctgttgtcataaatgtgaggaatcctaaactttatatgtgttatgtcgttttaaaattttcatattttaggatattatttttgtgataatcaaacatgttagtaaattaaaatcttagtaaaacaagttctaacaatggaagctcaatccttattggagagtaactgtggtagtggagcagctccttagatgaagtgcaacaacctctttcctcgtatggaagctggccataacctgttatttctataagagatagttatgatcattaagtctgattaagagattgtggttgaagtacacagtcgaggaatccacaatttatttgttcttcgatcagttcaattgtggtgcaccagaattgatccctgaattgagagatcccccatggtcagagatagtagcaacgccattaatagtgaaaaattccgctttgagaccatattaatgtatctcgacatattgatcagaatgtgaaagaaagagaaacaaggaaagaaatgaaagataaagagaaagattgggagatattcaactatgtttcaatcaatcaaagaatttatacagacagtttctaatcgaacaaactcttagctggatgaagtcacaaacacgagttaataaacttttaaaaaattataaaaaatttattatgctaaaaacgtgtttcaattttttttaaatgtaataaatcattttggataatgcttaggtggagtcacaaaaaacgtctgtacatacagatatttttttaattatgtgtcactcccgtatttaataccaatatttaattaattccttttatattattatttttttaaaataattttgtgatatcagtaaaatgaaagttacttatttttttttaaattaaaagaaaaggaaagttagtaattacatatgtaatacaccagctcctaattcgaaactctaaaaaagatttaaaaaaaaaaatactaataattgccaaaaaaattaaaaaaaaaaaaaaagttagcttaataaggattaataaggagaagtattataaatatccttttgaaagattttagtgtcaaaattttcataaaaaaaaatataaagacttggtgatagactttgtttgtttggtgacttccattgatgaagttaaaaggtgttctttttcattagataattaacgattggagtttgaaaggaacacagttttatgataaattctccttgtcagacgcaagtttcagcgagaagataaattatctcggtgcaagcggtaaggtatatctattaatgtaattgtgcattttaatttatctatattttttttatttggattttgcgacatgacttcttttttttttcgtcaattgtcaaatttgcaaggttatgtggtatgaatcataatctatgatacatattttgctgagtgtgaaatgtgaaagatttgagcataatttttgtagacattgctttatgagaattgaatatgaaaagtccaaaaatattaaaaataaaggttttgctttgttttagtttctgggaaggattttgataactaggaattaaaaaatatgcataatataacaaatttagggatatgattttgtcccgttgttgtactttcacggattgtaatccgtgatgtacgtcagccgtcagatg

SEQ ID NO: 60744 - DNA, 1665 bp, Cannabis sativa
catgaaactattcttgtggaaattgtgtcaagatggtttaccatttgggaataggctgagtagaatttttggtaatgtagagagttgcactatctgtgttgaaaatattgattcttttgccaatctcttctaccgttgcccattggctagagctctttggttctttagtccttagtctattaatagtgagtctctaggtttccctaactgataggctagttttaggtgcatttttataaagtatttttagaggcgtatttcaattgattatattcattttttttgcagaattacgcttgttttctacttgttttaagtttaaatggtaaaactcataatatgaattaaaaataagaagaaacatgttaaatgagatgagtatggtgaatttgtcatggaatttgattaatcgattcctttctttcattgttgtgacatagggtccgggatcgttaatctttctccattttggtcgactgacatacttgaattgggacttgaggtaagaaagtacttccgtaccatagtatgtcaagatacgattactatcgtttatgactcgattatgattgaggtaaatatacgatgattaccattgagcaagagaaagccatgacatcaattgaaaccactgttaggtttcatacttgtcgattatcttattagacaatgacaaaggtatgtggatgttgggataaggcatcatggttgtcttattaggcaacaagagaggtgtacagatatcgggttagggcattagggttgtctttttagacaacaatagaaatagttactttataaagtaaccgctatggcttgtcttattagacaagtacttgtgtattactatttaattatattactattttgatttagttatctgattaatatgtatttatatttacttttctttctaagtctttgtgactcataagtgctttgtggtacaggtaagggcaaaggaaaactaagctataagtgcgttgtggtacaggtaagggcaaaggaaaactaagctagccatgagataacagtcttctttggcaaatatacatatcaacttatctgcttgtatggtcgagctgtcaagagatgtttagttttacacttgatgtgtattttgatctaattttgtatatagcccttttgtaaaaacttttgtaacatgggatcctcgaaatagatttttaacgatgtaatcttattcattgctatggttttaatttaataaattttttattataattgcgaatttcattaaattgttaatctactattacaaatttacatttcaaaagcatacacgtggcaactttaggtgttagggcatcacacacttacatttgggtttattttttcttttcttttcacaaaataaatttgaagaaaccctagaatcaagcaagcaacaacaaaatgcatatatattccagtaataccatgcatgcaaaaatagggaaaggaaaataaagaaaaagcttaaaagaaaattacttacacactattgtgttgagagttgaatttcttcacggaagacgtttggaaggaagcaaagctcgcacagcttgaagaacaagttttcctttttctaagctctaagagttgaagaactggtaagaggtctaaatgaacttggaaatccctcttataaacccaccaaacggt

SEQ ID NO: 60745 - DNA, 1349 bp, Cannabis sativa
cccgccgatgaggagaggcagcagcttcgagttgccaaacacaactacgccatggatgagtacagcagggggaatgcccaggtggaagccctaaaaaaaggtcttacaggaggctcaaaaaaattccttgcgcgaggaggccttcaagaacgcatgggacttgaacgtggacctactgacagactggttcaaccgcttcgtcggccctgcccttgctcccttcgcctccgaactgactagccaatttatttcccatctgacccaactcccggccaaaagatacgcaacctgcgcttccacaaattccatttatcaagttcaggatatcagcgctggtatgaccgtggtaagtctttgttactggttttttctttttgtttgtgctccactctgtggcatctgatctctcatacttaactcattttccttaccagatcgctgtagagactggacgtttctcaaagactttgatagatcatgggtacattatgtccgagttcgggggcatggacgaggccatgaagagtctgagagacctggcagctgagaggaaagcgttctagaaggaagcccaacagagggaggcataggcggagaggaggcatcaggaggcgttacaagacaaggcggaggagctgaagacccaggacgaggtcatgactaaggcgaggcgcgagctgagggaggccaaggaggcggtcgaggatctgactactaggctgaagtctatggaggagctgcatcaagcggacttggagacgacgaccaatttgaccgttgaggtgaaggagctcagggattttaaagatcaggctctgaagaaggctaaaagagatgagctcctagcccctgttgtctgcaatcattgcactaagtgctttgatgacggtgtttttatggcctgatagactaatggcaaaaacctcaagctcgacttctatccaaagcctgaggaagtccttgttcgcttctgggagaagaagaagaggcttgatgccctgctggaggagcgcaggggcctcgtcttccactccgtattgattaagccaaccatcatccattactgcttttattactatcttttttcccttctttcagacaattttatcttttttctttaaggggagacaatttaaggctcgtcccttggcccttaatatttttttagagctttctactgggtctgaacatcttatatctatgtttaaatacatactttgctttgctttttaacgtcgttaaacttttggcctgttttacatttgtccgtgtggtatgccttattaccccctgagtgtcatgaaaattatttttagggcactcatctttacaaatattaatttagaggt

SEQ ID NO: 60746 - DNA, 1127 bp, Cannabis sativa
tacgtatttatctgacaacgtaattacactgtaactacgtaatttaaggtaattaatatgtctcaattacactttctaattatcacgtccctataagaattgagtgtaattatactatgtaattactcaaaactttttattttaaatattaagtactaaaaattattattttcgtaattattactaactatttttctaaacaagacattaaaaatttataaataattactattttatatctaaaaaatattttatattttaaaatataatataattattactctaataattatacaattacttcaaaccaatttctaatattaaataatggttagagcaactcaaccattaatctaacaattattgtgagaatgaacaaaacacaaacacaaataattttggagacacacacacacaaaatctagtccatgtattatataacttatcaccacacataaaccttctccaacaaacatgcataacactagtgttttcttttgcttttgcttgagcaacacaacaacaaccttgggcaaataaggaagaaagtagtagcatagtagtaggagtgtggtgtatgtttattcatttatggcttaaaaaaagctttatggtgaaaacaacagaagcatagcatgggatgtcaagaaagtgaaatgatgttgtaaacaacaagttacatacttactaactcttaccaccatcatcagcgtcatactgttattggtataattaaatatcaggtctcatataatttaaaagaataatttttaaaaaatatcgctaatcaatcataaaatatcttcagtaaaagatattagttaccactgatacctaataacaatactgatcgtgttactataactacaacacttgctacttctacaacattttttttcaagtgtgccaaacaagcaaagggtgaagaaattaaagagagagagagtcacaagtcacaagacaagactacaaaaaagagtgacaaagtggctgacttaggtggggtcaagtctccacttcaacaacaccaactcttctcaaagcaatgccacgtcagcattctagtgatttacgcaacaccccataatatatatatattgtttttaagtgagaaagagagagagagt

SEQ ID NO: 60747 - DNA, 884 bp, Cannabis sativa
catagctattatttgatcaaaaactactgtagatatgatcatgatcacaaccattaatatagataagtgtatcatatattcaactttgatgtatgattgaatattggacgaaattagtaaatatatattgacacgtgtatgaaatgaattgaatctcacatacataaatttgtaagatatattttatcaaaatcagatgaccgatatgatatagttatcatgtccaccaactaatatatttattttggtcttattttgtgttttatattataaaaatttttacttttagtcataataaaatttataattaaaattaaaaagaattgtgactaatttgtaaattgtcattcttacattgtgactaaaaaatctgtgactaaaagtattagtcacaatatttgttgtggctaaaattaaattagtaacacttggtaattactaaatattatgtttagtcataactaacttttttgttatgactaaaaaattatcactaaaatctaaaaatgattattttttgtagtgataggtgaactttctacattcaaagtagaagttttggctttgttgcatgctattttttcatttttttttttattgctggttaagactttgtataatttaaatatatttaataatgaggtagtagtcatttttattgttctaaatttttggagcatcttttttttttttttttttttcatgttagtcgtaatttcaatattacagttcattgattggctataagcatatatataatatagttgctacagaaaataaaaggaacgaagttactgaattaaaatctaagttgagtctcggactaggtcgctctcttaaagacgttcgcgacactgctcagaattgtgcaagcacactatcag

SEQ ID NO: 60748 - DNA, 786 bp, Cannabis sativa
ggagtcctcagctttttgtacgggtcagaggtactgtcagcggttgggttatcatcgctttggttggtcagagcatcgatgttggctgcgtcagattcttctttgtctttttgggcctcacaaaaactaagatatgcctctttgttttcattgaggtaattaaagtttgcttcttgcccgctcaataggtacttggccacttagaggagccttcctcttctttttcttcttgctcggagcctctgttcggctacaacctcccctgatgcctcctcggtccttggtacaaagtcatatgggtagagcttgtacttgaaaaaattagcttcaatggccatgagagagatgtttcgatcatctaaagggagttggagaatttcttgagccctcttcctaagttccagcgtgaatggaggttggcagtaagatggaatatgttagaaactggtatatgtgtccattcccttgacaaagtaatagtcctcccctcagtattcgtgttatcgttcagccacgactccttgatctaagaaaaataaaaatacccagacctactttgcttaggtctcgacttcaggtcgaacagccagttagtattgttaggggatggctgaccccatccttgagaggcatataacacgaatagggcagatagatacttaaggttggtgggtatgaattgggttggactgatatggtaataattggccatcttcttgaagtaaggatacaaaagcagcattgcaccctatttgatttgaggccctgaccaagcaaaataaccct

SEQ ID NO: 60749 - DNA, 1139 bp, Cannabis sativa
aattgataaaaaaaattattaaatgttttctcataattcattggaatgttatttcctttaatttcaaaatataatagtcattctaccaaaatagtaaaaaaatcattccattaaaataatatttcaagactttaaaatacaactaaataaattaatggaataaaattatgggaattacccctctatactattttttatcttttttttttcttcaaagttacagtttgagttgctccggtggtttctatgtggattgctatgtgaattttagttacaatttagattgctttgttggttgctatgtggatttctatctatgtgtattttcataaaatgcaaaaaaaaaaaaaaaaaaaaaaaatggtttgatgtgtaaaaataaaaactccctaaaaattaattcatttctattttattaccttcaatcaaaccccactttagagttctaaccacaactgaatgaccaatcaatagattgatcaggaaatgtgttaaaaattattttaccaagatctaatttaataccatgtatatttgactattaacataataacctaacaacctaacatataatctatcaaacaatgaaataaacacgttagaattttggatatccttacattggttgcaacagaataaatatgactccttcctttcattcactttaacctttgattccctttctgcagcaagcactactacaaaaaggcttattctcatcggtcctcaaattagttttttttttaggaacgtcactaataaagttgtgtgactatttaaagtcgtcgactatagtggtttatgttggattttatgccccttaactaaaactcttatttcaaatataatcttaaatatttatttatcaataaaggaacaaaattattttattacttgtttaatatattgcttggttcacatgtttatttcatgatcatttatttaatttataaatttatttaaatccttatcacattgttattcatgattattgtattatctacgtagtgaaaagtaatcaagattatgtgatataaaatatacctatgatttatcagtacacaggatttctacagatatgataatcaacaatgtaatttacttacacttggatagtgttatgtcttttccaaggcatt

SEQ ID NO: 60750 - DNA, 1182 bp, Cannabis sativa
agtttataaaatcacacacgtggcgtccctatagattaggtcgttacactggaagtcctttagaattttactttcaccattttctctactcaccatacccagagcaaaaagaaggaattttctccaagtttatcgtgagatttctgttagagccacctgagcagcttcgactggacttcgtttaggcttcaaacattgaataagttttcaatattttctcttttaactttgcatgtttaatttctgtgtttccattgtagaaaatgccattcttctcgactttgcggtatacgacattctgcctttaacctcgcattattcgattctcaccttgctcattcgaagctttgtgaaatttaacccttaacccaaaattttcaaacttctgggttttgacttaatttttgtgcattttttgtccttttaatctgttgagtgctcttggtcggcatatttgcctgtttgttgttcaatatcccgggcaaacactcatctcgtgtgttgtcttttgtagatgaaccctagtgagttttggggaggcgaacaccgaatcgaccaggatttacttcaaattctgtacgaggatcaacctcgtcttcgtgccagtccgtcctcttcgagttacggactttctaacttaagctttgaagattgggtggtgagtagtgatcgttctcctactccagaacccatagtgcaaaaccaccataactctgagcagatcgcaggagaggggtacgaccgcttcatttgggagtagaagaaaggttggaagcattttcttccgtccaactagacatttattgttcgaccaggtgttgctgatacccttcctgttggtcgtccaagctcaggtaactttggcatcccaattgatgttcccaccatcactgttgcacgacatacacatcagtatccgtccaagaggaggatgatggcccgcacaaagtagacgatgcagaagatcaacgcatctgatactcatgtggcccagctcgccacactaccaagtgccgaacaagattcgcccgccatggaggagggacatcataagggggacattgaggtccaagagattgttgagcaggacgacgtccgtcctggcagcccttctgaggtcgaggaggaaggagtggctgaacctcaaaactttggaggggataatgaggccggggggccagt

SEQ ID NO: 60751 - DNA, 1191 bp, Cannabis sativa
agacaagaggttgctctgatccgcaagtgcaaaggcaagatggtagctaaggaaacatctaagcggccgcggagagtggacactccggccccgagccatgattctgggatccctcccgaggcagaggaatttacagtgcctcccaacatagtgctgactccggttcctggagatgaggcgaggcaagagctccggatagccaagcacaattacgccatggatgagtactcccgggggcatgctgaggtggaggccttgaggagggttttgcgagttgaaatgcaaaatacccttaacgatcaaaattacaagaacccgtgggatctaaatatggaccccctgacggactggttcaatcgttttctcgggcctaccttggctccttttgccgcggagatgaccggcgagtttttctcccagctaacccggtgcgctcctaaacggttcgctgcttgtgcatccttgaactccgtctttcaagttcaggatcttagccactccttgaccgtggtaagtattccgtagtttactttttccctcattatttttcttaaggactttactcactcttgcatccttttccagcttgctgtagaggccggtcgcttttccaagaacctggtcaatcacggcttcgtcttgtccgaattcggggacatggacgaagtcgtgaagaccctgcaggacctgtctgctgaaaagcgggcgttgcaagaggaggttgcgcggcgggaggcccttgctaaggccaagttcgaagaggctaagcaaagggaagcccaagcggaggcgatgatccgagagaaagcccttcggagggacaggctggaggcaaagcatcgggaagagctgagggcggagggtgaggttgttaccaaggccaaacgcgagctcctagaggctagggaagccttagacgaaatggccgccaaggtgaagtccttagaggaattgcaccaggcggacttggagtccagggcaaacctggccgtggagctgaaagagctcaaggactttaaagaccaagccttgaagaaggctaagaaagatgagctcctttctcccatctcttgcagtcgatgcattaagcgctacgacgatggcgtctatatggcctggtcaacaaatggccagaatatcaaggttgacttctacccgaaacccgcagagatgattgctaaatttcgggag

SEQ ID NO: 60752 - DNA, 4047 bp, Cannabis sativa
  modified_base (4004)..(4022): a, c, t, g, unknown or other
aaaactgccccaaccggtagatcggttccccaaccggaatttcagttttgggaaaaattcctcgaagcgaaccggaattccggttccttcaggcccctctgaaccggaattccggttcagtgcaggaattactaaaaatttcataactcaaccaaaacaaccccaattcaatcaaaactttccagaactattctataaaacctagagaacatattcaaggcaacaaaacaaccacccaaacatagaatcaaaatttgccattgatgagtcaagcttgagttcaaaaactcaaagcttgctcatccaactaactagctaacaaaacctgctcaaatcaccataaaccaacataatatagataccgaaaacataaaccaacaacaacaacaagtacagcaagcaaaacaacaattcatgcaaaactttcttttccttataactcaagaaattaacaaaaagttactagaagcttactacgaacttgatatcactaaatcgttgagaaaacagcttgaaatccacagaaaatcacccagccctagctgctctaagggagggccgaaagagggagagacttgagagtgaaaaagtgattttttttctaacgctctaatttttcataaaatcagtaaatgaatgattttccttaattaattacattactttagccaaactaagctttaaaaattagatttaaaactaaatattaaaccctcactaaagacaaaactcaataggcaaaaagaccataatgcccttgcatatactaaagagtcatacaaatcacttagggtatttcggaaaaactctaaattcccggctaatcttgacatccccaaggtctaacaataccgtcgcgttatactaaaatatgaagatgtgattctacagagccatacaccgcgttccaatgttgttgggcactgaacatgcaaaaatatgaaatttctatatatgacatataaaatgcattctgaattcaaataaatcatcataaattattaatttagaattaataactaattttcatatttaaaccctaattatcagctaattgccaaattaaagctaggcggtctttacattcaccatcataattcgagccttagtgatagagtacctgcccacgcatatcaaattggtacaaaatcatagtgtgtaagactgtaaagaatccaatcaaatgaagtaaaatcgggctcagagcttgttgatactctcactgcgagaaattcatttattaggggcaagatgtcttttagaggcgacatgtcgcccctaaaagatcgcctcaaaaaatctgcgcgtaaaagtcccattgggggggacaaaaaagtcgcctgacctaaaagtaaaacacgaattactgttttttacttttggaggcgacaatgtcgcccctaatacccaaaatatcccccctaaaaggtgttgcccaaatttttatatttaacttttaggggccacattgtcgcccctaaaggtttttaaattaaaaaaatatatattatttgaattattaattttaattttttaattttaatttataattataaaaaaaaaataattataataacaaataaaataaaaattaataattaatatcatataatgttttcattaacatagcagctcagtaacatgataaaattaaatagttcttacaaatataatattattaactaacacaacttaaaaaacaaaataaaaatataatagtaacctttcagttctataagtgaggcaaaaaatcatttcatctttcgttcgcattaaactctggatggtttggtggctggcacttgatgtggttgtagcggttgtgatgtatgcagttgttgtagctatgatatatgtggtggttgtaatagatgtgatccgatgtggtaacacaagaactaatttcacaaaaaataaaaataaataaatgaacataaatttgtatacacaaatagatatacatacttatattatttaaatatatatatcacacacaattttatattcatatagaaaaatataaatttacatatgcacaaatataaatatatatactcacacactatatacatattcatatatctatatctttatatatatactcaaacacacaacatatacgcatatccatatatatagatacacaaaaatatatataaatttacataaatatataaatatatgtatacgtacaaatatatattcatataaataaacataaatatatattaatacaaataatatatacatatatatacagtaaaagtgtcaaagaaacagtttgaaaaaaaaaattagcttgtatacataattttttaactctatttttgcccacaatcttagtttgtacatctctatagtatatagtatcagaaaaaattaataaaaaaataaaatccgtgaaaaaaaaggagaatagaaaagtatcaaaattagagagagaccatccttattatcaccaatcaatctataatttcttctctatagcccaaaaatctaaatacaaaaacatgtttgacaaaatattataaaaaaatatattaaatgaaaaatttataatatcaatatacactagatatgtagtgagaatataataaaaaaaaattattatatatacttataaacttacccaaattttctatgaaattaacggttgggaggagcgccgttgcgggtgctgtgcaggggtggctggtgatcggaggtcggcaattggtgatgttttaagatggaattaggaatgagattggtgatattttaaaatgggttagagttttttttatagagaaaatgaaaaaaaaatggggaaagaagaagagtaaatggctcgagaaggggaagtatgacttttaatgtacacactattagaggcgacaattggagcgaaaatgtcgcccctaatgcctagactgtgtcaggtggcaaggtattaggggcgacaattggggcgacattgtcacccctaatagtgtgagcgggaaaattaccccctaaaagtaacgtttgatgttgaacttattaggggggacatgtgtcgcccctaataattttttgtcgcttttaatacttttaggggcgacacatgtcgcccctaaagcatcctatttttttttaaaaaaaaaaatattttttagggtcgacaattgaatgtcgcccctaatacccttactattagaggcaattttttgtcgcctcaaatgtttgtcgcccctaaaagttatatttgttgttgtgtctgctatagaaaggatacaagggttagagatttgagtggaaaattcattttattctgctgcaaccaatgtaaggtttcttgaactttacatgtatttaaatttcattattttagaaatttatatttaggatgttaaataacatacatagtagtaaatctagatcctggtaacataatccccaaaaggctgcctccatctccaaaatctggcctcttcctctgaaggttggcccccatctttgaagtcttgtctctacctttgaaggttggccccatctccacaagctgaccaccatctccgaagtctggcctctacttccaaaggttggccttcatctccaaagactagccaccatcttcgaaggttggcctccagctttcgccaatcacaaaggtatgtaccactaattctacccaaacctccagtggctatatacttaggggtcgtcattgacgaccctaaattccaagcgagaccaacaaagccagaaagcctatgctcggaaactctgtcatgagcctaaaagcaatttcatgaccggagaagatcgaggctctaagtaaccaaaacttggaaaccccaaaatctccttctcaaaaggagatcctaccaaatgtagtttcccacgtaaccaccacctggtcgttaccgcacaaatttgggatataactataataagataattagtggacaatggagcctccttcaacattcttttcataattaacatctgaaaatatgaggctctaactgttgggttttatgccnnnnnnnnnnnnnnnnnnnatataatcagatttacttattaaga

SEQ ID NO: 60753 - DNA, 699 bp, Cannabis sativa
  modified_base (310)..(316): a, c, t, g, unknown or other
caatttcaaaataaataaaaaattacaactcataaaccaattagagagttgtttgcattaaaaaacataattactaataccacaagcggaagaggctaatttcagcgcgttaataactatctctaagtcactctcgatcaacacaaaaaaatacatctagaaaaccactaattccattgctaacaaacaggtcgttgttttcccaataagcaaatcagagaagttgagcaatatgatagctacccacaaaattgattcattttggtccctagccagcgctaccacacacattgaatcacaaccaactttnnnnnnnagttgattttgacccaatctttcatgggcaaaccaaaaaggaggctcaaccgtcaccggcgaaaaaaaatggcaagaactataatctgcatgacacaaagaaatagaataaatgtaatgcttaatgttacaatttaaattattttgcacattttcgtttcgggatttccaaatcctacccaccacaattggcgcatatagaaaaatttctttgaccttcattgccctagactccagatcccataagaattttacctaatcccacatacgagcttcagagtctaacattggcatcactccccaagaggaaaccctctacagatgagaagcaaagttgcagtagaggaagaggtattccaaagtctcctcaccctcaccacataa

SEQ ID NO: 60754 - DNA, 2677 bp, Cannabis sativa
tgcattaacagtttggtgctttcattgagagcctacgtgaaaaaagctcagaaaaattcctcctaaccaaagaagagattttttctccatggttgacaatggggaaaacgttaacactcatcctgaagaaactactcaccgtccttgaaaggagccggcgggctcacggaggccacccaactcacgaacaacacattcaacacgatccacacgctcaaggtggagccaacgtgatggtgacaaaaacccagaaactgggaatgaagaacccaacgcaaatgctggcggttctcctaggagtgagggtgcctatgaccccgccagatatgtaccgtttgttgggttagaaaatcgccaactccagcgacgttttgaggaggaaaactaatgaaacgctgagttggaacgagaggcagcaacaactagggcgactcaaaaaaacaacgcacaaaaccaacctgatcatggagtgaggaggccacgaggtagacctcgcagctcacgaaccaggaggaaggagacagctcaggaggaccctcagaatgctcaggaagaacaacctggggaaacagaggatgcacctgaagatgaacaaccagatgaccaggcacctcatcaagaagtgccatgtagaccctagggatttacaacccaggggaatgtaaattgtgatttaccagaatcctctcgcaagaatgccagtagaaggcaaccccagacaagggaacaggaaatccctcgtggtaatgagagagatcttgggactcaaactagggcaagtgggttgaccccgagacaatgtcaatatccttctcgcactgatagggaaggggctaatacaaaccctagtagagggcatgtatcaacccattcccaaaggagaaggacgatgcgtgatgaggcaagttctagctcgggacatacaagaacacgagatcatagtcgctcttgaggaggagatagaacttgtcgtagtaatgatcgagagagtacaggcacaactagaacttaaagttactcaaggacgaggtctgtaagtaactatgatccacaatggttggatcttcgtgagcaattgaaccagaaaaaacctaacctacgtcaacaactcaatcagaagcaagaggatcctatctaattgcgaatcattgagttggaggacaaattcaggagatatcaagatggggagtatgggaagctgcctggatacgactcggatgaagagcccgagcgtttccatccaaacattatgagcgctgaattcccccagggatttaaaagcccccacgtgttgtggtacgatgggactacggatctggtagctaacagcaaatgaagaagtgacatttcaagcagcatgaaattcctcaaggtatgtgattgcaaaataaagtatcacgccaaggtgtttaagttttgttttgtaacaccatactagtttaggcgagttatcgtgattttaatactatctatgcaatccattgctaatcaacgggtttttattaaaaacgtgactaattaaaactttacataattaacctttaaataaaaataaataatctttgcataattcaagatcttgtatttaaaatatttacaaccatattacaaaatattaattaaaaaatttgttgcctagcaactattcaaaataaagtctgctatcctgaagatcgtatgctccaagtctaaccacctcgacatgtacaatcttcatctgctcgaactcactactgattagccttagttttgcccttacatacacatgcaacagtaactgtgagtagacagactcagtaagaaaagtaaatcataacataaacttaaacttgattacaactaggaacccatacacccaatcacaaccctatcctgcgtcccacgtgtactgagtcaagaacgttcatacggcattactattgaccataatatcagtctacactcagtactctagtcatgccgatgtgataacgtcaatcaataattagccaaacatatactatctaattcagtgcatctctatgtatactaatattgctactataatatgttatctatctggcattcataaacatgcacgctaaatatgtaatcacatatgcatatcattatactagtcttacctcgattctcgattcaggtataccggtcaacctgagtggaactgctgctcgatgatttacaggcccctaagtaacaatatacgcaaaactaataagtgatgaatccatatttgtcttataaatatgatcaattaatgtattaatattattaaattgattctttaaattattgattagtgtgattttaattttttaagctattttaagactattcatgcatttagagtctttcagagggattttagcatattttggtggaaaatagtagaagccggcaagctcagttttacaaggcagaacttaattacaaatttagacaatcttagaagtagacctggacttagagctcaacataaaagttttagatctcgttcttagctttccaaaaaatcttgaatcgtctaattccgagtaacatatcaatagttatggcaaaaatactattggtcgtcgtagtagaaaatttctgaaaaacaaaaaagacaaaaagatagcaaaaaaaaaaaaaaaaagataacttttcaagtagagttgggattttctttttttttttt

SEQ ID NO: 60755 - DNA, 1312 bp, Cannabis sativa
aatactggacgaaaacagggttttaccaacgaaatttgtcctcagtaatgctcatttttcttgtagtgcttatatatttatatataaatagatatataaaaatattacgtaaaaataagtttcaaaaaataaataatttgtgtactttgaaagatatatacaatatcatataatttgttttagatttattatgataattaagtattagtgtttaattaaaggaaaatgaaaatatactcaatcaaattaataataaccatgatgcatgatgtactaaattacatatatatctaattataataattgacatgttcttaattttctttctccaactacttttatttttgtttcatatatagagagagagatcaaaatcaaaagaaaaatcagctgtagtttaattattccatttgtcacctgtttttggtagattatctttttcatcaatatgtcatttccaatagaatgtgttccatttttctgccaagtaaattattaattatttctatttttattatttcttttcatgttttacttttaatttccatggatgattattccttaatattgaaaggtataaattatacgtgatcagtgtattttattctagactaacaaaataagacaactgaagtaataaaaatcacaatttggtcctaccattaattagtagaacaaaacaccaaatataaatttctctttcaaaatagacctatcgaaattcaacatcttgacatttttttaaaaaaataaataaataaataaaaaagttgcaaacattattgattcaaatggttttgaaaaatgcttttaaaaaaagaaatggctttgtaaaagatatctattgtactgtattagaatgattaaatctataaatatatgtataattatatcgtctaataaaataacaaacacttctcatcatcataaataataatacaatatatcgttaaaataaatagcattattattaggacaactagccaacacgagcggaacttaaatgttttattttaaatattggttggagtgaatgtagcgccttcaactaatatgacacagaaggctagtcttgaattttagtgggtcataaaaaaaaaaaaattaaacccttaattataaagaaatgtgctatttttaaaatagtaaaaaaaattatgagtattttaaaaagaaaaaaaaaatgttagggctcttaggttgaatgggccctaagcgcagatctagctcacctatgaccaagatcagacttgtaataaaatgggtgtcatcctaattaatttatttatttattagaaaaaaaattattttt

SEQ ID NO: 60756 - DNA, 1229 bp, Cannabis sativa
tttttgataattattaaatagatataattgatatttatagagttagaattaaaagatggcatttgagaaaagaaagataactttcaataaaatggcaaaattgaaactcatgaggcccacgaggaattcgacaataagggtttaaataaagccaattttatcattttttttaattctatttaattcaaaacctaactcactgtcatataaatagaatgatatagctcctattttataacctaattgactcttttgtcagacaaatagaaaataaacagagctatctctatttttcgaatttctcttcttattcttctcaaaaattttaaaccctatagtgaatgagtgattgcccacatgattcaaattaatactcaagatagtataaaagattgtgcagtgttcttgtcgcttgaaggagaaactaggttcagatcttgatcatactgtacaacagaaaggatcaagggttagagatctgaacgaaatgagtcatattattccactgtcattaatgtaagaatttctataactttatgtgtttaattcattatttttaggaaattcatatttaggatgattatagatttataatcaatatacatgttagtaaatctagatcctggtaaaatatttctaataattataaccacctataactatattttaaattttgaaaaaataaaataaccaattatttattaaatatataaaatataatataattataggcttataataattttaaaaatttaaatatcacttaaccataatttaaaattataaataaccaaccaatttttaaaaataggtttaattaatatatatatacatataacattttattattaatataccaaaataaatatcatatatttttaaaattatataatatatataataataaatccaatattaattttgaaataaatattttaacttttaacatatgataatgcactttttaagattttaaatataatctattaaaaaattaaacatattatttaataataatgaaaaaaaattatattatattataatataatatatatacatatatatacattcggacagggtggaggtcaggccatcgtgatcgagaatggagacttgcgtgatcggtggcttaatagttgtctgggtcatgactttcaagtggagtagggtgggacggagcaaagctcctagtgtgagagattgggtcaaatgacccataaggccatgaa

SEQ ID NO: 60757 - DNA, 1163 bp, Cannabis sativa
agggatgagtttgtgcactctgcctcgaagtctacaagggcttcaccctttatggccattcttggttgatatgtgatgtcaaactggccaactttaatggcccacttgagtagtcgacctgatgcttcaggtttctgtaaaatctactacaatcgttgattggtgtacacctttatcgggtgtgcctggaagtattgccttagctttctagaagcaaaaagaaagctgtaggtttgcttctccatgagtgggtaccgactttcagcgctaattaatcttttactgatgtagtatatagggtgttgtacaccattttcttttgttgttaggacatcactcacaacatgttctgtgactgctaggtacacgcctagctctttattgtctaagggtttagacaacacaggtgattgagccaattgttttttcaactcttggaatgctttttcacattcctctatccactcaaattttttgttgcctctgagaatgttgaaaaagggtacacacttgtctgtagacatagacacaaatctgcttactgcaacaatgcatcctgttaggcattgtacttctttgatggttgtgggtgacttcatgtccaaaagggctttgatcttgtctgggtctgcttctgttcccctggcattcactatgaagccaagaaattttcccgagcctactctggaagaacatttaagggtgttgagcttcatgttgtagttgcggaggattttgaagcattggtctaggtcctccacatgcccctaacccttttggacttgacaagcatgttgtccacatacacctcgatgttgtagtcgataagatctttgaacatttttttcataagcctctgatatgtggcccctgcattttttatcctaaagggcatgactttttagcactacaggcctaagtctgtcatgaagcttgtatgctcctgatctggcagatgcttctttatctagttgtaacctaaatatgtgttcatgaaactcaagatttgatggccagctgtgacatctacaagttggtcaattcttggaagcagaaagcagtcctttggacatgatctgtttaggttggtgaagtcaatgcacactctccaatttttgttgggtttgggtaccaacacagggttagatacccaaagtggatag

SEQ ID NO: 60758 - DNA, 829 bp, Cannabis sativa
ttctcgcttttactgggtcagaaatatcgtgtattaaacacgtctttaattgttgattctggagatgtcttgacagaaacttgattgtagtgatcgcaatggtgagctggaaccattctgttatccgagatcgacaacatacggcgatcgcggatataagaaaatctactgagttgcccgggttgtgactctcacttccattagttggatgaaactataggaagttttctcgtagcgagatggtcatctcgtattattgtactccgagctagttcgtcttttatacttagtctgcttatttgtgagctgaggtatgtgttattcttctctagtgcctcgctattctttttcagccacatatggtttcttgttaataatctaagtaccagttcgtacattgattcctcaccaaagactttacaatcagcggattgcaaatatactctagtacttccacaattaatgagatattccataaaaaagatacggcaccgattcacattctctttatcttgacacgtgttctacagccaaatttcgggtataacacaactgatttgagaagaacctctttacctcctttgaagaaaaccttgttcttccaattgttaagatgattctaaattttatctttaaggtattggaagaattatttcttggttcggccaatatattggggagacccaaatatttcacaaaggttctctgacaaggatacccatgtaatctgagattagggttatttccttgagggtcgtgtttggggagaattagagagaggatttttgaaaattaacttgtttcctcctagccttttcatagtcgagaa

SEQ ID NO: 60759 - DNA, 1783 bp, Cannabis sativa
cgaggctgttggcaacgtctatagcccatccaaagaaaacgtcggagatgatacacagcggtggacgaccgtctttggcgatgatgtctcggatgagttgacggaaaggagactgaagagagagtgattcgtggcagaggtccggtatcttagaaatggccaagttctctgtgctttgacggtcatgatgggagaagggaagttcggcgaagaggatgtcgtcgccatggttggtggactggcggaggtatttgaggttgagagctgtggtggctatggtgatcgtaaaggcttttgatgtgtgcttgatttgtcttgcgagggctaagaaggggctcaaatggccgtgagctagaaacggaagcagcacaatgtgatgtggatgatgaagagcagtaggtgtagccataatattcgcgtgtgatattttaaaatgaattggttcatcactatatatatccatatatatttatatataaatcaccatacagaaattaagcaaatatatattaaagttatgcatgtagttaattgttgtgagcccatattcattattaaatgaatatacatataatatatataaaatagtcctacataattatacaatccaacgacccaaaaccagttctagtacgatgaacagtaattagtaattatgatgagttgagaggaattgggagagcttagcagttttcataccattatttattgaggaatgctaagaggaactttacgtgtcaagcatatgtgcaattcaaaatgatatttatttatttaaacatattcgtttgttatctttatttgtttctcatgtctactatgccaaattctttaaatgtttattagcacttagtgaatggtgagaattttcataagtgaaaatttaatcagaatgctggtttgtgagaactacaaatttatcttaactgacgagcgtcctcaaaagcccactactaatgccctaaaaaatattcaggacaaatatgatacttggattcaattcaacaataaggccgaatgcttcatgcttattagcatagatgaaattttgcataagacgcatgatcagatggagaatgcatctgaaataatgaattctctacagaccatgttttaggcaacagtctaatcaaactagacatgatgttactcgtagctacatgaataaatagtaagatgaagaaaggtttccctattacaactcatgcattgcacatgattgacctaatacatgaggtagagacacatggtgctatcattgacgaaaggactcaagtaagcatgatctttgagtctctatctccttacttcaacaacagcaatagtagtaacatatgcccaagtcgaaaggcaagcaagcacttaaagtcaagaagaacaaagccaaccctaagtcaaaggaaaagaggtgaaaggcaagtgtttctattgtggcgtgatgggacactgaaaaaaaaatgtaataaatatctcacagagctgaaaataaagggtaaatatgatctacttgatcttgaagctaacttagtggaagatgataaaaaattatggattgttgcttctggagccactaaccatatttgtttttctatagtggattcgtaaagggagctggctgatggacaggtgaccatgagagtgggcaatggagcacaagtgtctgccaaattttttggcaaagtccatttaaattttgacaataagtttttgttattaaacaatgtttattttattcttgaatgtaccagatttattatttttttatctcttttgcatgaacaat

SEQ ID NO: 60760 - DNA, 1339 bp, Cannabis sativa
aaggtggcaataggtacaccaacggcagtaggatgtggttggcccacgggaatagtatcaactatatctggccggacgatgtatgtctagctggatggcaaatatcgtctccacccctttctgagttcccagttgaaacgtctgtaaccttcacccacgatctggtcgggataaaaatgatgttgcacctcaggttctggggaaggtgtacattcactactcacctcccagtcctcgaaactcaaattggatagactgtcacttgatgaggacggactagcatagagacaaggttggtcctcgtacaaaagttggagaagatcttggtcgatatgatgttctcctccccaaaactcaccaggattcgtctacaaaaggtaggagacaagatgagtatttggccgggatatcaaacaaaaacaaataaagtataccgacctggtccaaccataagattaaaaggggaaattttgcatgatttaggtttattaaccaagaatttcaagacttcaaattaaaggttaattttcactaaaccccgaatagcaagcgaaaaccgaatatcgtgaaattaaagtcagaatgccattacaatcaagttatgtggtcaagcacaataaaaattccatattcctaaatctaaattctttacagttttcctaaaaaaagttcaaaactattgaattttctacaaagaaaacccagaaaatcaaagattcaaatatcaaaggagaaaaagatgaagaacttactcactgttcgaagctttgaggttgttcggatgacgctgatcggcactttcttgaaattcttccaaggatttgagagaaaagtgtgttcttgctctaaaatcgtcaaagtaagaaaatgttaaaagtggtttattaggaatttttgccctatttataagaaaattagtaattgtaatcattttgaaatttaaacgcctccaaaaagtaaacattgggaaatcaattaatcaagtacctgaagaacaaccgtcaaaagcgtgcaaatttctggaaaggttcgaggtacgaatcaatcagcatttatgagctgaatattaaagagacctttggtcggaatcacattggatcaccaataggcgcatcgaacacatgccacccgttcaaacatgaattcaaaccgagtgaaatctgcgacttcagaagtcccgtgcaaacttgagggcaaatgttatcccattttttgcactatgacgtggtaatatgtactagtgacacgtgtcacttattctttacacttggctggagaaatgtttcgaacagacgttgagtaatacatctgtacacataaagcctgcttgaacgagtag

SEQ ID NO: 60761 - DNA, 815 bp, Cannabis sativa
  modified_base (354)..(369): a, c, t, g, unknown or other
acccaaagctagacccggacacggttccaaatttgaacccacaccaggattagaacaagggacttagaccctgatctgaagccagactaagatcaggattggaactttagactcggaccgaacctagacgaagacccaggacgcgaatccacacccggaggctgatattgacctagattgccatccggacccgagctcaaacccagaccaggaccaggaccaggatctaaacccaaacccaaagtcaggtcaaaacccaaacagatacctaaacccgaacagagactaggactcgaacccgatcctataccgggacccaaactcacacaataatcaggacctggacctagaatnnnnnnnnnnnnnnnngaaacagaactacgaccgggacctagtacttgaaccaaacctgaacttgaatcttggacccagctcgtgacccgacactagaaatggtgccagactgggactcgagatcgggatccggatctggacacatagattgcacaaaagacgaaccctgacaaggaccagaacccacacctggacatgaacccagccccaagcccaaaagttgacctgaacccctaccctgtgatccaaaattggaacaaaaatcggaagttgatcgggactggaactaggacttagacttggaatcataactgaaattggagctagatcaagaaccgtaaccggaccagcacccggactcaaaattagaccaacacacgaattaggagccggacccggatcccaacccaaaaatggactcgagaccggaacccgaacctaaactcagacccaaacatgga

SEQ ID NO: 60762 - DNA, 533 bp, Cannabis sativa
cataagttcatttatctttttctccaaacatagagaaaaaaaaatagttgcaataattttttttaataaaagtaaaataattgtgactaaaaaattatcattataactaaaaaattcatagctaaaaaaaaagtcaaaaaaatttaatttttatttggcgaatgacagaccagaatttttattgtgcggaggcttaattatcatataaaaatatttaggtccactttaaataatttatttaattttttaggagttattttaatattttccaatataattgtcagattaatcaaagaaaaatatagttactatttgtggctaaatatatttttagttacaacaaatattatgaataaaattaaattagtcacaacttgtatttagatattatattttaactataaataattttttattgagacttaatttgtgatgaccacatatttagacatggaacttagtggtgtattaatgatttaataattaattaattatgattatgcatgctttagtgaaagtgtgacgtattgtca

SEQ ID NO: 60763 - DNA, 1116 bp, Cannabis sativa
gtttttctatttaggttgtctgttgcgctctcatatattaaatattattatattacataaatattttagtttgagtttcttgccaggttgtagctagttagaatcagtaaaaactaaatacaaaataaaaaataaactcaaataatataacaacaattacaacaacataattaatcaagttaaaacaataaaaccagttaaataataaaaattgaacaaaaaataaaaccactttcatcaacaacataatgaaaaaaaaaaaaacacaatggaagaaattataatctaagcaataataactttaaaaaccagttcattaacagtaaaagaaataaaatatttcattataagaggcaaaaaaaaaaaaaaaaaacagtttcatcaatatataacataatgaaaaaaaaaataatgcaaaaaaaatataatctaaaaaacatatcaagtttaaaagtaagtttcatcaaccccaaaagaaactaattatttcatcaaaagtatcagaaaaaaaaactagttccatcaacaacataataaaaaaaatacaatgcaaaaaattataatctaaaaacgttatcaacttcaaaaaccaattttatcaacattaaaataaacaaattatttcattaaaagtagcagaaaaagatcaatttctccaacaatataatgaaaaaaagtacaatgcaagtaattataatctaaaaacgatacaaactttaaaaactaattttgaacgtaaattctgtatgaatatctaataacaaagcttctaacttcattctttattttgacattcaatctttcatttactttctcaaaaacctatgttgatttaagtatataaaatgggtaaagataacaaagacaatcagaaactaaaactaatttcgttaacaacataatgaaaaaaaaaaatacaatgaaaaaatataatctaaagatgacaacaactatagaaattagtttccaacatataaatttatatgaatacctcatatatacataacttcatactctgttttgacaaatctcttatttgtttgctcaaaatttaaaattaatttaaacattaaatatgggataaatattagaatcacacaaactaaaacaaataat

SEQ ID NO: 60764 - DNA, 1046 bp, Cannabis sativa
agtcgaaagacattttacctaatgaacttaagcaaaacttctttgaaagtgtatttattcaatcaaagtggaggaatattatattttgatattttgattaattgattaaataaatgttacaagtgtgtcagacattttgatctagtagaaaattgttatattatttaataatatattatgtagattaaatgtagtatatatatatattattatgtgaataatatatattaagtgtttggtaaataaattgtgaaacatatgatttatttaacctaaaattgtaacctacgctttgtaacattgagagaagttacaagattaattatttttgtaacttcttttgcttgatcatatttttgtgtaataaaagagatgttacccaaaattgatgataggattcaaatgtcatgaaatatatttgttacaaactatattaatactcatttatatgagataaatgagatagtgtgtgaatcctcagtattgatcacctaaacactatataaaaaagtctaatgtgctcatttgaatgaagagttttctatcaaaaaatactttattaaaaaaccttaaggcttgataattctcaaagttattttctagacggtggcgtttggttggaggttatgaatggaatggaatggaaaggaaataatttttattccattcctttgtttggttgcatttaaaaccattggaataccattccaatagaatgacctttccatcatattggtagaatgaatattccattttgaaatggaagaaaagaccattccaatgcaagatttgaaaaaaattaataattttttttttatcaattttttgtataaattttaaattttattccatttcattcctattccaattctcattcccattcctattcttatatttttattcctcccaaccaaacgccacagtgcttagagataaggagaaataaatttttagacaaaggtgtaataccttgttcaagtcatagcgatctccactaatctattataaataaatgtatatatatacatatggaacacttcttaatg

SEQ ID NO: 60765 - DNA, 3350 bp, Cannabis sativa
aaagaaaattgagaatgggtttttgatgagaatggataaaagtgaaaaactttgtataaaaatttgatcttttcaactaaataaagaaaattaagaatgggattttgatgagaatgtataagagaactttatgtaaaaaattggtcttttcaactaaagaaagaaaattgagtcttggggttttgatgaaaatggataaaagtaaaaactttatataaaaaattgatcttttcaacaaaaattgagaatggggttttttgatggaaaagagatgaacaaaaaaaatgaattataataagctaatgtagttgttgaataaataataatcatcgaatttgattgaagatgatgggtcattattgtaataatcataataataaaactaagtgagttatttatttatttattttaaattaattaaagtattttttttttgacttagtaataatataatatctctacaattcctattattttgcaactaaaactaactaatccttatttttctctacactaacgttagtattctgattttttatctttacttgatcatactaaaatactaagtaataatgcttaattactcgtataacaattgaaactaaaacacttaaaaaaaatgtttcaaaattcaaaaatctcatctttttcttcttcttcttcatctctccacaaacctccattgcagattcaaaggagtatgtccactgcaccaagcaaagtcctttcatcatggtaacaaattttctcattacttttttatttgattaattatagctcaaaatatttgactcaaaaaatattatcttcttcttaggattgccaagcctatttcttcttcatatgatattgagttatatgtaagtaattctaaaaccccattaagttattaatactctaattatgattatgatgattttgatttgatttatgtgttaaaactttataggaagttttggctacaaaatgtgctaacattgattcaattctcaaaaatggatcatcacctaaagatgttactcaatttcttggtgaaatcactatgaattcaaagactttagagcttgttataagcttttgtcaaggctatgaaattcatatctcacaagataatgtgattcaactctattgtgttgctcatcatttgggaatgaatgaaactcattcaaaaaacaatcttttgaaaagggctcttagttatttcgaaaaaaatgtactttctagttgggatcaaacactcaagtcacttagaacaattgacaacaacattcttgatcaagcaattcaacttggtttagttggtacttgtttgaattccctaattgcgaaggctctcaccgatcctcgccttctcggtgagccaatcaacaatgatgaaaacactaatgatagtgatgatgatgaggatgaggaagaggaagatgaagagtggccaaaagcgaaaagaaggcttttcggtttgagttggcaacaaaatgaggatcttactacattgtcactcaaactctatgagcctttaatctatgaaatgatcaagagaggtgttccattaaactatgtgacatcttcacttcttaactatgttaagaaaagggtgttaattcccactatgacagagagaaattcagagaaagaaatcattgaagctgtggagaaacttttgccaagagaaagaggactaatcataattccttgttctatattgcttgagattctaagatcagcaatgttattcaatgctagcttggaatgtttagaaggtttggagtttagaattggaacaaatcttcatcatgcaagtgttaaagatctcatgataatctctcaaaaccgagttgacattgattgcataagaaggattttgaagcacttttatggaaactactcaagttctcatttgacaggtttgattttagttgctgaactatttgaagaattcttagctgaaattgctagttgtgatatagatttaaagttagagactttcatggaattagctgagttatcagttagtttatcaatgggaactaatagaaactcagatggattatacagagctattgacatttacttagacaaacataagtacttaaccgaatcagagcgagagaaagtgtgtcaagctttagatttcaacaacatgtcagaagaagcttgtgatcatgctgcgaaaaacgaaaggctcccattgagagtgacgattcaagtattgtttgtggcacaattgcaacttagagagtcaatcatgaaggaagttcaaggttgtcaaggtagcgctcggtttggggagaaaaaggaggaagaagaagaagaagaagaagaagaagaggcgagattggtgtgtggtgaggaggagagcatgaggattgaaatggagaagatgagtatgaagctagttgagcttgagaaagagtgttgtgttataaagaaggagattgagaaagatgagagtaagaagaaaaagaagaagaagaagaatgaaaaagagaaagagaagaaggtgagtttgtggagagaaatgaagagaaagtttggttgtgttagtaatagtaattgtaatgtgagtaatgattcgaatcgccatggaaagaaccagaatcaaaatcagaatcagaatcatcacaataagaataaaaagaagaaagtgtaataatcgtaatagaaggaagtgaattgtttttgcttagttctttaattcatttagtataataattgttttttttttgctttcttagagaaattaagagctctaagatgaagaagagatcattaagtttgttaagtttatattttttttttttttgttgttgttgttttgattgtttaaacatttggatggtttttcacaaacaagtgttttcttttgtactttcctatgattatgtttttaataattagcatgcatttatatctttactatagattatttcattatttatataaattttttccatctcattgattgttaaaatattatatagtatcattactcaaactatacaagagtacactcatatatttatctcatattttgtttaaataataataataataataataaatcatatttttaatttatatttttttgctagaacattataataatatatttaaataatgatttagcaaagcaccttccttttgtccaaatgaagaatgatttgttttgaattttgatatgatatgcaataaacaatttaaatataattttaacattcaaaatagtttaaatttattaaaaattatatataaaatatatatatatatttaaatttccttaaaaatgtgtagaagctcttgatcaattatattatagtgaaaattacatgaaatatgggatttcataacaa

SEQ ID NO: 60766 - DNA, 1354 bp, Cannabis sativa
ttttcctaaactacgcagtgcagtgcgatttacagttttgaattgttaatatgtggttcaaaccgcaccgcatcgcatattataaaaatttcaatttttatattcatttaatatgtgaaggcctaaccaaagcctactaattttttatttttttttgctgaaaaaataattattgtatcgttgaaacttaaattttttttttcatatttttttttttcaagtcttatgatatttttgacaagtgttgctcaaactttgttgtatttgtaataatttaattatttagtgatagtccaaattgcaaaatctgcataaaccgcaccgtaccacaccattttttgcagtgtgatttttggggctttttagtttcgcgttgcggtttgggaaattagaaaaatacatgtgcgggttggtttgaaaaatagtcaaaaactgcaccccccgcatcgcgagcacccctagctgccgacactgaaaaagtcatcgaaattggtattgtcgccagaaaaattactgaaaaaattacaattcttgatgaaggaaccaatttcttggtgatatatttttttatgattatattttttcatttttaaaattatatacatatttttttaaaacatatttttttttaatgataaagaaaatatattattttaatgtgaaagtacaaaataaaatgaattctagctaatatttttataaagttaaaaaaaaaaaattaatttgcatatattctaatctttagttaatttaatagagaaaacaggatattttgaagaaaaaaaaaaagaaaaaagagcaaatacaatgcccaaaacaaacaaaaccgtttgtatatgcaatctaaacgaaggcagaaagctcacaaagttttcaatcgacacgtggcgagtcctcagccctctgccagcagcactatacccaccagctgcaaatataaaaaatctgctaaatatgtcttaacaaaaattatgaacacttacatttatttaacttgtgattgactcaatttctttccccatagcatgcggaaaaaataaggagtcccacaatagatttaccctatatatatatatatatatataacagagaatattgattttgttcctaagatgggaacattttttaaatgcttgatcacatattcaatggttaaaatggtgtaagaacacaatagttataaaatgctttactttttttttttaaatacagtaaattacaaaatttataggtttttaagaggaaattacaaattttacgggttattaaattttttatgtaaaaatatggctttttcttatgctgttttttttcgggctatttacaaaaatatgggaaaataaagataagtttt

SEQ ID NO: 60767 - DNA, 641 bp, Cannabis sativa
gaagttcttgaatttaacaatctcaatacttatgaaaagtttgaaagacacaattttgtacatgtcaaaatttgaggacaaaacaaaatcataattaaccttaaatcaatatctatattctcctaagattttaagtaaatgtaaaagaattagatagttttattttatttgaatagtttataagaattttaaaatcctaaccgaattaaagaattataaatagttcaaaataatcaaactattaacatcatattcatttagttctgtctcaaatggtttcattttgattgattgagatttaaaataatttattgcgaattgtaagaagggtaaatatcattttagaccttatgttttgtaaaagttaccaattggaccatctgttttggtttctttttgttagggtagctgataaaggttaaaataacaagggtaacaaaagttacacaaaaggtggggagatttctttcatctaagaaagttcattgtctatcctaaaggcatgcttagccaatcaatgaacctcaacaataaagttgctgtacatgagagagatgccccaggaaaactagacaataaaactttaatatcagaaaagtaaacccccagttcatgcaaatacattgtctgaccctccaaag

SEQ ID NO: 60768 - DNA, 945 bp, Cannabis sativa
gtcagtttgctggtgcgcgagagcgactcctccatttggtccatgcttgtcgagcacatcctttgattaggctcttccgaagagagcatggggtttccagtcgcaaggaagaatcgccttcagagagagtcgcctttgctattttcttctcaaaccttcaatataatatcccattccaattaggtttatattgataaatatatagtttctttgcttaactatatatatctatacattttaggtttattttaggtttgggattgaattaagttcaatctagcaaacatatttgattttatatataatatatataaaatctaaatatctgccaattataaataatttatacaaataattatatttttttatatatttgttgaatgaattaatttgaaagcaaccattagcaaaggtcatatcaaatatatattatgattcaatttttactcaaattttctagccaaaaaagaaaagaaaaaaaatcaccaaattaataatggcatactttcattagattgttttttgtttgtcacactacaaaatttttttacttttagttacaataaaatttacgatttaaaaaaaaaactaattataagtcatcattcctatgttgcgactaaaaaattaattcatggatttttaattgcaacagttgttatgactaaaactaaattagtgacacttgtattcaaatattatgttttagtcataaataattttttgttgtgactaaaaattatacataatcacagaaaatttatattgtaattaaaaagttatcactaaaattatgtacataactatttttttttagtgtgatccacatcttaggataaatattttgcaacactaatttttctctctgccacgctttgtgaaaattaatttttatttttgagaaaattatattgtatacccattttatttttatttttttctaat

SEQ ID NO: 60769 - DNA, 1073 bp, Cannabis sativa
ttttactgtactaagtattcaaaaatactttattaaagttttaaaattacaaaaataatatatttcagtaaaatgaaaaaaaaataacttaaaaacaacgaaaaaacaactctaaaataacttaaaaaataacatgaaaacaactataaaaaaaataaaaatataactacaaagcaacaaaacaataacttaattgcaatatgcaaaataatattaacttcttaatatgtaattgtattaaaaaaaaaaaaaaatttacttagttttgacaacttgatttatctttttacactacattatttttttcatggaatttgttgttacgacttcatactttcaaatttttttctttttttcttgttgagttagtgacggttaaaataataatttatttttcaaaagttaaataaataattgtattaataatagaaatagtaaaatcttatatttttaaaatgggagtacataatataatgtgtaatatataattatattgatgatagaaataaaagtgttggtttggttagtctccttcaaactaaaataaagaataaaaacatgggtgcattatacatgagcttattttcgggatggtgttttaccaataataatccttagttagataaaggaagaataattgtggattgaaatccttctatgttctccttggacataaggatttggacaagccaattgatacattgtattgctcaaaatcatcgaaactcaacaaagttccacatcactttcgtttatggatttaatgaggaagcaagaagagagatattatggagggacatattgcaaattgcacaggagatagacttgccatggatggtaaatggggattttaatgagatcttgaacaatgaacgagtagggagaagggctcacaagaaatcatccgagagttttcgagattgtattatgcagtgtggtttggaagatctaaagtactcaggatgcttcttcatctagaataacaagcaacagatagatgacagagttttctctaaaatagatcgcgctcttgtgaattcgaggtcgtctaatatattccctaattcagaagc

SEQ ID NO: 60770 - DNA, 851 bp, Cannabis sativa
ttttcatttcaatttttaaatgcggatctattatataaatataataatgatattccaatccaaaaaataatttattaggtgggtttagttagaggtaaaattataaaataaaataaaaaagaaataattttttattatatttctttatttggttgcattttaaagtattagaatgtcttttctaatagaatgtcctttctactattttggtggaataactatatttcattttataatatgtaacatgagaaaaaatattaacgtttttttatcaattttttatgcattttaaattttacttcattctattcctattttcaattcttatattttcattccccctaatcaaacgtcattatctgaatatttatcacacaacgatctttcaaaattttctttacatctcaggatgtgtatatatcattccaattttaaagtctttaatgcatataatcataaggacaaatttgatggggtgttgttgagttgcttgtcaagtatgatattagggttgggatgaggtggaggagagaggataaaaaaaatttgtgagttaatattgtactgtggttacaacgctcactaataatttttatttttttaataaaagaaatacgttgattggttaccttttgttttagatcctctatagtaatttattaaattgcttccgttaataatgacctaatattcagaaagtagtgataattattaaggttttttttttttttagaaaaaaaaaaaaacattttgttttaataaaaataacttcatgaagataaatctacaaactaagcagatagaacttatgtcttgattattaataagtaactagaatcaatggtaaagta

SEQ ID NO: 60771 - DNA, 685 bp, Cannabis sativa
gacttcaaagtcatttcctttaatgtctacatgtgccttttcaccaccaggtaagaatctttcgggcctaaactccaatgggtcagtccactgttctgggtcacgagctatagcccacacgttgactagaagggtcgatcccttggggatgtgatagccgtttatttcgcaatcttggcttgccattcgtggaagggataatggggtcgacgggtgtagacgaaagatctctttgataacagcttgaagatatgtcagttgggttaggtcagcatcacttacaagcctatctcgacccacaacatgatcgagctcttcttggacatgggccatgatttttgggtgtctaatgagttctgctatggcccattccactgtgcttgatgatgtgtcggtacccgccgtgaacatgttctgtaaattatattttaaaatgtaatatcagtatgttgtaactactaatagtattaagcttgtataatatcatattaacacaaatcactttagatttgctgtagtgtagttgtagccacaaaaggaaaacaaatacattacgaaataaggaatttatttattttaaattatcataaagtggtattaacgatatgtttaaaccatttgaaaaactacaaattgatttcataaatgattttcaaaagtaattgaatatattgatttttttttt

SEQ ID NO: 60772 - DNA, 899 bp, Cannabis sativa
caatcaacagtctaaaatctaaaattttattaaaattttatgaataattttatgaattctaaattctaaattcaattctaaattcaaatttaattatttaattacatataactgagaattgtttagttaaattgataacactgtattgattaaattttactttaggataccaaatatatttttcatgaaaaacacaaggtactaaatgagtatatttcatttgtaaaaaaaaaatgagtatatttctttttttttttttaagaatcgtggcactcacatcaacatctctattctaatttttaaaatacttcatcaaaactcaattttatctattttagctaacacttttactgagcatcagctctactctattttttaaaatacctcacaaaaattttactttctttattttacctcaaatttttatattacaccatatattaatttctttatttttttctctacattcatttaaatattacttttttaatacatattgtaattaaagactatatgtagttaaaacatgagaattagcaaataattaaagatttaattattattttatgattatatgcctcttagtagaaattagggtttattgctagaaataggccttagaaaaatattttctcaattacggagatatattttgaattcaagatgcattatatatatgttgtatatgagattttatgattttcatgtttgtgctcggtaacaatagaatgcgatattttggccaatagagttacttagatatggttgagtatcttagaattagcgagacttgatagacatttaaaatatcagacttaaccggggttatggtttatgctattttactcctagaaggtgaggttattgttgggctttgtgtcctaaataaaactctattt

SEQ ID NO: 60773 - DNA, 1038 bp, Cannabis sativa
  modified_base (26)..(36): a, c, t, g, unknown or other
ttaaataacatacttgttagtaaatnnnnnnnnnnngtaaaataatttccaacaagatgctccttcagcttctgaaaagatacttcgcactcttcaatcaattcaaactttttgttgccttgcaacacgttaaagaatggtatacagtttcagtagatttttaaatgaacgtgcttagtgcagcaattcaatcagtaacactctgaacatccttgtgtttcttgggagaaggcatgtaaaggaagggcttgatcttttctgggttcaccttgattccgcgagagctaacaatgaatcctaagaacttctagaagaaaaccctaaaggtacattttttaggattcaacttcatcccataatttcttattaccacgaagggttcctcgagatctaggccacgctctttggaggttttggacttaaccaacatatcttctacatacacctcgatcgatatttctccctagttgattcttgaatattcggttgaccatgtgctgataagtggctctgacattcttgagcccaaatggcattactttataacaatagacgcctttgtcggtttggaagctggtgtgttcctcatctgcgacatgcatcttgatttaattatggccagagtagggatccataaagttgagcaacttgtacctatacatagcatctaccatttgatctatccgcagaagcagaaaacaatcttttagacaagcctttttcaggtcagtaaagtcaatgcacattctccatgtgtcgttgggttttagaacagaaacggagttcgtgagccagataggatacaatgcttcctggaggaaatcattggtggtcaacttattcacttctgccttcactgcctttgcccttactggatccaagggtcttcttttttggcgaattggtgttgcgtcttcttgaatgttcagagcatggaaaatggtgttacggtcaattctagtcatgttagaatagctccatgccagcacatcctggttccctttgactatattcataatgttttctcttatggacgga

SEQ ID NO: 60774 - DNA, 1182 bp, Cannabis sativa
taggccacgtcttgtgcaagcggcacaccggcgagcccgtagaaacatacccgctaaactcttgcagcattcgtagactcactaccaggttggcccgatagtgtccatgagtattcgagctcatggagacatatgagtgccctcatgatcctcatatgcccaccttactagttccactaactagtagtagcttacttagcaccaaggtgccagggttggtggagagctaacaccatgtactcccccttaaagagcattctaagcttttagccttctaccaggaacatatatgatttttgctctgtagacatatggtcatcaccatataccaaatcacatagtttctcaaatctgattgcaccattgtattcgtagacttaaataaatggcgaataccaagtccagtcccaatctggataatattgaagatatttacaaaaatgctactatcatacaaactaagcatcagcatgccaccagcatgcacaacaacatgtgccaccacttgaccaccacttggccaacttttgggcatcacctagcttgtaacgtgccatcttggcatgcacgttacactaagcctcatacttgaggttaccttaaaattgatagaaaataaggtagagatcggtttacaatcttgtatgttgaagtgttgcaagattttcttgaagtaattcttttgagaaagtcaaatctttcaattatttctctctcagtgaattttcatcttgttggtctcaagtctttcatttcaaactcccttagccaaatgagccttcaactctcaaatacaattattgttggagcatgctactaacatgttgtcaataaataacaacaaaatattgaaataaccacaccaaatagggttgttcacaaagtatccgatctgatccaattcacatgatctaatccaattcaatctacaaaatgcatatatttttacttgtgcaaattgaattagattaaaaaaattaaaatctgtacttgtggggattggatattatttgttctcaaaaaataattgatccaatcctatctacacttatatatatatttaaaaaacttataatatatataaaattatattgatgaaaatgacaaaccaacaaatcaaagtatacatataagcagtcatttataatttaaaatttatatccatgtactcgtatcagaatc

SEQ ID NO: 60775 - DNA, 1595 bp, Cannabis sativa
ttacaatttttgtagaattttgctctatatacaccattgaactatacaaatcattaaaaatgtgttccttcaactgtgttacatttatttttaaaacaatttgttatgtgactataaatcacaaatatacaaataaacatataaatattaaacattgttgaaatttattagtactaaacatataaatattaactctaaaaatattaatgcatatatttagaatctaatttttgtcaaatttttttatgaactcttaaactgcacatattgactatacacgtgaatatgaatttgggctgaattttaataaatgcaaaatctgttactcttatcttccagtctttttattcctatttatgaatcaagatcccttattaaaaattagtattattgtgttaaattaattaaaaatttgatatatcaactaaactaatctaatttatattaaatatgttaataatttttattgactcaattaaagatttaattttttcataaataaaaaattaattgacgtgtcaaattttgattagtgtaacatagtatgaaatacaattttttactggagatattttatagacatcacttttagttaccagctctcatatgtgagtgagattatgatttaatgtgtataatgaccacattgtacatatttgagataatacaaattacttagccaatatgcatctccattttctctatgtaattgagttgtttaactaatataattattgtttttttttttttttgaaggaactgatagttcattagaaagataaaaaactgggcatcacaggggtcatgccctccccttggtattcaccaatagtcaaggtagacccttttacacttttggccaagccatctacaaaatccaaatctgatcgactaacataacaaaaactacatcccctaaaatatttaactatatctaaaatcaaaaaagacacatggaggatcttccaactaggtacacacttccttttttccaaagcttgcactgccgataaacaatcagagcagaccagaattcttgaatcaatcctttgcttagcccacgctaaagccatccaaatagcctttgtttcagcttcaagagctgaccctgcatcagtcgtctccaccttgtacttccaagatccatcttcaatgttgatcataactgcagccaggccagcagtcccttctgaccaagcggcgtccgtaactaacaccacatcaaaatctttattggccttgcaaacttgttttgagggatcatcgatccctacttcttcaacttcattgtgcctgttgaattcctcatattttttcctgatatttatggctcccaaagataaatttggcaggcctccttgatataacacaccatttctgagcctccaaacttcctcaaaaacgcaggccatatataccacaaacatcaaccgaatgttacttgggatgactagtagcacttgttccacgaattccatcatcgagtcacccgggaaattatcaatcatcaaagggaaatttccagtgagccaaatagctcttgagacacaacactctctaaaaatatggagacaactttcctgttgaaagccgca

SEQ ID NO: 60776 - DNA, 768 bp, Cannabis sativa
aatcctaactagttaaatgtgtatttatatggaattatattattatataatttattatgtgtggattaatgataaatgacatgctaagaccccgttgtgagccagggacatttttgtaattttgaaccaagaagggtaaaactgtaattttaatgtgatgacatgcttatggaatatattattatatagtatacttgtcttgtcctttttcaggtattttctgacaggtcggcgcagtatagtcacaattgtgaattttgggccgaactgggttcggggccgaaatacatttttgggattttatattggcattttattgatatatgaatattctaaaagttatttgagtaatgtgatatgtgaataatgactattgcccttgaatgcttgtatgtatgttatatggccctaggggcattattgtcattttgatatttgtgttatttgtaacaaaaggtaattattttggtttgattcaagcttcgatttgtgaaattttgtgcttggactttggaagagcttaaggtagtgtttctaccacttttaccttgaattttatagctgtaattttatagtgaaaatatatgtgaagccatggattatgttcttgaaattgcatgcttgtgagattagagttgattatggtgttgtagtcatagttgtgtttagagttagtagatattactttgtgtttagattgtgaaattgggttatgttctattgaagatttagacctaattgagcttattgtttaattgtgtggttgag

SEQ ID NO: 60777 - DNA, 843 bp, Cannabis sativa
ttttttttttgaaagaaaaaaaatccaattttatacaaaatcttcttattttttttaagaagaatttctttttatttttgctggtataatgtactttttagtgtaacttttcgaatatattaaataagattacattttttgattgaaaaaataaatatattaagaattattgagagcaatcataaatcactcttaaaaaaaagtaacactataagttaagtttgtttggagagaaaagtaatagaacattgtttacgaaaaaaaagtaatagaacatttattatttagaaaaaaattatatacgaagaggtattttagaagggaaggggaatggttttttattatagcattttgtattaataaaaacatttgaataatagtaaaaaattaagagaaccaaagaatataaaacaaagcttataagaagtcatgttatcgtctaactccttattttataaaacgccattttcaaaaaaaaaaagaagtcatgttatcttgattagcaagagagtttaacaagtttaacaagttaagaggcttaagaccatctctaatggggatggtgtatattttgggttaaatttagcccaaaatatacgataaaactatatttgacaacaaaatataaattatttataaaaattaatattaccattaatattcattaaaaatatataaataattaactttatttatattattttaataacttataaatataaaaacattttttattaatgaatagcattaatgaatggcaaataagtaattaaaaaatgtgtcatatattgtgagctaaaatttggcacatgctatcttttgtgccaaatttgacacaatttt

SEQ ID NO: 60778 - DNA, 1137 bp, Cannabis sativa
tacctgcaccaaagagacataacagtattttcaatcttatggagctcacacacatcttccacctcatctacgctgatccaacactcttggccttctcctccaaacacttctgatttaatatagtatctctttaatttcttagcaggccaattcttcacaatctctgaaagtccaaacaataattgtgtctttgcaggcagaatgtaccgtttgacagactgcttattaggcctctttgggtgtatcagtggctgagtcggtggagctaaatgatctcttgaaactttcttctttcctttcatctacatcaaacaattaattacaatttcaaaatccaataatagctactctaaaaaatttaattgccattgatattggtcatgatattgctaagaaaaaattaaaaacagtgatatggaatatttttttttatactctaagacaacatggaatattattgcatgtctaggtagattgtgagtgtgaagaagtgatggagataagatagtgatatgggtattgctgaaagctcttggcctagatagaaaagaagagtggggtaatctctctataggtttctatgacgagcttttagaattaaatttatatatatagaaaaaaaaaaagataattaaaaacttaggatgtaaatgaaaaatagacatcaaatttagaagaatcttataaggatccacttgaaacttaatctaaaaaaaatgagtggatttgactttcttgattgtcaactaaatgggtataattccattatgttaagtgattttctcttctaaaatgcttagtaactgcataaggacaaaaatatagacattcatgaatcttgtactgtttttaattttttcttagcaatatcaccctgaatcactaaggtcagctttacagattcaagctaagtcaactattggaacttaaatcctgcttcacagatcaatcattgaagttagacccttttcatgaaaaagttagttcatgctgttagtacgcacacacactcacccatacccatggccatgacttgagttagccttatcctagccataaatgggtaaagttagatctcttggccactcaagtaataaaacgcaaatagtagtagtcccactcaactctagaatcttt

SEQ ID NO: 60779 - DNA, 896 bp, Cannabis sativa
  modified_base (37)..(37): a, c, t, g, unknown or other
tttaggatgttaataacatacttattagtaaatctanatcctggtaaaataattccattagtttaagggtttaagcccattattccctaattttacaaaccatcatacatcaatcgacagctgcataaatgagtcgtcaagtcataaacaagggataaatcacatcctaccaaactcctataggcatcctgaaacccaccataaagtaggaaattctggcgaaagttagagttgggaaattgtgccaagtacggtgtaacaaacacgacaatagtggcctttttaccaccatcataaatctataaatacctcaatgataaacaaaaatggggatcggttgaaaaactctgtaataaatattctcattaatacaatgattcgtggactaaggctgactaatgccccaaccacgtaaaaatttatcccttctaacaatcatcaattacttcatatttttctaattactagttatcgaaaacctcgatcaacattttggtgctttcactgagagttgtaggaagtcataagtagcctggtaaaataatggtgaaaactagaaacactttgacgctgtttggctttacataaaaactgttttctgttttttaaaactgaacacagtttttaaaaactattaggattcgtttggcaaaaaattttaaaaattatttttcaaaaattgagttttaaaaaactaaaaaacagaaaacatcaaaatgttgctttcaattttcgaaaacaatttttttttgtctaacatattatattttatattttgctcacatactcggatcctagacccgaaactagactcggatggattaatgtcatggcatggtgctaaaatattgatttttttcgtaagaaaaaatctaaaaacagtttttaaaaatttg

SEQ ID NO: 60780 - DNA, 1083 bp, Cannabis sativa
gggcatatgaggaccacgaggggaatcatatgtctccaagagttggaatactcatggacactattgggtcgacccgatagtgtctctaagaatgttgtcagaggttagcgggtacatttccattagcttgccagtatgctgctttcacgggacgttgcttaaacctccaggagatgttgtggtgcgccttggccacgagtctcaacatgagatgacacgggttatcattcgtgagctggtttgcatatgcacatgagacagatgcaccatgttggaaataggcagatgtctaatgtatgcaactagtttggtggcttgtctcgagggcctgccaacatgcgtgggggcatggtgcattgaggattagaccatggatgtaggggagtccttgggcgatgaaggagacggttcagacagtatcaaatggggcatgattagaagcgtcggtacgtcagctgagtgttggcatcttgtcacacatgctaccttggtcacgagtgactaggtaactgacggtgttgggatttgccttatcatagtgggacctatggacagtgcaagtatcttagctagtgagcctcgatgcacgtatgcactcatggatgcttgcgagcatgactcgacaggagttagtcaaaagacgaaagtgtgcacgaggcacacgatcagtcgaaaaatgagcccattgttactcggatagttggaaggctgaccttggcttagagaagtcaaggtgtcgcacgggtgttccgttgcctaaaaaggtgagcctgtgatagttggtatcagagccaagttcatctcagtggaaggtgaacctagttggcctattctagaggggatgtaggcgcgtggaaagatcgagatggttcgaatgctggaacaagatgtcgttgaactagttagtcttctaaagtggattagtagatcaagatggagttgagactggattgttgttctttgttagaatattggacatcctagggaggtgacagtgatggttgcttcgaattaagttcagagatgctagaaagaaaactaccatgtgcaattgtagaaaggtgcaacaaaatgtttgaaact

SEQ ID NO: 60781 - DNA, 892 bp, Cannabis sativa
gctttcaggtcctgctacatcttggtcgtactaggatgaacagagtaagaagtggtataggattcatctagaatctcctttctgatatcaacatctattggaacacatacacggttcgtaaactgtcacataacactgctatctatagtgaaatcttcaactttgtcaactaatactttatctcgaatcttattcaactctgaatctttatactgagcttctctgattctttccagcaatgtagactgtaaggtaaagttagctagttgtcccacaactaactcaatattagcctttatcatctcatttgccaactgctttgaaatctacttcaggttactcatttgtccttgacccttccggctcagggcatcgaccacgaaattggcctttctatggtgataaaagatttcacaatcataatccttcaccaacttgagccatcaccttcgtctcatgcttatcattacacaagagtgttatcaattaaaactatcacatgcttatctagaaaatccttgaatacttggttcattaaatccatgaatgctaccggggcattggtgagtccaaaagacatcaccagaaactcataacatccatacctagtacaaaatgcagtcgtcaggatatcctcttcttgaattctcaattgataataactagaacgaaggtcaatcttagagaagatcgtcttacccttcaactggtcgaacaagtcatcaattctaggtaaaggatatttgttcttgatagtgagcttgttcagttcctggtgatcgatacacatccgtagtgatccatctttcttcttaataaataatactggagctccccatggtgagaaactctctttgatgaatccaaaatcaagtaactcttatagctgaat

SEQ ID NO: 60782 - DNA, 1059 bp, Cannabis sativa
tttattttatttttattgtaattttgaaagtgtatttttttaatacattggattttgaactctattatacatatttattgaaaattaaattttagttaaaaattaattaaggtattttggaccaacttaaattaagtaattttcataatatttattaaaaaaaattaatactaaagatggaaagtaaattttatttttcagatcttcttagagtataattttataaatactaaattaaaatttatatttagagttatctaaattactaattttaaatcaataaatatattaaaataactatcaaactaaaatacaactttcttaaaattagttataagaatattccatctccattacaaatcatgtatttctttgcaagctgctagatgtggtggatggatagacttgatggcatcaatatctaccatgcatgtattaaaaagtaaaataattgaaatccatagtgtataacaaactagtagtattatatattaaattgtactacatgattgacgtaatataaattactattaccgtccatgtgtgtaaattttctttttttttatccttcctctttggaaagggtctacacatttataccattagaaaaaaatattaacatatatattggtataaaaataatttacccaaatcaaagaaatatgactaaatatattaaataaaaaacaatcaacttttctaatttcttgaacatataatttagtttcctaaattagtatttgttggcaacattaataccataccataaatatcaatacgttagattagaagaaaattattcaaatgaatacattgttattagattcaacaaatatgagtacccaaatgcatttacatagtctacaaccactaagtagctagttactactatataaactactaattttcactaataattaagatttagatactattgagaatttaactattaacatgtgtcccgtttggtaacatttttattttttaattttttaattacaaaatgaaagcaaaatttttgtttttaaaaaatttatttttgaaaaacgaaaatgcgtt

SEQ ID NO: 60783 - DNA, 965 bp, Cannabis sativa
tggagacgttgtcgaggttcaaaaaaatattgtaagtttttatatttaaataacctcactatatactatattatattattggtattgtttaaaaatatatggatgcacaaactataaaggatcattttaaacaacttcaagctgagggtaaatggacacctgaaggccctgatgatgtgttggcgatggcattgggcacctgccacgtggacgtgttcgaggtgtaggtcaaggtgtgactccttcactgtattgggacacttcgaagcctaccaatagaaaaagacaacacaaagatgatagttcgactaaggctttgaaagacgcatttgaagaaataatttttcgccaacaagaacaacataaacaagaacaaaaaagtcttgaagatcaactttgtaaacaagaagaaatgttaagagctatcatggctcagcagagcacgtcgggctccaatattggaatgcctagcccaccatatgtgctagattcaccttatatgcctgacccatcgacacgagtgaccaacccaccatatgtgcccatgccaccatcactaccacaaccaactataacactacaaccattattacaacaggtaattacaattttatcacggtatatagagcacaaagattaattagtacactaatcacttgttattgaccattaaatatggaacatattttttaccatatatttatcacttggggtgactattcataacaaaatttagtagaatggtagttctcatcatgtgtagagaggagaaagttactaatatataacatgcaactttttgtttttaaaaggttactttttgatgaaaggtaaaatcaaattgtaatggtaaaaggcttctacaataatgggtcataaatattgtaaactactatattatcttcaaattaattattattattatatatatatatctttatctatagccagcagctagggccttt

SEQ ID NO: 60784 - DNA, 1130 bp, Cannabis sativa
aaaaaaatttaactcttattttattgggaaattactttatataccattttttaacttttttttttttttttaatttatggtttagattgttctggtggtttctatgttagttgctatgtgaattttggttactccgttagttgctatagataattctatgtagaattctataaaaatacaaaaaaaaaatattttgaagtgtaaaaataaaaaaaaattcctatttatattttcttctcaaattaaaacttatcacaaaaataataattgatttaaaacaacaatacatttaaaaatacaaaatatcaataataaatgttacttaggatttctcccaaaatacatagcaatttaggagcgagtcaggtggtaatgagacccacgttacgggacacgtcaccttaattactcctggagtctattattttaaaggagtaatgacaaattagtcctctctgggagggtctagctggacaatagatatcttttgtcttttcctcttcgtaagtgaagttaacccaaagaaggatacaggtggactaatggagtataacacactgttcaaggaagaaaacactgagtacacatttaatgcgacatgggaaaaaacatccaatatcttacgctgaacaaacgtgtttaagggtttaaactcattattctctgatttcacaagacccatacatcaaatgacgactacaaaaatgagatgttaagtcataaataagagataagtctagtgtcaccaaacatctatgaacatcccaaacacgtcataaaagtaggcaatcatgtcctaagatcatatttgaaaaatcgtacaaagcatggtttataataacatgacaatagtgacttttttaccactatcatgagcctataaatatcctaatagtagaaaaggggatcgctcaaaaaaatttctgtaataaacactctcattaatacaatgactcgtggattaaggcttattaatgccccaaccgcttcaaaattatctcttctaagttctaacattcattaattattccacacaactctaattattagttgttgaaaaatctcagtcaacaaaaaaaaatattaatataaaataaaataaaaacggtaatataaagaaaaattagagt

SEQ ID NO: 60785 - DNA, 918 bp, Cannabis sativa
gggtttaatgaaatcaaaacgaaaatattgagggttttgccgccatttaccctaaaaaataaattaaaaaattcttttaagtgttgaaatagataagagatctatcaaaatactttttaaggggtgcagtataaacttaccctattatatatagttacaataatgccaaaatatatatttattctgtacaaataatattgggtgaaataaataatgttttaataattcttagtttgtaaagtaagatcttctttggatttttttttttaagaaaaaaaacaaaagaccttaagagaatattaatcttacaaaatatctctaaattatgtttggaagtagctggtaggaattgaaaaatgtgagaaaaataagtgacaaaaaaatttctcatctttagtatggaaaaaaaaaaaattgtattcttatattttctttacttttttctttcctcattaaaattcaactcatataacctaaaaaatagtatattaattatagaaaagtattctatatttttttttattattattgtagattttgatcacattattgtatattttattaatgagtacaaattcaaaatatatctcactctaacttagttaaaattttaatcaatacgttttgttcgtgccctctttgcctccactcatttttaggacaagttacaacctacaatattaacctaactaattacaataatatagtattaaattattattattattattattaatgcatactaagttaagttaattagttaatttaaacaaatcaatatcttttattcaatttagctattgcgattcatcatatgaaaaaactaatttgataattacctattttaaattattataattgggatgggatcatgcaattgcatgcatgcacataacaaaatcttttccaactaaaaaa

SEQ ID NO: 60786 - DNA, 735 bp, Cannabis sativa
ataaagtttatttgatttgttctattaaaggcaaaactgaaatcatccattagaaaaaaggaaagtcaagtttcccaaagttagataactttccataagatcattctttcttttacaagaagtttcctaaaccaaaaagagaccagctaaaaaagaatctttccttagaagaaaagagtacttaaatgcacaaaatcaatgtaataaaataatttaaatgctcaataaaaatgcactttaattgaaaaatattttgacaactaaattgccaaaaaaagacctaaccataccgaaagataacaacattcagatcactatggtaggatctgataggttacaaagtaggaatcaaagatggcatatctcaagggttgggggatgctatagtgggtgtgtgtgtgtgaaatgttatcagacttagagctttgtggcttagatctcccttagttatgacttaattaattaggattttagggttgagttaaggctctttatataagagagcttaaaccctaatcaacagataaagtaagagatatttacatattaaattggtaaaatacaaaagactaaaattctccttaaaaataggtagtttttgtctatttcgtgggctactaagacccaatttgtagtctagcttgcagtccacgtgtaaggttgtgcaccaacgttttgccaggtctaatcctagccagccatacacttgcaggatgcaggctggccggccctaaa

SEQ ID NO: 60787 - DNA, 824 bp, Cannabis sativa
ttttttttttctttcttgaaatatcaacggctactctctctcttttttttattccttttcttcttttctttatattctattttttattattttaaagaaagattttatttcttttatttcttaataaatagtttttttctcctacctacatttctattaatatattatttgttattttttttctctaatattattattagactatttattattgtaaacagatattataataaaatgtaaatattttttctattttataataaaatagatttactattttattataaatacacactctattttattatttttattttttattatatatatttttaatttatatttacttatattatattttttttccttcaatctcatattctaaaaggataaataatatatagtttttttttttttgatgaatcaaaaagtttcattgcacaaacatctttatacaaactaagctctccatgaaggaagcaaataactatacaatcattatttacaatttatcaaaccatatcctatcttccactttgattttctttggtaaaacacaagatattcttgttttgatgtgccatttaagctcctgaatattcatagacaacgggctctgctgccatatatttccatttctctgctgccaaatgaagtaaactaaaccagcaatagaggccgaaaaaacctgctgctggaattttgaacgcttggacctgctaatgctccggatcagtgagttcagatcataagcaggagccttccagccaatccaatctttcatttgttgaagcaaactactggttttgctgcattgaaagaat

SEQ ID NO: 60788 - DNA, 792 bp, Cannabis sativa
caacttcaaatctaaccctgacatgattgataatgagttaagtcaatacatttcaagtgaatcacctcatttatggggcaagaattggaaaggcgcaaaagaattgtatatgactttaaatataaaggaccatcactgggttacagttaaagcagacatacaaacactagagttgattgtatatgattacagtattggagcgaccacatcaaaaaaattggatgatttgatgttgccacttcatacgatgattccaattatgcttcgtgaatccttacaatttcagaagatagcacaatgccttcacaatctatggacatataaacgattacttgatgtttcataaaattcaacgtaaatatatttataagtctattcatacatactttcttagtcgatatttattgcaaacatatatgtattattgatttcaaaaatttcttataacaggggagattgtgcagtgtatgcaatcaagttcattgagttcgacatggctggtcttagctttgaaagcctatcagatgatagaatgtcattctacagaaagaagatgacagtagatatttttttatcaacaatgggacccttagtaatttgtgtttaattatttactaatttttgttcatgtttacaaatctcgacctatacagttgagctctactttacagatgaacgataacttgaatttcgtttagtatttacaaatcttaaccacatacagttgggctaatgattattgaacaatttactaatcttttatttagtgtttataaatctcgaccattaaaa

SEQ ID NO: 60789 - DNA, 1428 bp, Cannabis sativa
aagccaacactcgtacctgggaatggccgggtagggtttgcagttgaacacaagtctggccgacctttaccatacactctcccacggtatggccgaccatcccctatctcactagaatctacaacccctccaaggagggccagtcaatcaagtccccacagaaacagatccttctatgcaagcacagttggatcaactcagggacatgattcaaggcatagctggtctgaagccttaagatcttgaattagatcggtcaagaggatcgccatttttggcatacataaatgccttgcctttgcccaagtttaagatgctagtatgaaaaatgtatgttgggcaagaagacccgttggctcacatcaaatactttgagatgcaacttgatctctagaaggttactggtgaggtgcgatgctgcatattcgtcatattgatttcgtcggaagtcaaagagatgagcaacgaagttcagacaagaaggcagtcactttgtcaaaaacaggtcaacaatggtacttcaaactcaccccaggaagattcaactcttgggctgagttctcttgataattctacacacaattctcatcctcaaggcttataccatcgcaactagaagaccttgttgaagtcaaacaacgacaaggagaacctttgaaggattatatctagaggttcatggccaaggctacgaaagttaaaggccttacagaagaaggccgatatacgaccataatggggggcatactcccattgagtcacttctagaaagacatccagaggatctctaccaataacatgaaggagttctttgatagagctgatggctttatcaagcttgaaaaagccatatgacaggcctagatgggccacgctaacatcaggtagtcatgagacatcctaaagtctcatgacctaccaggcgcacaggcaaataccaacaactctgcccaaacttttagtggtaaaaacactagaaacaagcgcaacagcaacaactcttggaggaacgccgacaaaaaggagaagtttaacacttctcccatgccataaaagaacacggaggagaattatacctgcttcaccctccttacaaagaaacctgaggccatcttcatggccactcaggaaacagtcccctactgaaagccctttcttatcaaaagggagatgagcaagagggacatgttgaagttctaacaatatcacaatgacttcggccataacaccaatgagtgtaaaaatttgaagagggagatttaatacctcataaggcgtaacaatcttcacttgcatcattatgtgctgaatgaccaaaatcagtcacaaagtgcccagaacggagatccaaggccaccatcagtggcaggacacctaggggtcattattggtagaccccacattgcaagcaagaccagcaaagctagg

SEQ ID NO: 60790 - DNA, 554 bp, Cannabis sativa
ttccataaaataacattttttttttcatatttttgcattgataatataaaatctcataaaatttgcaatttttttctatgctttttttgtgggctctttctttgcaatgatgaccttgttgtcgggtctttctttataaggtgtgccattgtggcagtggcttcaaagttgtttggatggccatgggttgaagtggtctgtgaaggaccttaggagacacggtgagaattgtaaaaacaaataaaataaatgaagaaaaagaaaacaatgtgaattccattttgaaagtgaaatggaatgaaattttggaaaggtttgcagctatttacaaatttaattatctaatattatatacaagattaataatttgaaaaattgaatacttatataatatatataattttggaaaatacatgtatatatatatataaaaaaaatattatactacacaaacattagaatctctatttaagaatattctatttaagagtaacctctaatttgttataaaaaaaattgaataattacagaaggcactattttttgtaaaatat

SEQ ID NO: 60791 - DNA, 908 bp, Cannabis sativa
  modified_base (846)..(849): a, c, t, g, unknown or other
accgtatttttgttgtttttttgttgtttttgtgcatttgtgaaactaacccttttttttatatatgggaatatacttatttagtaccatcattttttttttccaaaaacacatttagtatcttgtattttcaataatacttatttaatactttatattttgaaattgcacatatttagtaccctaaagtaaaatataataatataatttattaatttgatcaaacagtttttagtatatataatcaaataattaaatttgaattcagaatttgtaaaattgaagactagttttattgtattgataaaattttatcaaatttttttgagtttatggtactaaatatatataattttaaagcataaaatatcaaataagtattattaaaaatacaaggtacaaacctctatttactatttagatgaaatataaggtatcaaatatgtatacaccctttatatgtatataacaagttgataatttcggatatttgagtatataaaacaaatggtatttttcttaattttaaggctctttgttgtaggctaggcctgatttataagattatgagtaatgctataatttgagtattttctcttaaaaattgtttcatttctaatgttcacaataataattttgaaaattaaacattctatgagcttttatataatttatgaaaattatgattttttttttatcaaaagaaattattctacgggattcttttaaagaaaattaaaaatatggaaaaaaaaagagtagaacatggattaccctaaactattttttttcacatttttttaatttccatttcctaaaaaataatttttgggattatttcacaannnnacaaaaacaataaaaaaattacaaaaatacgatttaacggaattttaaatatttttacg

SEQ ID NO: 60792 - DNA, 1394 bp, Cannabis sativa
accccgacccccacactcggagcagccgatggtccaccatcgaccacctcttgagcagccgaccaccaccaccggccattgttctccatttttggtaagtattgattttttattttacatttgatattatatagttttaggttttaaattggtatatacagtgtgtatataaatataaatctgtatattttaagttttaaataattttgtgtataaatatatatagataattttagggtttataaatttaagtatttatgtataaaaatctgtgtatatatatgtgtatataaaattaggtatatgagttttgagttttttattttttttatgtgtgtatatatacatattaatctgtgtgtatatatatattttttatgtgtgtatatatatattaatatgtatatataatataaatattatatatattgtattgtattattttataaaatatatatactgtatatataaactatatagtatatggtaatgtgtatatataatataaattttgtatataggttttgaaattatctatattgtattgtattattttgtaattttttttattaaaatctgtaatttacaatatattattcttgttattttcagattggaataaaagatttttaagagtttggagaaggtctacacaatttttttttttgaaaggtgtgtttttaataatatgtatttgtttaagaaatattagatttaattcaaattaaataagtttgttggttatgtttaaattgtaatattattatatatataaaaaagagaataatgaaaaaatttaaaaagtagaatttattataaatttattttataaaggtaaaattttaatttcaagaaataaataaaatttttatagctttatacataaaagaaatttttaaataataatgtttattttaataaagtaattagtttttatttatataaatttaaaaaataattttagtaatttgttatttttaaataaattaatacataacttaaatattataaattaaaaagtttaataagaagaatttatttatttttttaatttaaatataaattgtaattaaatgaataaatttttgtttaagattttaataaataattgtgtatgtaattttatgttagtataaaaaattaagaataataaataaataagagaatgataatttttatgaatttgtttgatgaagataaatttgtaattttagaaattaaatataaaattattttaatttttaataattaatgattaatattaatttatgaaaagtaataattgtttaaaagaataattattttataattatttaaattttgaaactaatgtgccgtttggtaacacttttgttttttaattttttaatcaaaaaataaaagtaaaatttttg

SEQ ID NO: 60793 - DNA, 1306 bp, Cannabis sativa
actttccctttttcccattaccttatttgttgttgttgttagaccttttaccgcccgatcttgaattactcgggtactgggagtgctaaacggatgttccagtagagggagcttgtgattggtttggtttaagctcgacatctgctcgctgaatggcctcttcaagcttgatgaaaccatctgcatgatcgaggaagtcactcatagaatctactggtccgtctctcttgatgtccttccaaagctctccaagaacttcaatgccccccagtatcgcaattaatttcccttctttggttaaccatgcaacttttgtcgcctccgtcatgaatctgctgatgtaagctcggagaggttctcctggcctttgcttcactttgaccaagtcctctaaatgcaatgggagttggcgagataaagagaattgtgcatggaattttgaggagaaattcttccaagagtttaaccttccaggtgccaacttgaagtaccattactgggcggcttcagagagtgtggcaggaaaaactctacaacatacatctcctcgtactccctgtaggtccatttgcatttcaaaatatttaagatatgataagggatcttccttcccagtatacatcttccaggtcggcatcttgatcttgtggggcaattctagagcattaatttctggagagagtggggatccacgtgctctctccaacttgaggtcattgttcttctgactagccagaccttggaacatgttttttagttcatccaactgtgcttgcacggatggattaacttgttcggtctcttggccgactagagtcatgtcaggatctctttgagctagattttaagcatgggccccgggctgagtggctggcgagacgtactgtttgtctagccctctccttctgtttagattatcccttagatcatgagtcgttcctagtctattaaatatagatgcattaggttgtcttagtgactggttggtttggccgaacattgggccagaaccattaacctgggtggagttattaggtataacttctcctgacgaattagtagataaggtctggccgcctaccgtacggtggcctgtcttgatcaatcatctatggctgcttgttgagccctcaatgtttccacctctttatccctccatgcagtgaacagacgcctttgctcttcaaatgcaaggttcactgtagcacagagctctccctgatcatggtgcagagtattagtatggccttgcatgagttcaagagcattacgaaggttctattggaatttatgccctaaataaaac

SEQ ID NO: 60794 - DNA, 1755 bp, Cannabis sativa
aaatttaaattttatgcttaaatagattagtaggatcataatcccacttattacctgattaacctataatataaatataaaccctaattatttaacattaggcttatcgggatattgcaactcctttcagaacaaagctcttggtagagagattgaactgtagttagggaactcgagttgtggctctcaatgaaagcaccaaaatattgacgctgaaaagtggccaaaaccagctcaatagattggtgagatgaatgatgagtttaagtaaaaaaaaaaaaataagagagacacacacaatttatagtagttcactccccatgtcccgatggtaatggagctacatccacttcgagattttatttctcacaagatggtaattacaaaaaaaaagactaagtgtttaagctctagtttctagagagagatactttgaccttatgggtagttttctgaataagaaacttgaagcttatttttgtaactcccttgagggtaaaatttggtgtcgatagcttaaaaattgcaattgaagtgtgagacataaattgataaagcattaaattatcttcaaaatacaagttgaatcacgttaatcggatcaatattgagttatggtagttttattgaaggcagttcataacccagcacccaagttgacatccagcgcccaggttgacatctcagcacctaggttgacatatgacatcaacctggatgctgggtaagtgaaaaaaatgtccaaggggtgtactttaagatttttaagtggttagtctacttttgtgttctggcgaagctggtcaccaattctcagtgatgttgctattcttgggaaatgagagagttgaaactcttcatttttgagtgagtttcccatgatggaaatgaaaaatgcaaagatgttaattttacttctctaacttcatgggtcttagttattaggaaaaactagatggacggtcaaaacagaatcagaagcagataagcaaaacccaacgcactaggccatttgtcaacctgtgtgttgggtactcattctcgagctctcgggattttttttttttttatacttccaagattcttcaacttgaggacaaggtctcctaccccattttgaccattctggattcattgatcgaatcagattgggtatttgagccaccatgttgattgtcaacctttgcactgggtcttattttcagggtcttgggtttgtcattttctccctgagtttccttgaatcttcattatttctgatgatggaaaccattcctagaacatatttttgagaacttgattggaaatagcccagtttgacaatatgtcaacctggcccaaaaatagttgaatcttattcttttatgacaacagagaagatgcttggaagagttcttaaaaaacaccactggaatcggcctaggttgacaaaatgtcaacttgggcgctaggcaaggcccaagtgtcaacctggatgcagggccttgtttctggcaaccaggaagtgctattttttttccctaaaagtacctatttccttgtttttgaagaagaagaagaagatgaaaaagtcagattgtcgatctggtacttggaaggcacctaaattaataaattatgaacctgagcgtaaggtgctcggggccgtgggtgctcaaaaatgaacttactctgaatctgattcttatgcctcaaatatgtccatggtatgtctaattgatgtcccaatgaaaagtttgacccatttgtactaag

SEQ ID NO: 60795 - DNA, 742 bp, Cannabis sativa
accttaggtaatttctttcaaagtgatcaaatgtttactgagtttttggaaaattaaatataatgaaataataagttcaaaaaaatagtattaagaagaaatgagacacgatttgttacgtggttggggcgtcttagtccacgaggcagtattattagcttttttgtaatggagttcctacgacataaataagtattttttggttatgaaatttttaaatcaattttttcgaaccctttgcgtggaaggcatggtgccatatgtataggcagctaagttaatgagccagacggatttggtctgtactagggttttcttatcaaatgagtccactagtatgcggtaaaatacaatgaatttgtactttcataagttattgggctgggtaagtgaggcttgattccaaaaaataatttgttgtacggtgcatggtactgttgacattgatagctagcgtgtgtgctattgttgagaaagagaatgtcagaatatgggtgcaatgcacaaaaaggtgaacacctttttttactgtgagcctttgtggaatctaacggaggggacaggtcgccaaattctttgagattgtgtcaaaggcgtgccatgtatgtgctatcactacaaataacccttttagcttatgcttcttaatggcccctgggggcatccgtcttgtgttcctaaaattacttttgtccttagtatttaattggagttgaactgctgatccaggaacttgatagat

SEQ ID NO: 60796 - DNA, 775 bp, Cannabis sativa
aaaccttgctcccatcccacagaagggcaacgtacgatccggcaacgaacaaagccttattacaagaagcgctggatcaaatagacgagctctgggatgagtcccagatacagatggcagcttaccaaaggtgactaaatacatcaacgccaaggttaaagatagaaaattcaccgttggcgaactagtcctacgaagtgtcttctcagccacccaagagcaaggagtgggggtacttgggccaaattgggaagggccatacgaaatcgaggataaaataggctccaacacctacaagctaaaaagaattgacagatccacagtgcctagggcctggaaagccgaccacctccgcaaatactatcaatagttaaagaaaaagtttatattctgtaaaataacctgtgtcggacaaatatatgtgatatcctatgcaagttccaagctaagtgacctaaagtggttagattcttaggccccttctttgaagattttgctctggttgaagatgggggagacatggcctggactcggtgaagttctaagatttcttggtcgaagccgaagaaaccgtggtcgtgaaggtcgtggagaacttcactcatctgaaaaaggaaatccagcaattagcccccaaactaaaccctaagatagaaaaagggaatgagggtcccctaaacgctggaaagaggccccttccggatgcttgccaaaaataggaaatccagagattttcctaggcaaacattgggtgaaaactgttgggttttatgcc

SEQ ID NO: 60797 - DNA, 1026 bp, Cannabis sativa
ccaaaaataacaagtggaataataaaatttaagaaacaccctgttatttttggtaagcttaaaaacactaattagatttttagtgatatttatttggtattggagatgatctaataaaaacaatatgtgattggtaaagaattttttttttaattgagaaagtttattgtacatttaaaggcatattcaatcaatccatatacattggacttacattgaacttgcaacttacatgataaatagatgtaaaataaaaatagagaataaaattttaatataacaaaagataataataagtccaaatccgaccatattttaaggagttcaaattgattttgcttgtaggattgaaaatatgagtatatattcacttcttccctcatctcagctcaattgttatcacgctcgaatacattctatattagtttgattttgcttattacatatcttaatacattgaaaaaaattgcattgccccagtaaacaaaaaattgcattaaaaaaattaaatacttttcttttcatttgataattataacacaaaaattaaaaaaataaatcccacaaaaataaataaataaaataaagtagacctaatatttttttaataacaatatagccttcacataataaaaattctgagttcgtcacttctcatatcatcaatgttgtgaatttctaagcagtttgccatatgagttaattaacatttgttcataagctacctaatcatttctaatgcatagagaacatccctttaaaagatgtaatcttcttgttgatttaaagtatcctttaaagtgaattttagaaatcaaataggcatggcttaagagattaattacaaattaagaaaacactaattagtaataatatgtacattaattagcaaccattttagtccttatattgattaagtgtcgaatataaaaaaaacaaaaccccttcagctgggataaattgtataagtagaagatttgatataattacaagagtttattgttgagccatactactttcactttg

SEQ ID NO: 60798 - DNA, 766 bp, Cannabis sativa
gttttaagagttttgacataacataccactagcttattaagttacatatattattcgtatgtacaacacatcactcaaccttttcttattgaagagaaaatccatcagcttagaccaattagattaacatagaataaataaaagacctgagatagagacacaaacctaaccttaagctagcgctttcatagtttgtcttttatggaaagttggagaaattggagatagattatctatttctatatctatgagaaataataatagaatcacaaaattaaaaattactgaacattatttccttctattaaataaagaagtttttattatatgcagttttatcaatattagtacaatggaatcatcaaatttaagatgaagcaattatagtaatatttttttaaaaaaaagaacaatatgtatagtacaatggaaatgtattattattataaataaatgtatatatatatatatagatttccttcatttttctttttgagaatatggacatttgtgcataactttcgagcaggggacattcttcttacttaacaagttagcatcaaccgtacatatctataataaatatacatatatatatatgtaagtatatatgtatatttatattattcaaggtagctgccatataaattatgaaacaaaaaagatagatttattcacgaaacagaacatgctatatagtagaacaaagattataattagaatttagaacccaactaactatttaattataacaaaagcaaatcaa

SEQ ID NO: 60799 - DNA, 690 bp, Cannabis sativa
gacaaattgggcggatgatgcggatgcgatggacttttaagcatctgcgcaatttacttggagtaaattcaacttgaatcagatgaaaaccccttcctctcaactttcttttactgaaccaactaaaattgaggatcaggtggttgcaaatatagatttggatgaagctgaggttgaagcatcatactggagatcatctattatctgcattgtgttaggggctaacccaccatttagagtatttaaaggctttatcaagagaatatggaggaatttgggagtggaaaggatagtgagaattcactcagggttcaccttagttagtttcaaggatgaagttactaggaacataattcttgaaaccagggttatacaattcgatagaaaaccagtgattcttagacactggtcggaggatatggacacagctcgaatggtcaagtcggtccctgtgtgggtgaggttgaatggcttggggctccaatattgggggaagaagaatttgagtgcgcttgttaacactttagggaagccgattatggctgataaggtcactcttgagcgatctatgatcaagtatgctagggtgttggtggatgttgagattaaggatgaacctccgagaactattgcctatgttaatgagaagaatcaactaattgaacaacctgtcgaatatgagtggcttcc

SEQ ID NO: 60800 - DNA, 814 bp, Cannabis sativa
tggatgaattaatgtgaatgaatgttttgaacatgttgcatttgtaatattaaactgttctggagagtttgaacaggtttggaagtgatttggttgggttttggagcatcaaaccagagatttcctatttctgcagcagggaaaaccagttaaccggtttcacatgcatagtgaaaccggtcaaccgattttggcaacagggaaaccctagttttaggcttccaaattgattttgttcggggtattttcccagagcttagaataggatatcttaatgatgtttgaattattccgaatcagtggagagttagatatgtccggttatgaagttagggttattctaaagtttggaataagttgtttattgagctttgttgtcatgacataggacccgggattgtcaagctttgactccacttgaggtcagcatgtacactaaatttttggactgaggtaagaaaagttttaaataccgtatatggttaacgttataactgttacagttcgattatgatcaaaatctcggtatgtgtttgttgtaacttaatctcaaacgagattaacgatatgtattcactgtgactcaattatgatcgagggaaataataggaaacgattattgtcattgtgactcgattatgattgaggaaaaggataggaaacgattattattgttgtgactcgattataattgagggtaatgttatgaaacgattattatcgttgtgactcgataatgatcgagtataagaaattgtcattaccgttatgagtaattactcctgaaaccgcggataggtttcttacttatcgt

SEQ ID NO: 60801 - DNA, 1029 bp, Cannabis sativa
  modified_base (983)..(984): a, c, t, g, unknown or other
tataaaaatgattttactcatactataaatacttcctaaatattatatctgttatgattattatttttgatacagtaaatttgttattataactacaatatatatatatattatttaaaaaaaactaaaaaatatttttttctttctaacaaaataattttacagatactgcaaatggtggccaacataccatgtttgagatgttacaaagatgtttatgccaaaaacatgaagaaacttcagacagtaatgcgtttcatacaaaaattcaaacactttgccttattcaatgggatgtaagtattatatattaattataaatatatatttatatttttcaattatattaatttaaattttatatatatttatattattattcttgatatatatatattaattaatgattgtagatttgaggatacaaattctgaaaggctaagagaagaattgatcaaagggagtggcaatttggaaataatggaagcattcaattttgatcccaactccattgattgggaagattatattatcaatactcacgttcctggcctcataaaatatgttattatttaaatgatatattaaattctctctattttctaaagtatactagaagataataataatatgctaataagctcaaaataaaacacaataaaatactcttattggaggtaatattaattatgaataaatatgttgggtcttgtgtttaattaaaactctattataatgtaatcttgaattttattatcaataaaaaaatgagaattatattattattacttgtttggtttaatgctaattggttcacatgtttattttatgatcatatgtttgatacattgttattatataggattgacaataaaatggatcgatgattaaacactacaaaaaaactgctatctttagttacaactttttagtcacggtataatttttttgtgactaaatataacttttagtcacaacaaaannttacttgtgactaaaacataatctttagatacaagttgtcactaa

SEQ ID NO: 60802 - DNA, 581 bp, Cannabis sativa
atgcatgcatgcaatttagaggtatgtgttgtgttgaaaggacaggtaatattacatgttttgttggtatttgttaattctatattattctgagtatatattaattattttggtgaaaacaataatgttggcagagaatattagtactaattaataatgagttattaatgttctcattataagataattaattttgaaaaatattgattcaaataatgattatatactattttaatataactaatatttttttaaaaaaaaaaatatttataataaaatttattttcaaaacataaataataaataattaaaaaaataagtatatattatattattatctttttaattcattcattttattataaattcaaaggtagtttgattatatttaaaaatattttcactactaaaatcaatttaagttcataattttaattttttttttacaaaaaaacattaaattattatactaaaatatagtctaaaatatgatatatatatatatatattttagactataaaagtagtgaattaactctactattagatatcaataatgtttagtactatttaaaatgtca

SEQ ID NO: 60803 - DNA, 1695 bp, Cannabis sativa
aatttagcattcagagtacataagggcttgtaaattagctggaacattataatcaagaatgctacaaccagaaagaaatcgagattgcctagcaacatagtgggcaactcgatttattgatcgttttacaaaacaaagactaacattttttaaagaggaaagtaaaaactgacaaatctttaacaataagaccaaagacagatgacatagtgtgattatttcgaattgcttgcacagtaaacatgctgtcagtctcaacctcaacatcttcccaagagttcctcttcacccaactgagtgcttctttcactcccatagcttcaattgtctcggctggataaataccaccatgatagacggatatagcttcaagtactttgcctgaagcatcccttgcaacaatgccaaaaccgtaactttgatcctcttggaataaggcagcatcaacgttaagcctaattatattaatagcatgtttaacccaaagctcagcaccatctccatttgtccctatagacaaagaagaaaggtatgttttatcttgagctttcttccattgatcaagcattgtaaaagcttatgcaacaacctcatttgtagtggaactttttttttttcaaaccgtgttattcctagctttccagatggcccaactgacggaagcaacacgacacacggtatcattgtccaattgcataaaaaccccctccaaccagccacctacaaacaagacagtagcattatgaatttgcaacccgaatttgcaccagcaagcttgagcaaaagggcatgaaaaaatttacctaattaatcttctttttatcaataagtcttttatagtaatggtcggcgatggtaataaaagagcattgttattggttatcagtagtgctcagcatttttcataagtgtcatcttataattgattaacgatattcactaaaaaaaaaattctaagttatatgaatccgctatttaattataccaataatagtatgacactaaaaaagatgctaagtactaatggtaccctttagcaattttcttaataaaaaaactcttttctctgttcttgatttgattctcctttaattttaatttcttggtgaatttattaggctcatctcgcgacacggcataattaaaggttgataatgattgtacttaagtgtttgccgtgacaatcgacattatatagtttaatttggttaagttacacaaacccagcaagaaaggaataaggaagccgagcatgaccaaaaacattaaatcttgggattagtgaaagactgatattttccaaaaaaaaaaaaaaacaaaaaagaaagaaagaaaggttgatttagaacaagtaattattaatgcaaaaagaattttaaattaaaaaaattagaaaaatactaaaaggtgttaataatgtttaacatctttttcttttcttttttaacaagggaaagtatcttttttcaaaacaagcaaagacattacaaaataaacagcaagcaaaccagccgccccactctaccagttttcaattacattgagaatatagttgaaaagaggctcattcctcgtactgttacagcttagaaacctaagtttaacaattatcttgacttcattgcttacaatctcaacagtcttacaattctgttcaaaaatacagcagttgcggtttgttcaaactgcatacaa

SEQ ID NO: 60804 - DNA, 2230 bp, Cannabis sativa
cagataattttagggtcaatccctctcaaatctgagtggatctaggcaaactgatcctggtttgccctcaaaaaaattattaatttctattttagtttttcacccaagtttttcccaatgaatgcacactttgtgggatttttttgatataaaataaatcttctaatttctcaactgatttcaattgattccattatcttgaatccaaggatcaagatcctcatcctgcctctcactttcttcagtcttgacgaccattagttgatgaccaacttttctattatgtagctctatatggtagcattcatgagccagtagttggtcacctcgcaccactcctacacctgtcagtgtctgaaaacttcagggataggtgcttaattgaactaattgcccgtagtccaattaaccctggtcgactcagtagtatattgtaggctgatggtaggtcaacaattagaaagtcttgcattattgtagtggataaaagtgcttcgctcacagttaatgggagcttgattattccttgactggcgacattgtcgcctgttaatccacatagatttaccatgcaaggttgctttttggagccccattttcttcagtgtatccttataaaagatattcactgaacttacattgtccaccacaccctttttatccttttgttggtgagatggatggtaatcgccagtggtcgacgtgaggatacctcacgtgctttgcatcttcctctgagagcacaattggagattccttagtcttagctttcttagaagattctagagcaaaaacagactgctcgttcttaacttcctttacatatctcttttgggcattgttactttctccaatgagatgtggccatgccgagataaccagaatgtcctctccttcaagaggaggaggttgtaatctctggttgcctggattattgggcgaatttagctggttttgtccatcgcctcgtattttcacatattgtcggaagtaacctcgcgagataagactttttatctcgtctttcagctgacgacattcttctgtcgtatgcccaatgtccttgtcatacttaaaaaatacttacaaaattttgttgcatctcttttatgtctcgtatgcctcatgggctcaggtttgcggaatgcgaccttgtgttcatgtgcgagatagatatttccccaagtttcattaagctcagtataaatagtgtagattggcacgtacttgtcatgcttcctctattttttcaagtccttagctgattcattagagtcatctttcctcttagagcctcttggattgtgagctttcatccagatgatacttgtcgagatagtgttgggtttacttccaaagccagtctttaacaacttcatcttttttcttgattcctctttttgaacaaacacctaaactctctcattgaactcactgatatttttcactgggcgaccctgcaagtcatcccacagctcccctccagcacttgagagatcagtcgtgatccctacttggagagcagtaagctggatacagtcgttcaaatttctaacccttacagcagctatactaaaaagaccaaagtaggccttaagtgtctcgcgcgactattgctttatgttagtaagagaagacgctacagtcacttgtctcttgctgcctagaactatttcttgaagtccttagagcactgttcccaataggtgattgaatgatgggtaaatttgttaaaccatttgcttgctgccccaactagcaaggtagagaatataatgcaccgtaagttattcattagattgctgggtcgcatgatagtattaaaattattaagatgggggaccggatccgtagtcccgtcgtatgatgagacaagggggtttagatatccttggggtaatttagcactcataatatctgggtggaaaggctcaggctcctcgtttgagtcgtaaagtttcccgaattgcccatcttggtatctcctgaactagtcctctaactcaatgatttgtaattggacaggatcctcttgcgtttgatcgagttgttggcgtaagtcaggtttcttttgatttagcaaattaggaagattcggcttttgtggatcatagttacttacaggcctcgtccttgagtaacttttagttctagttgtgcccatactctctccatcggtactgcgatgagttctatcccctcctcgcgtagattgactatgagttcttgt

SEQ ID NO: 60805 - DNA, 1168 bp, Cannabis sativa
aatgataaccgtaccttgttgatagaagaacaaggatgaatctgacttggagttcttgaaattccagctaattagagtgcttttaaccttgtcaaaccaggccctcggggcttgcttaagtccatacagagatttgtttaatttgcaaacaaaattctccttgcctttctcctcaaaaccttgtggctgtaccatgtatacatcctcttccagtgttgcattcaagaaagcattgtttatgtccaattgtcaaatatcccaaccccgagatacggcaatagttagaacgattctaacagtcgtggctttgatcaatgggctgtatgtctcaccaaagtcgatcccaggcctttgatggaatcctttagcaactaggcgtgctttgagtcgttgaactgtcccatcaggattgtacttgattcgaagcacccacttattgcctattaagttttgatttgaagcagcagggacaagaacccatgtgttgttgcgtgtgagagcatggtattctgtgttcattgccttgttccagccggggtgtgcaagagcttcttcaatagtggctggttcagagaaaatagatgcccacttggcttgtcccataaagaccttgggtttaaaaataccagctttggcacgagttatcattggatgcccactggttcgaggaatttcaataataggaggatcagttacagggttacccgtgtgtgcatcaatagaagtagcagaccctattgaagaagagctatgagaagaagagctagaagagctatgagttcccctctcactgcctggagctgaaataggtgctgaagcaacaggtgagtgtaccggggtgacaggttcataagaacttacctgagagtgtgttggtgaggatggttgttcttcatgagtgcttaaagatggtatatcagcaacagcaacatggccaataggtagagagacagaagggtaaacagaccatgatgagctattgatgataactggtttttcagcttgataattattcaagaaaccagattcaaagggaaattctagttcattgaagaccacatttcttgatatgtaaatttttccagttggtgtgagacatctataacccttatgagactcactatatcctaaattaacacacttgagagagtgaaattgaaatttatgg

SEQ ID NO: 60806 - DNA, 637 bp, Cannabis sativa
gagggcattcacctatgtcaacagaagtatgctcgggatctccttatcaaagcacaaatgcttggttcgaaaccttctcctacacccatgactagtggtattagactctcagctcaacagggagaaccacttgctgatgttcaaatgtacaggtctattgtcggagcattacagtacatcacaataactcggcctgagctttcctttagtgtgaacaaggtctgtcagtttatgcagcagcctttgtccacacattggcaagccgttaagcgaattttgaggtatattagtggcactatgaatcatggtctcaggttcactaaaccagtgtcacacgatcttgttgcttattgtgatgccgactgggcttctgaccccgatgataggaagtccacatctggttatgcaatattctttggctcgaacttgattgcttggaagagtaaaaagcaacaaagcgtttctcagtcaagtacagaggcagaatatcgaagtgttgccaatgtgactgctgagcttacttggcctcactatctattttcagaacttcatatcagcttatctcagccacctaccatatggtgtgacaacctcagtacaatcatgcttactcaaaatccaattcttcatgctagaa

SEQ ID NO: 60807 - DNA, 1429 bp, Cannabis sativa
attctcttttgcatcaggagagagtttccttggcactctgccttgtgtgaggattatttccatttccatttaattcaataacacctcacatatacctacactttctgtagttactgctgtaattgccttttatttcctgttggttgtttgaaattgcagcaggtgctcatcaaacctctcttttcccatcatgaaacttcagttgagagggtaattgaatattatagatgtaaaattttacttaaatatttattctgttaaattttgtattatagatggttaatttgagattggaactttgctctctctctcagatacttttgagccaaacattggtttgaatttagagatgtaaatgtggaagccttaaaagtgttctatctttcaatattgagcatgatgttaatgtcctctttgttttgtgttatatttgaccagatagtgttttttgggatagacaacattcatgcaatgcgagagagttttgctcggctgagagactacctagatatggtgcaacttcatcagatggaatgtcatcattcttggttagttttgatatagaatatactatcttttcaattaatgcgacatccaatttactattaaaagtatggtcagttgtaaaatttgaacttagaactcattttaaccatgtgtgtggtgattgattgtaaagttttcacttagatttcacagttagtattttaattatgttgtggtgttctatcatgttatttcatttatttcatgaacaaatgccttggtagattagtatcctgatacaatggtatcatttgttcaaatatagcttttgaagcactgaagttaaacactactggtcaaaattaaatttaaaaatgaaactacatgttgcttatgcatgggttcaaacaactatgaatatgcaaactttctttaggccttcttactaaacttaatgctacaagtaagaacattttgtattataactagtaacagaggcatgttggatggacctggggttgagataatctcagcagtacgtcagcttagtgtaaactcttggtgatagtagttggttaatacacatactttcagaaatacaaaatacgaaggcactggcaagtaagcacaaaagcaatattgaagaaaaagtttatagaataatttattataacaccctcatgtatttttctagaattttaattatgggataaagcttacagagatgtttgtacgcccttcaaaaattttttggatgtgtaatatttttttagtaagcaatgtgagtgccttaatgattatatcgacaattattttctttcattgatgtttactaaaagatttatatatatatatatatatttaacttttttaaaatttcagttgttgactttgacaatagaaatacaacatggttgtggacttgtggtgcttagagatcatc

SEQ ID NO: 60808 - DNA, 1558 bp, Cannabis sativa
ttaatttttgagatgtaattcgtataaatatatatatgggagatatttatatgatgataattgtacgattttgatgtgggactagatctgagagtacgtgtgtggattagagaatttattggctataaatatattataatataaatattacgtcattgactacgttcttttttcaaaaagtaagtattagtactctttagtacattttaaatgtaatttatattaatattgatctaattaaatattaaattttatgtatataatttaatataataatttttaaataaaatattttttaatcaatttaataaagattaattaaaaattttgtttttttgaattttaatataaactaaatatgctttttgaatttttaacactgttaaaatttttgttaaactattaaaattattagattcaaaaacttttatttaattttaataagaaaagttaatatgaataaaaatttaaattctgtagcatattaattaatacatatataataaaaattgaataaaattagacaaatctctttaaatctaataactaatctttaataaaccaattaaatgtattaatatgttatatagtaatttattacgtcattaaatatgtaagcattgctataataaaattttgatagttgtcatgtgatcacgtgtgttgtattgtatatatccccatgtatataatacaattgaattaaccctagctagcttacgtcactgaatacctcccatgcaaatctattatatatgctgctaatatatatattagggcaaaatatctattttatataaaatgtgactatataatcgagtggttatataatcgaattcttgatttatcactactacaaaaattagtttttgcgtcggtcaacgctactgttcacagagttgaccgacgtgaatagtatccaaaaaataaaactgacagttacaaaatgacgttaaaaaatatggattagcgtcatttaataaaatgacactacaaataaaactgacgaaaaataaatcaacgaaaaattaaaagtggagaccttattctcgtcggttcaaaaatatcgagtaaaagacgtgtgagcttttaaaactaacgagaaataaaaggcctaaggttaatgaataacttatgaaaacaacttccaaatccctaaacctcctactcaatctcactgttcacattcatcttcaacctttgcgaagacaacaaagctctaacgactgggcatcttcgacccattgtcgatcctccattgttgatcgctctgctccactctttcctcttcattgtcaatcctccatcatcgaccgctctcctcccctctctcttcctctccattgttgacatcttctcccatctcttccttcgaaccctaagtctacgattttaaccagccgtacccaatcgttctttgatggaccatcctcctctccctcctctcctcgatggcagcaaaactgatagaagtaaagtttcaatcttcttttgtttcttactaatttgctatatttatcaatttctccacaacatataattaaatcccttaaaatgt

SEQ ID NO: 60809 - DNA, 821 bp, Cannabis sativa
aaagctaataatagaaaaattattttacacagaatcatagaatctataccaaattattattagtagtatatcatttttttttttaaataaatgacgtggtttcatttctttttaagtcattgtcctaaaaatagaaaaataataaataagagcaagaaaagaagaagaaatatataaggagacaatggcgggttcaagtggttggttcacatgtgttatgttacttttaacattcctttcccttgtttcatcaaaacctctcttattgggtacctacttttttcttttcttagttttgattcatttcagacgttagttgcctttttcttcaatcgcattatgtgcatcattaatgagtatttcattcatattattcttgtcaacaaaaaataaatatctggattacactacctcatttctctggttagttagtgtctttcttttcttgtctattacttttattcattttgaaaaaagaaaaaaatcttaaatttatcaggtttttcttggtgggtgttttaaaatttctatgacattttttgacaaaaaaaatgaatgttttattttttagtgtatgtatattggtaaagataaagtataatatatacataggtgttttacattcttagatcgtgaggacgtgactgagcagtgatgccaccatttggagatggaattttggtttattttttggcttaacaattgtaaatggatgatcaaaacaacaagatcaataacttgcatttcaaagatgtaccaatggtcatggtttactctcccaatcaagaggtacgtaatttgaagatattttaatatatata

SEQ ID NO: 60810 - DNA, 2320 bp, Cannabis sativa
aaagatattattagtgattatactcttctcgatgtcatatcgctattggtataattattaagtatttgatcttatataacttaaaaaaataatttttaaagaatatcgttaatcaatcgtaggacgttacttattctatagaaggtactaagtaccactgatgcctaataactctgaaaaatattgccaaaaaataacaatattttcatctttacttttcttaaaacaaaaaaaataaaaaataataatatgtaagatcatattactaacttttaaattttgtttttccgataaaaataacatgcacaaaaagagaaaataaagtatatttttttttcaataattattataataaatcgttaactacttataaaatatttgacaattgtgtctaatataattaataactcaaacaaaatataataaaaattagcaaactcacacttcatcaaaaaagaaaaagaaagaaaaaacaataagctaactcatgcatggccctcatggctagaccactatactaatttcaataactcaaagtatcttcctttttggtagatagaaaaaaaaaagtgattcatatataattcttctaataataacaaaaacttataatacacaaatatatatattttttttttgtaaagaacttatttatatataagttaatgcagtttttttttccattaattatactaatcttatttatcaatatatatttttatttttatatacacacgtttaaatgattttttcttgtactgtctctctaaaggtactgctggattttcatatcaatattcaccaaatgttaaaactgccaatatcaaatttaatatttttacccctactcaagtggcctactggcctattattttcgtttctttggagaggtcttgtaattatgagcagcattttttaacatagcacaaaaccgacacgagtttagaaggtacgagcacgattaagtacaaaaaaatataaacttaaacacgacacaatatttataatataaatataagcaagacacgatacaaaaaaatataaatttaaagatgataagatacgacaaacttaaaaaagtaagtacgaattaaaaattattaacatgtgttatatatgctcaaatggtatgtattatcaatcatgcaatataacacgtaatgaattaagaaaaagaattgcatatagacttttattacatagtactagcttctgtttttatttattttattttagtttttttttcttggttagaaatattacatgttacactataataataataatttttttaagtgaaaactctaatatataattccttaatcctaatattatagcctataagagataacgtatttttaacgttgttcatcaaaccatccacaaccgcaccatattattcatatacataatatcataaaatcttatttagaagaaaataagtgtggtcacaataaaaatacaaataagactaatttgtttaaattttacaatacactcccttgaaatgaatatactaatgcacttttatctgtttctatttcggtatatgttatatagatatttaagacatctgacaaatttttgagaaatttaaaaaaatttaacaacgtcaaaaataaagttcagtgagcttgttgcaagcatgattttttaaattttatttagaataaacttttcggttggaagtcaaagctctttttttctaaaggtcgggaggtcgtgttgaaatcagttattcaaaccatccctacgtatgctatgagtctgttttggctgccagttggcattgttaatgagattcatcgtatgtatgctgctttatggtgggacagtgatgatgacaaaaagaagatgcattggtgtgcgtgatctcaattatgttggcataagaatgatagtggtataggtttcctaaacatgtttctctttaatcaatctcttcttactaagcaacggtccggttgtataatattcctgattctttagctgctaaagttatgaaagggttttattacatcaagtgctctttcttggacgttgaagaaactatgcaagcctctctcctttggaagagcattttatggggtcgagatctttagaagaaggagtgtcgttagcttgttagttcaaaggactgtataaaaattaaggaggatgcgtggattccgaaggaccatgtgggtcgaacttattctttctcaggtagtcctcacctccaaaaggttagtgatctcaacttagatcatggatgttggaatgctcctttaattcgagagttgtttaatgcagttgaagctagtgattttttgtctattct

SEQ ID NO: 60811 - DNA, 909 bp, Cannabis sativa
gctggagaaggatctgaaggaaagtagcgagagagattacctgtttctcattaagtttctacatgtttgtattggaacagtcttgctgtccaataatggtaccgaggtcagcattagctacatgcattctttaattgatacaatttaaattaagaagaagaattgggcgactgctggctttcgatatctaatgagctctctacagcagtacaagactaagaacacaaaaaatgttttcggctgcaacatatttttactggtcaattttccccttattatgatggtattaattttatttgcttgtgtactgcaacgcttatagatgtatgtatttttgttttgtagaagcttatatatttgactcatgttgactggactgctagtcacgtggaccgcactatggctccaattgacttttggaacataaaatagtgcaaatcagtgtccaagtggattcgagaccacggtggtcacacacactagtggaaaggtacatttactactttaattttctgatgcgttagaatttgatttgggagatatgctaactaactttttatgtgtactaagtaggtgaaattgactatcacctatgtgttagtaccaagttttgaatccgctgtagttggggaaccaacaaatgacacaatttacaaagcgacatgactagcaatctaatgaagatagcttgctatattggggagaaagtttcttaagcaaaggaagggatggatgacctaaacgagaatatgcctcaaaagtggaagcaacactcgaacaagcaatagatgttggcgaaagtgtgttaagaatatacaagcaaccagattcatgtcctttacaaataattgtcttcgtcataagatcctgaaacaaacaatgattaggaaagaatgagatgcaacaatt

SEQ ID NO: 60812 - DNA, 748 bp, Cannabis sativa
attaaacttaagtatttatctacaatcgataattaaatttaagtatttatgcaattaaactttagtaggtgtaataataataagaagaagaaacgtgctagttttctattcaagaagaaaaaaattagggccctagtttcttaaggcttattccttctttttccaaagattgacttctttcttttaactttaactaagcacaagcttgagaatttggcccaaaactcaaatatgggccgtccattcaaagtccaataagacagaccattctcaaacttgttcatggggcccaacaaaattaccttagagtcttagaccaaccataaccattgcttacctcatctctttttcttttttttttaggagattttacatcacgtaccgaaatttttaattttttacttttttattgtgaggcagaatttttaaaaaaaatactacattttttttaaaatactgtataagttttatactgtatactgtgttaagtttttactgttgttccacggatgttttttagttgttccactgttattttaattgttatgttttgttattttacggttgtttgataaaaagacaaatttttgtaaaatatttcatgtgacaataaaattataaacttttacctaaaatccagtatttttataaaaactctttttcttttaagaactccttttgttctattgcccagaaaaaattcctaattttcaaactctccttctcttgccatttttctttaaataaa

SEQ ID NO: 60813 - DNA, 722 bp, Cannabis sativa
aataataagtacaagcaattcatatagactactaacaaaagctacaaaaaaaaaaaaaaaaaaaattgatcgaaccttggaacattggtgccatttacaaaattatcatctagtgttcgtgattccagttctgctttctcaatttcagcaagagcagcaatcctctcttgtgtaaaagggtaggcatcaatgccatgttcttcaaccagttcatttgcatcggagttcacagtcttcccatctggacctagtatgactagtgtaggaatgtctgaaacatcaaactcaaagtaccgcacaagcttctcagtgatcttatccttgtatggcaaagccaaccatggaattgtttccaattctttcttgaactcatcctcttcatgattcagagatattaacacaacttcaaacttctcacctttatccttgagcgtattgtaaacctcaacaagtgtattagtaaaaaattcaatataaggttcatgagaacaactcactgagaatagaagtccaacagttttaccttcaagctcagagacaagaacctgtcaatacataaattagaaaatgaaacaccaaagtaaagttattagcacaagaatttagccatgataatttacctgattcccatctttcgaaagcagatagtttcgggagctagataccagaacagaactcaaggtttggttcctcttagcttcttcttcttgctctttcaaaaa

SEQ ID NO: 60814 - DNA, 505 bp, Cannabis sativa
ccaacaatcatttctttccatctctatctacacaatcatctcttttcatcttcatttacatacaaaacaaaccaatatacatatattttatactcatctcatattacaaaaaataaaacaatcattataatatatatttaagtttacactataatatatatgtattcattactaaaataaataaattattatatatatctaaatttatggtatgtgtctatgcgattaggagttattttctatgtatcttccatcataaattaaacagataaaatcaactcaatatattactaaaaataattttagtaagtttagaaattagaaatttgtgtatgttttatttttaatattactagaaagctaatataatattatatattataatttttaaaaaatatatataattaagtgtgaattagattgaatcaattactttttaaagtcaaacaacattcaatgtgcacaagtacggatttcaaaattttcaatcaaatccaatccgcgc

SEQ ID NO: 60815 - DNA, 2940 bp, Cannabis sativa
  modified_base (2727)..(2729): a, c, t, g, unknown or other
tgaattccaagccgagaattaacatctcttgtcactcctctccaatttagaaatttctagccgaggggtgacatcccttgtcactcctctccaatatttacatttccaaagcgcaatgacacacaaataaatttaagacaaggagaatatccaacttcaacaacaatcccagtgtttatggaatatttgcctaagaatatgggatatttttatggatacttatttttctattttttttattcattatttagaaatagatacgatatttgaaagtgagacaccccgacatctagggattcactaacaaaccctaagtctatataaaaataatgatatactggctagatcgatggcttgcttgcttctctgctaagaacacttcattccttccttcatctttttcctaagctcttcatacgggtacgacaccaagcctccattactcaaacactattacacacagttaccaagaacaagagaccattctcttttcttgctcccattggtttattgtttctgttactaaaattataaacaactacacaagtgcacgtaatcaagcaatactcacacaggtgaggtcgatcccacagggaattaaactgaatacgtaccactaaattagacttgtatttctatttggtaaccaataattttgagaaaataaaaataaagaataacaaaaaaataaaattaagcaataaaggtgtttaatcaaggatgagaaattaagaaaacgaatcatgttattttaattacctaattgctaattactattcctctttcttaaagtgaatggcatattataaaaattaacctaacacttttaagatcttttaggtcctaaatcacatgttatctaatcatctttgagatagactaccatataacttgcactaagcaataatctaaatgtcacaaaggctatacaaatactttcgtttcacatcaaaacttaatttattcaattttagcattctcaaaactcacttttcagatttcgaattaggatcatcaagcatgcctaagatgatcaatctcaagcatggaattaagcacaaatatgaataaagtcacattcaataaagaaaaatagcatttatcattaactcaagaaataatatcaatcaacattcatcatctcctcaaataggagtttagttcataatctccatagtcaaatttaaaatagaaaataacatagaaaaaaatcaagagataagaaagaactagttggtgatcttgctctgggtcgccacaagtgcttcctttgcctccttcagttctagggttcaaaatctgtgtgttttgcttttaaaacacgagacccttatatataaattaggaatgctatcttcgaatgacgaaattctaaaactgctcaaaattctagtgtttagcccatagtcgcgactacataaagcctagtcgcgaccatagacaaaactcaaaaattgagctttctgcctagcttcatagtcgcaaccgcataatttgtcacgactatgatctctggtggtcgcgactactgaagataacttgtcaactttagcatatttttcttcagtttgccccgtctttttacaaattgatagaatttgaactctaatgcctcggggatctgaaacaagagaaatcaagcgcaaaacactattccaaaagataacattaacatagaaaacgactttacaatcaactcaaaacttaggctaaaaatagcctaacagtttccaagaacattacaaccatcatccttatcagatttgtgagtgttgggtctcccatgaaccttgtgttcataagtctcaatacaaattttacttagaaatttctttttgtattattattcacacattcttaagaacataactttagtgtgtcgaatctaattaataaaaattaaaatagctgtagtcccattaccatcatgacatgggagtggactattataaattcctagtgtttttattttttatttttttgcagttttatttagtcaaataaattcatcacattcatcttactttttacgatatttttagattaattgacaaaaaatctcgtcaatatatcttgttccatttttctactatatataccaaacataaagtaaaacttattatgtcaaaataataataataataatgttgctaagagtctaaaatacacactaataatccaagatgaaactttttttgagaagtaaactctacattatggtctttcaaaaaactctacattatggtcaatataatttccgttttttttgtgcataaaaagaattctacgtacgttatggtcaataattttaacggttaacttttttaattaattattgtaggaactaactatacacatttcaatcgaatgtattgtaaaagcactttatattatataattataattagtatgtttttaactatcttttttttttaatgggacggttaaaaatgaatgatgtgcgtgagaggaataaagattttctgttaaaaaatggtatatcatagtgtattaaaccaatctaaatatgacacatcaatttatttaagaatattttaaggaaaacaaaactgtctacatagttaatagtatttaagaaaagtagttagttgagttggcacatttagatttatttagagtattgctattagttaccactggtatctagtacctttgcgacatgtctcgttgtgattggctaacgatactctctaaaagctattatannnaattatatgggacccaatacttagttggactaatagcgatactaacacatagtagggtgctaggcaccactaatgccctttagcatttctcatttattttttttaatacattatgaaacaccaatttttaaaggtaatcttgattatgcgtgagagggagagtgactccacaaatgtaaaatgtttgggtaggttattattttaatttaat

SEQ ID NO: 60816 - DNA, 2015 bp, Cannabis sativa
aaaattcctatgtctttatattgctatatcatatatttgttattataaatcacttatcgcttatcaaatagattcgttgtcgttggctaaaagcgaggtcaacactaacactaaaaaggaagaatcccctagtcagagttcggacaagggaaagaacatagcgaaatagtgaaccgcccaaggcggggacaaagatgtggatccccgacttggggaaccaaataaaaatattgggccagtggaagaactagaagagattggaatcaacccaaatgttccgaccaggaaacttaaaatcagaaaacgtttgctgctcgaagcaaaataagcattgataaaatttctaagttcaaacctaaacatttttgcctggtcacatgaggacatggtcggaatcgatccttctataatttcacatgccctaaatattgatcctaacttctgacttgttcaacaaaaaagaagattgttggacaaggaacgagccctagcactaaaagaagaagtggaaaagctgcacaaccataatttcataattgaagccttgtacccgacctgggtcgctaaccccatactagtacccaagccgaactaaatatggcgagtatgtatcgactttgccgacctcaataaggcgtgccccaaagactgctttccacttctaagaatagatcaacttatggatgcaacaacaggacataagatacaagcttcatggatgcctattcggggtaaaatcaaatcaagatgcatcaaccgaaccaggaacatacaagtttctaaacaaatatgggtctgtactattataaagtcatgccatttggtctcaagaatgcctgagctacatacaaaagattggtaaataaaattttcaaggaccagattagacaaaatatggaagtatacgtggatgacatgctcgtcaaatctaggaaggctggggggcatatagatgacctggacgaattcttcaaagtcctcaggaaatacaacatgaaactcaatcccctaaagtgctcctttggagtcagcttgggaaagtttctaggctttatcgttaatgcccgaggaattgaagccaatctagaaaaaattcaagaccacctggatatgaaatcgcctacaaaaacaaaggaagttcaaagcgtaactggttagattactgcactcaatagatttgtttcaaaattaacagagaaatgtgttccattcttcaacatcctgcgaggaaataagcaattagaatggacagaggaatgcaaaaaagcctttcaagagctaaaaatgcaactcgcaaaacctcttgtactctcaaaacctctagacgaagaagaattaggaatatacctagttgtcatgaaacatgcagtaagtgccgtactgatcagagaagagaacaatataaaacatctagtctactacatcagtaaaagaatcatcgaagttgaaggccggtatccattgatagaaaagctcacctattgcctaatcctagaaacaacgaagctacggccttactttcaggctcatcctgttcaggtgtacactgaccaactattacgtcaagtattataaaaactggacgcatccaaacgattactcaaatgggcagtggagttgggccagtatgaaatcatctttcagccccgaacaaccattaaagggcaggccttagcagattttgtggttgaatgcacgggtaaagaagagaacacttcagaaagtaacccagagcaagtacaagaacctcagccgagcaatagtaaagacaagtccacctggaagttacatgtgtacgtgttggctacagatcaactatctggtgcaggaattacccttgtcacacttggggggcaccacctgcatggtgtagtcaaatttagatttcaggcatccaacaatgatgttaaatatgaagcccttatcgccgacctaagacttgctcgggaattgcaagccgaacatattgagatttgcattgactcacagttagtggtaaatcatgtatctaggga

SEQ ID NO: 60817 - DNA, 888 bp, Cannabis sativa
gtagatgcaattccacaaggaatgacatcggcagcagccgcataaattggcattgatcctcccacagattgaattaaacaagttcttcccgccttagatagaagcctcgacttccacccttccactctgttaaggacttttctcaccaggtaattcttcttgtgtgaatccttctctgttcgaaacaaaggaaggcctaagtacgtagcatctggcttcattttacacattcccaatatgtttgcaattttgtctgcccgtttctttggtacttcttttcttttctttgttatgtgtataaaatgtggatttggaggatagaaataaatataatgtgattttatagggtggagatggcatgcaatacaagacgttctacctaaaaggccaactttttggtaagttaaaaggtcaacaaaccaactcataattaaattcaatatcatatataaatcaatctcatcacatgaaacaatatgcaaaaggaaatgtcactcatgaaacaatgtacataaaccaacttttaaggctctttaattagcaaccatgcatagtattactatcttttattttatccctttttctttttctttttctttatcattaattattattattattaataataataatatttaaatatataaaattaaaaacataaaatttttataccataaattttctttaataatatgtcaataaatgatcttctattacataaatctccaattcgacaatatctaatcaccaaaattagcatatttttggcataacataaaggtaaggccactttcaatgggcctgcaaaacctcaaatacagtgtgatatcacaccaaaacctcttccaaccgaacgacaattgtatattcatttttgagtttgtctac

SEQ ID NO: 60818 - DNA, 989 bp, Cannabis sativa
gagcataaaatgtcaacacttgcgcctctcaataatgcatccaacacttagtgaatttttttaagtgttagaaaggaaatcattggaggtagaattaaaaggacatggagagaatgcaaccaagtacatgtcagtgtacgaccatgtcacccacgagacctaaaacttgttgtgcgagaaggtatgtccagtacaagtagtggaggcacctcgcctacataccctggtatcctgacaaagggtacgctgcaaccattactcgtgcatgaccagaccacctgacacccgacagtcactacttggtgcaagaccacccactgcatcctatcatccgttgatgtacaatgtcttacttgtcctttcgggaccacgagagtattgtcttgtaaactagggccaataaagcccctataaataccctcttttcaagtttgaaaatagattggaaaatcattgtaatcccaaacatattcaagtaatacaacattctttttcctcttacttcaagctctttaagctttgctttcattttatgatattgagtctttggttttccagcctatctaattgataagttcttaggtcaacaaattattcacaataaaaaaaatatatatataatcacaattattactagaaaataaaaaatagaaacataaacgaataaaaaattaatgtatatattttttaataatataaatagatatttaatgaaacacacaggtgatagattttcctttaatctgtatattaattaggaattatatattttttatttggagtgaaatatgaaatgatatggcatatatatttatatatacaaatgtatgattattaattattgcccttaatttttccaaaaatacgtggaccaatgcgactgggacacgtggatttgaggagtagggttttgagataatttgactaagtctttttagatcaagagtatcaacaagaaagtacctcccgaagaaggtatgaggggtcca

SEQ ID NO: 60819 - DNA, 1373 bp, Cannabis sativa
gctctaatcaagagatggatgctgatcataagaggactttgcaatcaggagaaaacttaaacctgtttcaagcaatgcgggccgtggacttctggattttgttccttgccctggcttgtggtttgggatcagggctggctacagtaaacaacattagtcagataggaggatcgctaggctacagaaatttcgagacaagttcgttggtctctttgtggagcatttggaattttcttggccgttttggagctggttacatatcagactacattttgcatgtcagaggatgggccaggccattgttcatggtgatcactttagcagccatgagtgtgggacatatagtgattgcttctggtttgcctggtgctctatacatcggttcggtactggttggtgtttgttatggctctcaatggtcattgatgcccacaattgcttctgaaatatttggagtggcacatctggggactatattcaataccatcaccattgctagtccggttggatcttacatcttttctgttagagttattgggtatatatacgataaagaagcatcaggtgagggaaatacatgtgttggaagacattgtttcatgttgtcttttcttattatggcatttgctacccttgtgggatcccttgctgccttaggcttgtttttcaggaccagaaatttctataatcatgttatagttagaagattgatgatgcattctctgagggagtaatgaggttcctgctactaataataagaaggtaattgctataatctctcttactcaaaagttatttcagcttgatatctagtgtaaacacaattaactcttactgaaacaaaaattcatttactcaatagtcaaatagtttttagagagattgcaatcatctgtctttgaacttgagagagtaatattaacagaaacgattgactaaaattagttaatttaacattggtaaattttatatgagttgataaactaacccattatagaataagagcatctccaatgtatacaccaaatttggtgttacactatcactaaatttggtgtcaaaaattatttcaactctaacgataacactaaaatttacactaaaaaaatatttcttattattatattaatttttatataaaataaaatattatttttagtattatattaatttagtaaaatcaccacaattaaaagcatctttttatagttgtatacgttatagttgtttaaaatattctgtaaaattttgagaaattcaaaataattaataatatagaatgcaatattcaacagagaatttgaaccttgtttccggcgtgttaatatttttttaattttccaaaattttacaagatatcttaaataattata

SEQ ID NO: 60820 - DNA, 939 bp, Cannabis sativa
catttgtcaacttggacgttgggtactcattttggagcttccgagatgtcattttgatacttccaaggctcttgaacttgaggacgaggtctcttgcatcattttgaccattccaaagagaattcttggatcaaatttagcatttaagtgatcgaaaccaacgtaccaggttgattgtcaacctgggcgctgggcccaacaccaggtcaacctgggtgctaggcccaacaccaggtcaacttgggtgttggacttagctttgaggccctcagtttgtggttttctactcgagtttgcttgaatcttcattatttctaatgaagaaaaaatgtccggaatacttttttcgagaatctgattagaaatggcccatgttgaaaatatgttaacctgggcgttgagtaccaacttcagccattaggaagttttgtttagtccccagaaatagttgaatcttaatttttgctgaaaaacaaagaatatgcccagaagcgttctaagaaaatatcatcggaatcagaccaagttcacaaaatgtcaacttgggtgctgggccaaccccgagtgtcaacctgagcgcactgggtctcttactttctgaagtgtgttgttttcttccctgaaagtacttatttctccgtttttgatgaagacgaagatgatgtaaaatttgaatcgtcgatctaatactttggaagtcgcccagattaacaaattgtcaacttgggcgctgggttcccaggcaccgggggctctaaatgctcaaaaatgaacttcttccgaatctgatttcgatacctcaaatatgtatgtagtgtgtctagttcatgtcccaatataaagtttgacccatttgcactaagatggtcccaaaaactgaaaccctaattaggaatgtcaagttgggcgctgggcgaaaccttaggtgcccagtttgac

SEQ ID NO: 60821 - DNA, 1977 bp, Cannabis sativa
catttcagcacatctttcatggaacccaaagtcctccttcttcccaattttgctcatgatcctactaagatactccatccccagaacaaatagtaacggggacataggatcgccctgtctcaaaccccttcttgcttcaaaaaaaccatgcataaaccatcaaacatcaaggagaatctaggagttctaatacatgtggagattagtcttataaatttctccgggaatttcagatgactcaacatttcttccaggaagtcccaatccattgtgtcataagctttttgcatcaattgatcatgcaattaggcttagaccctttcctacgataattcctaatgagatcttggcatatcatgatgttatgtgctatatatctaccttttataaatccaccttgatttagagagactaaattggggaggatatttttgagtcttgtacaaatcagtttggtagcaactttacataacacattacaacaagatataggtcgaaaatcactcactttattaggacatgtaatcttaggaattagggtaatgatagttgaattaatctcttttaaaagattacctgattccaagaatgaggaaatagcatcacatacatcatttccaactagctcccaattatcttggaaaaaccaacttccaaatccatctggtcccggacttttcccacctgggatgctaaacacagctgctttaatttcttcgttagtgaactctgtcatcagaaaatttgcttgctcttctgtaatcacaggcccttctttaatcacccttgtcttcactatctgccttccctgcattttgtgtcctagcagatcagtgtagtactgaataaaagcttcagtgatttggactggatcctcaattctttctcctctagcattaaaaatagaaagaatcctattttgccttctcttttctcgaatacttgagtggaataatgaagtgttagaatcaccttcctttaaccaattagccttagctttttgttgctagaaagatgataacactttatgtttttctgcatataattcccgagcctctctctcttgattttgccattcagcattcaaaggatcattcaccagcttctgttgacacttaagcatccaatctttagccttcaattcatcactatatacattagaaaacccctgcttgttaatcgcattcagcaccggttttagacctcgtaatctcttaacaacttgaaacattttcgaaccaatatctggtttagaccatgcttcaacaacttgttcttgatataggggataactagaccacatttgaaaatatttaaacggtttcctaccacttggaggcgaaggatgaacagtcaatattgtcggagtgtgatcaaataacccctctgcagtaaaaaaactgcttcagcatatggatacatgtccagcccgctatgattcaccaacaccctatcaatctttgagaaaattctatcatccccttgttgcttattacttcaagtgaagtaactcccaccaaacttcacatcctccaatttacaattcaggacacattctttaaaagccgtaggactataatgaacccttttaccaatcctttcactcttctctaaaatatcattaaaatcgccaagcacaatccaaggctcatttgttttcagctcatctagttccttccaaagtcttctcctctcttcttccttactaaaaccatagacaaaagtgacaagatacttattccttttgtccacagtagtaatttccaaatgtattaattggctagaacaccataaaatatccaccataaaactcaacggattccaagccactactattcccccacctttatgccacgcattattcgctgtaaagcaccaattagaaaacattcgaacatataaggctccaaggcttggagccttaactctcgtctcgaggacaccaaccaaaccaacattattttttgcaataaattg

SEQ ID NO: 60822 - DNA, 813 bp, Cannabis sativa
ttttccagactgtttagcacgagtacaccagaaaagtgcatcgttaatggtctccaaactatgcttacagagaggacattgaggagatgctgtaatatgtcgatgctgaagagttgcatcagtaggtagagcttcatggaatgcacgccaagcaaaaatatgaattttagaaggtaattttagagcctagaaagtctgccactaattttcagaagtatgggagctgcttggatgtgagaaatcaggttcatctgaagccaatttatagccactctttaccgtgtagatcccagttgtagtgtagtgccatgataaaacatcttcacaagaaaacaagctcaaagggatagaaagaattctatcaatatcaggttgacagaaattggattgaagcttgtcaatatcccattgtctcagatcagtaataagatcaacaaccttaatatttggatcatttccaaaaaagaccaggggcataaaatttgaagggccttggatccaaggttgtgtgttgcagaaaacatcagtacccgtaccaattatccatctcaaccctttcagtagtaattcctttccccaaataattgatctacaagtgagagacaaagaagaaccaacagtagcatcaaggaaattgccattcaaaaagtatctattcttgagaactctagcaagaagggaggatggacattcaaggagtctccaagcttgtttggccaaaagagcttggttaaaatggacgaaattacgaaaacccataccaccatgaatcttagcttttcagagacatttccaatttttccaatgaataga

SEQ ID NO: 60823 - DNA, 1220 bp, Cannabis sativa
gcgaattttactcacccttgctgtctctttcagttggccgattactcaacttgatgtatctaatgcattcctcaatggtactcttgaagagactgtctacatgcctcaacccccaggttttgttgatcctacatatcctcaacatgtttgtcaccttaccaaggccttgtatggccttaaacaagctccacgagcttggaatcaaaagcttaaaagcactctgtacagcaaaggctttcaactctcaaaagctgacaattccttgtttataaaaggttctggtgtgaatctcatcgtgctcctagtatatgtggacgacatcttgattaccggaccaaacaaagatgcgccattgctgctattattacactgatctaaaccaggaatttgatatcaaggatctcgggcctttacactattttttaggtgttgaagttcatcggaatgcttcaggtatctatctttcatagtcacgatacattgctgaacttcttactagactcaatatggagggtgctaagccttgtcctagtccaacaagtgcctcttatgttctatccttgactaatggtgagctgtttcatgatcaaaccttataccgaagtacattaggcactttacaatatttgaccttgacaagacccgacatagcattcattgtgaataaattgagccaatttattcatgcccctaccacagttcattgggatgcatgtaaaaggttatttagatatctcaaaggcacacttcatgagggtcttcacatcaaaccggcgttaagattatgtttaaaagcctactctgatgccgattgggagttgtcctgatgaccgtcgctcaactggaggctatgctgtctacttagggggaaacctcattttttggtctgcgaaaaagcagcaagttgttgcacggtccagcacagagagtgagttttgtgctcttgcaaataccgctgctgaactcaagtggctgcactctgttttatatgagcttcaagtgaatcttccagcatctcctattatatgggttaacaatcaaggagctgcctccttagccgccaaccatgtgtttcatgctagatcaaagcacattgaaattgatcttcactttgtaagagatcaaattttggcaaaggaagtggaagtccgatatgttccttctatagatcaaactgcagacatcttaactaaagctctcaccaaagatcgattcttgta

SEQ ID NO: 60824 - DNA, 1125 bp, Cannabis sativa
atgcaagagcaaaggctgtgcaatcagcaaagccaaatctttctggtggctttatttgtcttctctctctgtctctaacaagttgataatcttgtgaattagctggtgaggtttcatctttagttgcttctatatatgtctctgactgagtgagttcttgtgtatccacctgatctgcaccctcatcttcttccctattgccttgaatttccaaacttgtcacatattgatcattttgtcaattgtttattgcagcagtttcatagccatctcatgttccttgaacacaacatccctactgattatgcattttctatgtccctcttccaaacaccataatttgtatccttttatccttttagggtaaccaaggaatagacacttgagaacccttggctctagtttatcttgtctagtatgtgcaatggctgtgcacccaaacactctgaggtgatcaacagttgggacatgtcctgtctagaattcttgtggtgttttgaatttaagagctgttgaggaacacctgtttatcaggtagcaagcagttttcaatgcttcaccccagaattttttgtcaagtccaacacccttgaacatgcatctcactctttctaatagattcctattcattcttttagcaagtccattttgttgtggatttttcacatctgtcttgtgtcaatcaattccctcaagttgacaaaatctagtgaacttatctgaacagaactctaagccattatcagttctgagtttctttatttttcttcctatctagttttcaatcagtctgttccatgtgacaaaggtgttgaatgcctcattctttgtcttgagcaagaaaacccaaaccttcctagtatagtcatctactatactcatgaagtaactagaacctcccaatgtttttgttctagaagccccctaaagatcagagtgaatgtagtgtagttttccttgtgtagtgtgtttccctggtgtaaattttaacttgcagcatttaccataaacacagtcataacagaattctaatttctcccccaatgtgcccttgagaatcccttatttttcaagttcactcatgcccctttcactcacatgtccaagtcttagatgccaaagcct

SEQ ID NO: 60825 - DNA, 874 bp, Cannabis sativa
gtgtaccttctcgtactagtgttggtaacaccatgatgtactcttcagacatcatacactttaccaatgcactttgcaccattaccgtacaagtgttggtagtgtatgaatcacaacaagcatgcatatatatatttcacacatacatacattcgcatatatatcacatattatacgctgttcttacctcttttctgaattcaagtgagttggccgatctgaatggaaggtctcgtgttagatggatgccctaatcacataacattatcgggtaaatcacaagtcaaaaccttaatctgggaaacccaaacttacaacttaaggttctgctattactaattggaactacaatatcctacgaaatagggaatcgcccaaccaaggcattgaaatggaaccggtttgcaccaggtttccccaaaaatttcacaacctgctctaaacatgcccaaaatgccaccaaactttccagaatacctaaaatgagcttacacaaccatttccaatcaatagataccagaaaaacacacaaactcaaaatataccatagatgaaccaagcttgagttttcaaactcaaactcgtgcatccatgctaccaagcctccaaacaacaataaaacaaccaaatcaactcaaattaggcttataattcgaaccacacataaatcaaaccttaacagcccctaaatctccattaaccaaaagtaaagcttcaaaaacacaagtctatggatcctggggttaccttagcttttagatcacttgaatcccttgctgaattttcggaaaataagatgaagaatggctgattcccctgggtttggtggtggtcgaatagagagagacaaaaaggatgagtttctttaattttt

SEQ ID NO: 60826 - DNA, 911 bp, Cannabis sativa
cacatttccttttgtccttcttctcttagttcagcttttaatattctttctctgtgcagaatgctctaaaaatggcttatgcttattcccgagctaagtcggctacctctaagaatgctgccatttccaacactatgcgggcgagagtggacttggccaacaaggatgccaatgaagccagggttcagcttgggtctatccagatggaactaggagaggtcaacaagaaacttcttactcctgagaagaaggtggccaagctgaccaaagatctacaagcctccaatcagtttgaagccgccattgcctccctgtctaaggatgttaacaacctccaagaggaaagggaggttttccgggccgtcttccacaggttggaagaagagaagaagactaaggaggaggagcttaaagtcaaggtcatgaagtataagtcagaggccaagcagcagagagccgaattggagaggcttcgcgggaaagtgaatgctctagagacagctggtctcgacattttctatgacttatcacatttatattcacatttccttttgtccttgttctcttagtttagcttttaatatcctttctctgggcagattggtctaaagatggcttatgcttattcctgagttcagtcggctatctctaagaatgctgccatttccaacactatgcgggcaaaagtggacttggccaggaaggatgccgatgaagccagggttcagcttggggctatcaggatggaactgggagaggtcaataagaaacttcttactgctgagaagaaggtggccatcctgatcaacgatctacaagcctccaatcggtttgaagccgccattgcctccctgtctaaggatgtgaacaaccttcaagaggaaagggtggttctccgggccatcttccac

SEQ ID NO: 60827 - DNA, 1031 bp, Cannabis sativa
acttagattccattctctcccactgttactagccctgaccacattattctgactctccatattgcaccaggtgtccattctataggactaacttatcaattcgtaagttagtttggtttgacaacggctcaatttgcaatcttactactgcactcatggattttaaggcaatgcattaaaataaacatttataaactactatgcttcctagcatgctttactaattacatacattactaaacaagtaaaggcttactgaatcgtgagctgggcttttctttgatgatgattgtacatgtcttgacgatctttggtagacaaacctgacaactctgataccaaaattgtaacgccctcatacttaggcgcgctacagtgtttttatcaattaatgtgcaacctttgctaatcaaagggttttccttgaaaatcatgtcaaattaaaacttttgatttaactattagattttataaacttttatagagttatttacataagtcgggatcccgtactaaaaattttacaaacattgtcaaaatacatttaaaatctggtcccactacgactacaagataaaactccagatgtcccgagaccgaacactccaggtcgcgttgccctgacatgtacaatcttcatccaagcccgaagctcacatatgttcagccttcgcgtttcctttacctacacataaaagtagcatctgtgagtcaacaaacttagtaagaaaagcatacaataatatatatatatattcatgactacgtttaggcgcccataaacctatccacaaggcttattagatgatttaagaacgctcttaacagtgggtgccactgaccatgatatcacccactaccagcactatgattgcactgcgggaccgacactatgttcgtgtcgctatgatagcatcaatagcacccaaaagtataattgggcatgatataactcttaaccagtacaatgcctgtgctgctgaaccgtcacaatggttattgtgtcactataatagcgccaattaatactt

SEQ ID NO: 60828 - DNA, 1212 bp, Cannabis sativa
tataatactatgggtaattattaaatataaataaacatttctttaaaaatgacacttgtcaatagaatagagattggaaaagagtgtaaaatacatagtgcttagagcatctcgaatgatactctatttttttttagctaaagtagctaaaaaaataaaatagagagccaatttttgttgatgcttcaattatgctccctactttaattagtatttgattattttaatatttaataatttgaatttttcaaatatgaattaatataaataatgaaaaagtaataataattttaattaaaatactattaaaaaagttcagcaaaaaagtaaagactccttacatttaaagagctctgggtgaaaccttagttgcccaggttggcttccaggtcattcatgtaatttcagttctcatgccttggattaggttgctccatgtcttcatggtacagaatactgaaagatagtgagttggattcaagttattgaagtctgaacttccatcccggagatcctatagtcaacctgggcgcagattagggtcccctcccatgtcgactactatgactcatgtctactcaattccctgacgtcatcctgatggaacttattttactaggatctagattgacttacaagtatgtttaattatattctataatctaacaccctaaacatgaatttcttaaaataattaaacacatataaagttctagaaaatcttacattggtggtagtagaatgttatggctctttttgtttagatctctaatcctttctgtcgtagagtaataacaagatctgaatctggatctccttcaagagttggattttttcacaatcttccacactataattgagtactaacttgatatgtgtgggcatgtactctttcattatgattcgaaattaatgaagagagagggaggtgatttttgaattctatagaaggaggctctcaattttgttatttcacagaatagtccgatgtaggttatgagaatgagatccatcttattccttatataggatttcaactagggtttataatttaaattataatgaataataaaaaaaaaagataaaataatggctaaaatatgcttaagtggtcggtctcacttagtggaccccactagttataattttgttattttatttaaaaatttatcttttctttcactaatgtcatatttttaatttcaatcctat

SEQ ID NO: 60829 - DNA, 757 bp, Cannabis sativa
ataatcaaactgggaatattaaaatacggaatttcaataacaaaattcaatatccaataaataattagattagatcgattgggtcaaaatctattgaatgtgatccaatgaacacctctaactaaactatacttttaagattaatttaccttttggtttggtatctaatgggaaaaaaaagtttaattagtatgtttattgtgctcgatgattaatcataatgaaaaaaataaaataatatattcatatcattttttttcttttttttttttatgttgtgtaattgagtaataatttttaaagtataaaagttaaaaattttaaaaaagggacaatgaaagtatacatgtaaagaaattaaaaaaagagactaaattataaataaaagttaaatattaaaattttaggtcacactctcctatgctaagtctaccactaatttcgaggctctcagtgttagggggcccaagatgaacgcctttattgccacacctcaaggctggtcagacatactaatgtggggctttgtgaagattgattaatatttttctttattgtttattaaatatatggaaccctatattgaattacacttataagacattttttgtagtgtttgacatagtagattatttttaataggagatgtaaaaattatgttatatttggcgcaaaaaacattttgcaatacatttgcatcaatttttagctgtgtggtccaatgtacaattgcaaaagtttgatataaaatttaata

SEQ ID NO: 60830 - DNA, 1068 bp, Cannabis sativa
aattgatcctgacttctgttgtaaaaacaaacagtagtctttatgcactttaacatacaactccctggcctccaattcctggttctacacatcaatgtctaaagggttttggtgaagcaacccttgaatctccactaagtctttctttgcttacatctctgctgcctgaatatcagaataagattctttattcaactctccaaaggaggattttaaggccttcaatttcaaaacgacttgatacatttttggaacaacaacattttgctcccaaatcctctttatgtcctgatgatatcttaggcgtgaagtccacattcaaaagtatttaaaaggttttttttccactagggaattcaggataaatgtttaatacagctggagtatgatcgaaaatgccttcattgagaaatatagcttcaaccattgtaaacatatccaacaacgattgattgccaaaactcgatcaatcttggagtaaattctatcccttgcttgttgcttgttgcaccacgtgaaaaaacatccactacttttgataactgaaatttggcaatcatttacacaatctaaagaagcagtagatgtgccaatcttagctcttttacaaattctctcttctttataaaggatgtcattaaattcccaaacactatccaaggatgttgtcttgctatgcttcgaggatcatttcatagaactttcctccaatgttcatcattaaaaccataaaaaaaagtaataaagaaattataccttttgtttatagtctcaacatgaagatgtatcaattgactagtacatttaaggatactagtattgaataagagaggattccaagcaatgattattctacaacctttatgccatgctaaatttgacgtgaaacaccaacctagaaacattctttggtataagtctccaagttttggaggcttaacccttgtctcgaggagaccaaccaaaccagctttttgagatgcaataaattgctttacagtgtgtttcttatgctggttgttgattcctcagacattccaacatattattttatccattaacaagaga

SEQ ID NO: 60831 - DNA, 670 bp, Cannabis sativa
ccaaactataattaaactaattaattaagcaaaaattataaaattcttttgcatttaatacatttttgtttgatcgagcaaatcttgaaagttgaaattttttaattccatttcaaatttaaaagacaaatgggggaagaattgcctagaattttaaacccaaatttgtctaatagtgtgagtgtatgaattctcactcacacaaatttcaaaagataaccaaaactcactcatcaatcaaaaaagaaaataaataaataaactaattcacccaattttaaaaggtgaatctcctaagtaacataacaagaaacacaatttcagaaaatattattaattaagttaagaatcttttagtggagtaagtcctataaattatattttttttgtgtaaattatttatgaaatttgaaattttttgcatagtttgtgttatagctcaaaagaatttctaataagtttgatatatttatcttctagctttgtaatcttgatcactccaaactattcattataatagcatatttccttataattaattataatttggtctcactttgttgtgctatttttatcatatatttagattagaatgtgtatgatgtattattttgtagatcattacttatggagaatgaagaggaaaatgtggatgatgaagtgcaaaaat

SEQ ID NO: 60832 - DNA, 6773 bp, Cannabis sativa
aatgaagttttttttttttttttggccattctctccgtcgtgtggcccattttccctactcgagacaagttagtttggggccatgactcttcgggcttttataatgtgaaaagtggttattggttggctcttcatttggagggtttggatagatcctttttctctacaggtttctctggttggtggaagaaactttgggagtttaacattcatcctaagatcaaatctttcgcttggcaaatgtccttgaattggatctctacaaaaggtaatctcattagccatggtcttttaaatgatggtttatgacctttatgtgatgattaattggaaacaactcaccatgccttgtggggctgttcttcctttactctttgtcaaaagttgaatggtttcaagattggtgatccctcgcgttgtgcacgaattttttgagttttattcaccaatttattgatcctctccatacgaaacaaattgggcaggttttggttattctttggcgatgttagtttcaaagaaacaaatgggtacataactagaagattctttcttctgagttggtgattaactgggctcacattttaatgttggactaccaacacaataatgatttacccagtttggaggaagaaaagacgtcgactggcgattcgtcggtttctcacatgcctcgtcaagagataattacccattgggtgccgcctccgttaggtttcgttaaggtcaacactaatgtaactttgaacttattctcagattgctacggcttggggatggttgccagaaatgaaaaaggagaggtcttggtatcgacctcttggttcttggaaggaggctatccaccaaaaatagctgaagctttagctcttagatgtgttggcaaccaatgttttatacttggtttttataaagttatttttgagtgtgattgtcttagtggtattaaaatttaataatcatgttttgttggattcctctttagggttgattttaaataattttggttgaaaaaggtgaatatgttgcattgtcttaggacaattaattttttaaaacaaaaagttcaaacaattaatgacacaaaagataaggttaaaaaacagtttttagtcttaattttgtttccatgagtttttgtttttttgtgccatttttgtctcttttgtattgttagttgtgtaattttgtaatggtgtgtttttaaaggatgcatccaagaatcaaatccacataaaagaatatttttgagaagatattatagataatagaatattttaaaaataaaattctaggaaagttattagtaatgttggttagaataatagtacaaaacttttattagtttagtcctcaacacaatagaaaaaataaaaaaattacaccaattttgagtgcatcaaatcttttcaataagagtttaaattaaaccctcatttttagataattacaaacataaccttttggtttgtaatttttaaaatagtattattagctgtttttataacttatacaattagacattgaatatctaccttttcacacacttatctatctattcaaaattagcttaagtaatacaaattcatacaattttctagtgaaaagtcttaaacattttgatggaattatatctcgggttagtttgataaaaactaattagatatttttaactttctcaaaagtttgaaattatgagttttagcttcttataattttgtataaaattaatttttattagaatttaagataagatgaatagaccttgaaagtgtgggtataacaaacgatcttaagagactacacgaccgaacctgacatttgaaagaatcccacaagactaaatatcgtgaaatttatgagtgtacacgttgagaaatttgtatgtttttaaaacaggtcaaagaccccaacactagaaattggcacacattagccgaaaagtctcaaatagagattaaaggaggagacagcaaaagttttttaagtttagctcgtctttttcgacgactgtgagaccatgttagaatttaggataaagtggatgaggttccatcttaaaatcaattaacaatagaaagagtagctcattcattttatatgtgataatttatttccacacgggactaactctaatagttttaaatcttagtttccctattaattatgtttttgtaaatatttagggtttgtttattatgattttttgtttttttttttaaaaaaaaaattgtgttttaaaaaatattaccaaaaatatattttatagtttcaaaattgttaatgatttatcaaaattttgtttttttagattttttctaccaacaaaagaaaaattactttaaaaaaattaattttaatatattaaggtggaattaatctattttaaataaatattaaattttattgcgtgcaaacaaaggtaacaacatcatcacacaacaactttatccaaatcaaagtcgaatcgaaacgacaagtcgttttctgaatcaaaacgacaagtcgttttatgaatcataaacgacaagtcgtttttttagttctaagcttgaaacttcaaagcctataaattctcatctcatctctgtaataactcatttctcattctctcacttctcagctcactcttttcacagacaaagaagaacgagtcgagttaacgagttgactcagtaaaaccttttgaaaaatggctgagttcaaaggccaatctcgtcttcccaaattcgccgcacctaagcggtacgatatcaaactcgttcccgaccttcaatcttgcaaattctccggctccgtttcaatccacgtcgatatcgtctccgataccagattcatcgttctcaatgccgccgacctaaccgttcattccggttccgtctcattctccgaaccgaaatcctcaaaggtatcgccactactaatcacttcttgatctaatctttttttttgaaagtgtttttgtatggaatttgtagtgtactgtacggatttttgttcattgaaatcgaaggaaatgatctgattaaggctcaattaattgttagtgtagattatagttatttatatagagaaatcgattatttatttatttgtttatttattcaacgatcagatttgagtgttgtgaatgtgatgagttgaaatgatgattttttctttgaatcgaaggaaaatgatgagaatttttatatgattaagcctcaattatactttagtgtacagtataattataaaaagttaataaacttaagtaaagtagagaaaagattatactgcgttgattgtgtatttttgtgaatttaaagaatgaacgaatggaatttgaatgactatttttgtttgaactgaaggaaatgatgagaattttgctgattaagcctcaattattctttagtgttggaattaagagaaaagattatatggggatgattgtgtattttttatgaatctaatgaatgaatgaagccaccagccacttcttgattttattcttttatttgtatagtagagaaatggattctttattattatttttcaagtgtttttgtatggaattgtaccgtagggatattcgaagatcagattgagtgttgtgatcagtttaaatgatgattttccaattatctatctgattaagcgtcgattattgtttagttacagtataatgtaaatgctgtgtggtgttgggatttccatgtgactgaatggaatttaaatttgcttagaagtttagaggtagtagggaaaagattatatgggtgtgattgtgtatttttgtcaatctaatatatgaatggatcaatttcttgagacaggtcttcaagccttcaagtgtagagatttttgaggaggatgagattttggttgttgagttcgcggagacacttcctattggagttggagttttggctattgagtttgaggggattttgaatgataaaatgaaggggttttatagaaggtaagaagattggattggatatggtaattgaaattccatttgcctgttttattggtagtcatagctaggtggtgattgatttgttagattcattgaatctttgtttgactatttactttctgtatgaagtacttacgagtataatggcgagaagaagaatatggctgttacacagtttgaaccagctgatgctaggaggtgctttccttgttgggatgagcccgcttgcaaggttttttcaatcccttctctctttgtgtcactattgctatcttggttgatttaagacttatcatgctttctgttagtgctctgcattttgctcaagttttgtcatgcatgcatggtctagcttgacctcgcatttttttgtaggggctactaattcatggcttgctctcactttcttctaatggtaccttgatttacaggctacgttcaaaattacattggatgtaccatctgaattagtagccctttccaacatgccagtcattgaagaaaaagttaatggacaagtcaaaacggtctcatatcaagagtcaccgataatgtctacatatttggtggcagttgttgttggtttgtttgattttgtggaagaccatacatctgatggtaaaattatcattctgtccatttctggttttgtaatgcaattttcattcttattaatagtgcaaattatgtgtcaattttcatcacagggatcaatgttcgagtatatggtcaagttggtaaagcaaaccaaggaaaatttgcattgcatgttgctgttaagacccttgaattatacaaagagtatgttgaacattcaaagttgatcatttgtatgccttagttctcaaattaaaagctagagttgatcatgatcatgatctgaactatgtatgtgtatatataaatttatatgcaagtattttaaggtttgaactaatggtgacatgtccttcagatactttgccgtgccatatcctttgcccaagttggatatgattgctatccctgatttttctgctggggccatggagaattatggtttggtcacttaccgtgaaacagctttgctctatgatgaacaacattctgctgctgccaacaagcaaagggtaaatcttgttcttctgaactttactttgattgtcatatagtttataaattagttttagccattctgtaaccattagtgttttgatcaattcatttgcacattttaaaggttgcaactgttgtagcccacgaacttgcacaccaatggtttggcaatcttgttactatggaatggtggacacatttatggctgaatgagggatttgcaacatgggttagttactatattttaaaaacttgtctctatgtgttacgtgtcatgtcaaatgctaaggtacttgaatgccttctttgttgataggtgagttacttagctgctgatagcttgttccccgagtggaatgtgtggactcaatttcttgatgaatctgttgagggtcttagacttgatgggcttgaggaatctcaccctattgaggtacttatttttcctttttaataatgaggtacaaccccataattaatttacaataaagtttttttatcccttgaaaagtcagaaaacatcaaactcttgaattctttcacatacaaagatccttaatatttgattttccacgccccatgaatactagtccaaattttcaatgatccttttgtctcataatgtgtagatctttttttcctccttaatggtcagtataaaagtatgtcagattgaagaaaaaaagaaaggcagcagaagagtatatgttgatttgattacacacttatcttttccaggtggagataaatcatgcctctgagattgatgaaatatttgatgcaataagctatagaaaaggtgcttctgttatccggatgctacaaagctaccttggtgccgaaagtttccaggttttcttccctttttgactcgtgttattttaaaaatgttatatgttcatgctttatgtgtaataatattttttttcttccatatttttcaaatatttgctgtgtctaattacacattttcatgtaatcagaggtcacttgcctcgtacataaaaaagcatgcttactcgaatgcaaagaccgaagatttatgggctgcccttgaggaaggatctggtgaaccagtgaacaaactaatgaattcttggacaaaacaacaaggatacccagttgtttctgtcaaagtcaatggtcagaagttggagtttgagcaggtctgttcttatctctgatttccgtagccctaacgggttttaacctcttttaagatctttgaaaacttacagttatcttgtggggaaaatgtaaataaattgcagtcacaatttttatcaagtggttccagcggggatgggcaatggattgtcccaataacattagtttgtggctcatatgaaaaccgcaaaagtttcctactggaaaagaagtctgaatcacttgacatgcccgaatacctaggttgttctgttacaaacagccatgcagagcccggaacaggtgcttcttgcacttggataaaacttaatgttgatcaggctggtttctacagggtgaaatatgatgagcatcttgcaacgagactgagacacgcaatagagaagaactacttgtctgcaactgacagattcggtaatttaatggttaccgctatcttatcttatatttccgatagagataaacttggttaatgtatgtttaatggtatttctttttatgagtggtttatttaagttaattatattccaggcattttggatgattc

SEQ ID NO: 60833 - DNA, 769 bp, Cannabis sativa
ggaggtttgggtatggaaccattcaagaaccccaatttgttcttgactgaaatggccaattccattgctcgacaccaagcaatgtaattgtcctgtcctgtgagcaattgggataccaacacgtttccaggattgtccccatgatgcagaaaataagggtcggagagatcctcaatcagatttcttggtctggtcatttgaatattcggtccagcatctggcgcttgaagttgattgtcgccattgttgatttgggcaggagcttcgtcgcaaatcgcttcttggttgttcgacattgcagaacagaaaagaagatgaaagacaagtctaaaagtttagagagaagaggagtgtcgattgaagaatggattcttcaactacggacatcgatcgtcgccgggaagatgagcagagaacacggcgaggaagaagaaattaggatcggaaggaagtatagcttccttgctctgataccatattgcggaagaaaagggaagcaagaaaacaatttatttgcattaaattgggaccaattacagaaaggatgaggcctatatataggcagtcaaataaagaagtaaaacagatctccttaaattgaggagaaccagaaaacacgggactaaaaataacagaaataacaacaaaggaaaaaccacttaaccaacctaaacagaacactaaactaataaaatggtttataccatcacaggacactaataagagaagtatataatcttgttacaaactaaaccaaactcaaaaatgg

SEQ ID NO: 60834 - DNA, 1131 bp, Cannabis sativa
  modified_base (982)..(988): a, c, t, g, unknown or other
ttgtctccccctttgaaaaaaaaatcatggcatgtaatgctttgtttaaagatgtaagtacttttttattttattaaacagcaaaggaaaaaggaaaaacaaatggggagacaatagaggtgaagatatgatgcaatttaattggatattataattttgtttttcatatttcctttgcattacacattttattcattcatctctcttaattatttgtccatatatatatatatatatattgatcccacatagtttagtaatatatataattacatgttttcttttaattttcaaaaatctataaatttctttctttaattttcaaaatgttattattattttttaatacatttttaatataatttattgttctaaaagtttttttttagatgaactcttctaaaaatttcgagcatttgtatttatttatttttttttttaaaaaatatactattaatttccttctataaagttttaaaatgaatatttttttactaaaatattattatttatttagttgaattacatataatatttttattctaaccttcaaaaatcaaaacacataacttaaaaaaaatctaaacatataactaagtatacgtgccttgcacgtaacatttgcctagtctatatatatatatatatatatctatacatgtataaatgtgaagtatgagacgatgccgtgacactctacaatctctctaaaactatttttctcttctctccttaattctctcaattttaatatttaattaaaacataaatctacaaattaatattttactatatatctatatatataaagcaaaagtatgaggcggtgacgtggcggtttaaaatctctccaaagctatttttattttttctccttaattctctcaattttttaatattttattagagcataaatctatctatatatatataaatgagaagtatgaggcggtgacatgacactctacaatccctctaaaannnnnnntctcttctctccttaattctctctattttaatatttaattaaaatggcactttacaatccctctaaaactatttttctcttctctccttaattctctcaattttaatatttaattaaaacataaatctacaaattaatatttt

SEQ ID NO: 60835 - DNA, 805 bp, Cannabis sativa
tcatgtgaaccatgcaacataaactgcgatttctgatcttattaattagtaaatctaattatattgaaatggattttacttaaggcacagaacccaacactccaaaagggcctggtcggcctagaggtgcatgacacactttcctagacacttctacacatggacaacaggctataggtagggaattaggccctaaaaccccaatagaatactgaataatatctataatcaatggaactttggacttttgtaaatatctaaaaactatgaataatataagggatttgaattgtaaacacagggtttgacgcctcctatatcaaggccttaaccttaggctaaaaacctatgttgcgtctaagccaaaaacttgcttttaaaccctaaatgtttgataaactctaaaaacctgaaagaaagtttgttggacatgggtgggccgaatcgagtctatgaatttctgaatccatgcgtgattgccaccgatgtagtggctgagagtaatcgtttccaagcactagtcactcgaatgactaggatgactaattcagagaaatggcttattgccccatataataataggtatatgtatatgtaaactaaataacttcggtatttttaactcttcataaaatttaatataggtatatgttaacagttttacacatatttgtccgagcacgaagatgtttatcttgatgcttgtagtcatccagccaagtacacagacagtggcgcacttggattcaggcaacgacgacatcccttattgggccccactttgtaattttgccattttgttatt

SEQ ID NO: 60836 - DNA, 1416 bp, Cannabis sativa
agtagagcaaaagagccactttgtaatcagggatagtgagccaaaaaagagctgcttatgatcgagttgtccaagatggtgagcatataaaatagccaccatatatcttgtggggatgttagagagtctcacattgttaatgtgtggaaagacaataaaatatataagagtaatggagttcctcccatcaccaattgattttgagatagaatctcattcatcttatcacaaattctaacaataattaaagcaaagcataaaagatcaatttattaatttttagtatatttaagtttattaatatactcaaatatataattaaaatttttgatagaggaataattgattaacttactaatagaaacttgataaataatcctgcaactccaaagagaattagtatttagtggagtaggtgaacatactcgtaaaaaggaatttatttttacagaatatctgtttttagtatattagtatgagctgggtctcaaatcgaaaggaaatatttcaaattcttaactaatatttaattattatttttttttgagattatgtatatcttgaaattctaattgatatttttgatagataaataattgacgatgaactcataaatggaaacatgacacaaataatctcgtaactttggaagaagagtatatgtatttggaagagagtaagtgaatgtactcgtaaaagaaattatgtttatatagaaatagaaattatatatactagtgcataataattaaaacaaatcataaaaaagacccagcttatttttagtatattagtatatcttaagtctcatgttaaaagaaatatttaagatacttaattaccggcctgttatatatatttatttttattttgagatttttatgcatattccaaaattcattaaaatttttgatagtggaataattgataaacttatgaatggaaacttgataaataatcatgtaatattggaagaagagtatttgtatttggtgataggtgaacatactcgtaaaagaaattacttttacatggaaatgaatgataactaaacaaattagaaaatactcaatttgttttgatagatgaataattgattaacttacctaatattcattttttattatgtttttaatataatatattgaaattttgattaatcatacttttcatatacaaatcatctatgatgaacacgaatggaaacttgacaatataatctcgtaactttggaaaatgagtatatgtatttagcaaatcaacaggtgaatgttctcgtttttacatggaaatgaaagatacatagatacgtgcatcatctaatttaatctaattgaattgaatcgatccaattcaatctaattacaaaaagttggatatccaattacaattagattggattggatgctaaaagtt

SEQ ID NO: 60837 - DNA, 1126 bp, Cannabis sativa
atctataacacaaaaccgacaaaagtcataataaaatatgaactaataattgcccactcttaaagaaaaatattaaaaaagtcctaacagttaataaattctactcattatcttcatcgttgttttgctctctatatatgattagtaatttcatcacagacattagccatttcacgaatttgatctcttgaagtatcattcaaaatttcgtgagtactttgtatagtagtatcttgcacttcaagaatgtcttcatctctatcaaaatatgttttttttcacatccgtctttatagatctcttaagaaccaatctgcaaaacaatctgattggaatacaggattatgatgattatagtttcaactacttcttttaataatatacaaaatattattataccgaacttacacttttatataagagaatgctgataaagtaaatctacatataattacaagactaatcctaaaattcataaaaaaaaaaaaaaaagtaacaattaaacacagaagaaatgcataaagattgtgcaaaccaattaaatacatcaatgtgaaaacatattgttcaactttatacaagttagctcactctctcatgctaactattccgaaattcctaagcattttgactcaaacgtaatggctatcttacttctaaaacaaaaaaaaaaaaaatcgttttatcacaaaggagcaataatcagtggctaacaaaaactgtggtatattgtaacatgttaagctacacagttagtgagacatatcatgtagactcacttctggtcttactgttaactaaactaagtactaaataaattcaattcaagtataaagcatttcaaaatagattgatacaaaccaatgcaaatgaacaaagacatagaaaaataaaaaataattaagtgggaagctccaaaatcaacctttgcaaactgtgtctgtggaaaacttaggttcctggatgtagttatcaaaattttaggttctttttaaactgcataggggtactcatcatctacatgaaccaattacaaaagcttaaaaaagactaacctaaacactagtatcaataagaacccatcaaataaatctgaaccaaaagaacctaatttcttgacatatca

SEQ ID NO: 60838 - DNA, 1418 bp, Cannabis sativa
aacttattatattcattttggggaatgacgtttaacaagtataaaaagttatttagcaatttcttttgtaatatttcaaagaatatatgaatatcgtttatgcataatcctcaagatttatgcaaaaattaatcttaaataatatatatttaatatgtcatataaaataaattttacagtttctaatataaaaattgtaagtaataataacaaatgcatatatatatatatataataacatgactaatatataaaatatgaacactccttaaaattaaatgaattcaatttctaccattctctgcagggaatgatgaacaagaaatacatatcttatgtgtttaaataacattaatcatgttcattgttattcttactttgatgtttcaatgcaattttcttaaaattcttttggatatccaaaaccccactataaaattacatcaataataattatttcaatgattctttagttgtattcatataaatataatatttttgacaaatataaaatatttacttcagaaaatatttgtccaaatttataatgatattagattgcttttcattatcatcaaagaatataagaacatatatatgaatatgtattcatattttttattatatttcaatcaattatatgatgaatattatgtttgcatgaatatgcaagattttatcaagaatacataatctttaggatatatgcataatttatatatatatatatatatatatattcttttatatcatatcttagccgcaaattatataaaatatatcataaatattataaataataagaacacataatatatataaatttaataataaatatatgagaataagaatgtacacacatatataatacataaataacaaagaaaaagaagagaaagtaaaagagctcttgcaattatttcagtcagatgagtatatataaatatatattatgtgtatcataactttgaaataattcaagaactttaagtaaaaaatatttaccgtgggcagagactcatgttgatatataacgtgttataaaataatatagaatagagaaagaaataagaaaagagagaagacaaagagaagaagagaatgagagagagaatgagaatttctcagtaatttatacaaaaatataactagaataataggaaactaataaatcaatgaaataatgaaataaagagaaatataatcaagcatttgtggtggtaattaatgcattgatttggacatctataataatattttataactaatttacggaaagtttattttgtctttttataattacataaataaaactagtcatatataataataatggaaaattatagcaaatggccataaatcataggactatgttagtaaatattctcattttaaaacttgtagagaaataacccttt

SEQ ID NO: 60839 - DNA, 822 bp, Cannabis sativa
cgtcggatgacgatgccccattaggtcttgctcgggcaaatgcttatgccaaagtgcaagatactccatcttgcttttagccttcttgattattatgccttcatatttctcatgctttttctaacgatgttactttcatttcgtgcagacatgtctcaaaagatgcttgaggctctaaaaaagagagtgggaggaagctttggcttatctcctccggctaagaagtccaagggcggtgagccaacctcgtccagagagaagacaccaactgaaatggtcattgccctctccaaggagcaaaccattgtagatcctacagtcccatagagcagtcgaagggcaaatttgagctaaccaagtcccctaccctacctctggtaccgcacccagagaccaaggccccaattgaaacaatcaatcactatatgaatcggtcggtccctgaggtgaacgagcgattggctggggcagacaatgacctttctctagagctggctgatcaagtttttcctgacagtatccttttgtccttattctcttagtttagcttttaatattctttctctgtgcagactggtctaaagattacttatgcttattcccgagctaagtcggctacctccaagaatgctgccatttccaacagtatgcgggtgaaagtggacttggccaggaagcatgccgatgaagccagggttcagcttggggcaatccggataaaactgggagaggtcaacaagaaacttcttactgctgagaagaaggtggccaacctgaccaaagatctacaatcctccaatcagcttgaagccgccattgcct

SEQ ID NO: 60840 - DNA, 1814 bp, Cannabis sativa
taacttttcttgtaaccatatagattgtaatataagtattaatgataatgaactgtttcattttacttgcttctatggttctcctatttcttctcaaagaccctttacttgggctctccttgataaacttttttacaatgcccctaaccttccttggttaattatgggtgactttaacagttttctttcttatgatgataaggtaggaagtacttattatgatagcaatgatatggataatttctctaattttgttcataagtttaatctttctcctttgccttttgaaggtagcaaatttacttggcataatcatttggttaaagagcatattgattgggctattagttcggctacttggaatgatctttttccaaatgtttctttgaaacatctctctttttttgggtcggatcatcgtgctttaaagctgattcttagtgatagtggccttaatcctcaccctagatatggaaagagatttcattttgaaaatgtttggcttgagaaccctgattttttctctgttgttaagactgcttgggatagcagtcttctcactaacaatgttttgtccctttttcattcatttttgtctactcaggacttgtgcatttctgcacttaagtcttggaataaagtgtctaatttttctattaagtctcacatctctgatctccaaaaggaaattgcctgtattcaggatacttcctttgctgatcctgagtgccgctttcgacttaaatgccttcaatctgagctagatagtcttctctataaagaagaagtctattggaaacaaagggctcgaactcagtggcttaaggctggtgatagaaataccaagttctttcatcgttttgcatctaaacgaaagaggaataatactataaaatttctcaaagatgatcatgagaatataatctctggacatatggatatgggaaatttagtagtttcctatttctcggatttgtttagttctgatggtagtgatgctgatgccattagccttattcttgaatgcctgggtcctcctttggaagatttggattatgctttcttggatgaaccattcactcttaaggaagtaaggaaagccctttttcatctctctagtgacaaggcccctggtcttgatggcctcaatgcctacttttatcaaaagaattggtcaaccttaggggctgattttgctaaggctatcctgtcttgtcttaatgagggggttgatttctctgtagttaatactactcttatctctcttattcctaagaaacagaatgcccacactcttaaggatttcaggcccatcagcctttgttctactttttataaggttatatctaaggttttagctaatcgcttaaaggttgttctggataagattatatctccatttcaaagtgcttttgtctctggtagagtaatctttgataatattcttattgcccaagaagttgtccatgccattaattcaaggaaaaaggggaaactaggttgggctgctcttaaattagatatggctaaggcttttgatagggttaattggcattatttagagagtctcatgtttcattttaactttccttctagatttgtttctcttattatgaagtgcatttcaactacttctctttcttttctgattaatggttctattcatggctctattcagccttctaggggactcaggcatggtgatcctctttctccctatctgtttattctctgtgctgagggcttttctgctctccttagggcaaagcaggatgctggtttacttactagcattgctatttctaggaatgctc

SEQ ID NO: 60841 - DNA, 4459 bp, Cannabis sativa
tgaatctgtccttggacttacttgaagaaagacataatgagtcgcaaataactaatgcagcttatcaacattgaagcacaaggtactttaacaaaagagtcaagaaaaggctctttaatgttggagatttggtgtgttaagatgtgttgtatttgcaaaaaacacgcgagatccgattgcaggtgtatttaccccaaactggaaaggtccttatgttattaatgaagtagtgggaatcagggtttataaattagctcggcttagcagctcgctaatataaagaactattggaatatagtgaatatttgtgaccttattaccaataaatacaaaatgtaaatgctgtatttatctctgtaatagttaaattcttattatgaataaagttgaagttttttcaagtaattacaaagtttatcttcttcaaaattacttggaggcatactaactagaattcatctagaaatacatattatgttgcaaacccaaaaaactaattttttttccacaaaagaaaggataattgattaaaattgtccatggacaataaaaagtcaaagaattgaaaaaccttttctttagaaaggaaagtaaaaaatagcagttgtaaacgagatcaaatcataaaataacataaagttatgtgcaagttgaatacttaacgactcgcattatattggcatgtattatgaacgaggcacaagaataccttgaaaaataatacttaagctaaaatatgaatagaagacctaactattcatatgagcaatcaaaagatatataaaatagttcctgaagtgaattattcaaagtatttttaagttttctctaaaagaaatatgtttatatatagcagattaaaattgttcgcataaagcaaggcagatcagaattgcttgtagattaaaactgcatgcagattagaactgttcgtgtatgtacgtagtagacaaataactactcaaaattctcaaagaaaaccaagtctaatggaaatgcattcaacctaaagtatcttaagctaaattcgagaaagaaatgtttagaaggtgaaataagatgcagtgaacattcaaaaactcaaaaagctatatacgaggcataaaaagtagatatataattaaattatgttggccatccaacatagcaaaagtattttacaaatgccacaagaggcaaaaattgtctcggccagaaggctatttttctaaataaaaaaaaggagagataaaatgactaagtctacatggtaggtgacttagttggttcttcttgatgttaacctcttcagcatctccagcctcctccctttttgtcttctcgtagtatgcaagcatctctccagccctttcacccagaaaacagaaatccatctcaggattagcaaaccaggcttgatatattgatcgtctggtaattttgttgaccctatttttggtgtcaaccttggcctcttcgagctttcttttagcttcagcgtggatagccttgtttgcctccttgagttcttggatcttcttctgagcattttcaaaggtcggtcttgagagtcctttgttgctcttcaacttcctttttaactcgagaaagctcagactgagtatcattccattgcttagccatggcatcatgatgcttccttgtctggtgaagctctgtttcgagcatctcggctcgttgaagcaccttgtgctgagcaacaaaggacaacagagatgtctgtgagaaatgaaaccaaaaagtaagaaagcataaaagaaatgaaaatgaaagaaaaggggcagagaaaagactagcctactgcataagatcataactcctctgcaccaaattcttgaagatccctttattgagtaagtcccaatcactagactctaaactctgatagtgtcgccaattgttggtagcatgtagcgagcagagctgcgagccttctgtaccagcttcgacgggcaaggggcaggagagttcgaggaagaccatctctgggcaagagccagagaattttacccggtgaacaggcccaagggccgtttcactgacgctcgccacagtaggcacaaccttttgtggagattatgcagactcgatagtgagttggtttaaggatcattgttgacaagagtcggggtgttgatcatctcctccaaatcaagatccatatatgcgagcagacaagaaaaggaatcaacacttgttcagaaacagataataaaaaagtggggaataaactcccacttgaagaaatttaccctaattatcagatgatgaggaagaagaattataataactattaaactccctagagcctgtgatcatgtatatatcataaggatttattggagacaaatcccaacttgaatctggatggctcgtcctatccaagttagtaccgtattgctccgcaattctgaagtatgaactagtgcaactatgtttgacgtggaattcgggataccaactatcaaacctatgtgttatgcgatctatatagaagttatcccagatgtaaaaattatattgactttccttaaaggttggagaccacccacagttattacctcaggatgcttcttcttcagcttcccgaggggttactttttttaaaaaaatggacgcgagccacataatctttatcttcctcactgggtggaattgagacttgtcgccatatggaatattttggatttttaaaatcacaagtagactgttcagtgctgagaagctgaacggtcttcaggttgatcacgtttagtagaaaattagacgatcgtactctcaacggaagacctaaaagaattttgtgccattctgccatatcgggggttgggattggtcttctcgtgactgttgtcaacacaataggcaaaaataagaaaatgtcttcaattttataaatccaaaaacttgaaaccaagctttagagaaaaaaggttaaacttacgtattatacgaaatgttgttgtgttgatgggggagagaacggtcgtccaaaacaattcatccttgaattctattttattgggtagcctcacaatgatcttgcgatcattcgtgtgggtaccaagatagtaaaaacctcctgaacattgctttctcgtaggaacaacaattctcgaatagaagtagacaattttgaggggagtgggacactcccatcccataatatgatataaaactttagagaggccataattctgtaagagctcagacttaactgaaaaggtgcaattatgagataattacaaaatcccttatagtactctcttaggggagaactatctagccgtgatgtgctcgaggctccaagcgcctatcccagacgagccagtggtactggcaccaccacactcctcgcgaattactctttctaaaaggaagagcctatattctctcagagcaatggacctagcgcgacatcctcgcttttgcttgataccacaagcctttagtacatttccaacaaaaggagctattgatctgattttggactcaataagctctgcttcgaaagtgactgttggatcttgaggggtctttgatttacgagccttggtagacataatttcaaaacctaggtcacctggtgaaaaagcaacagtgactcgaggtaaaaacaaaggtctcactaaacggatagaagctaaaatttgggattctggccaagctgcatctcacagaaaatggcatttaccttcgctaaatcacttgtaacgactgtcaattttagctgggtgggtttctattaaatgatccctaattttggcatcatttatctcaagtttggatttaggtttttggatttcgcattcgaatagaagggctaattctttaggacattctgtttctaggaaatctggagatgaagtttcaaaaccagattaggacatattggcaacaaagaaatcccaatttttggaagaaattatttcaatctaaactagaaacctatgaatctaataaacctaaatttttttccttaaccctagaattaaacaacaaaataaaagttacctaaaccaaacgaagtaagtgatgatgcaatcgattacaaaaataagattactaaatcaggaaaagagaataacagagataaagaagtaaacaacttatcgtcttggcgaaggtttcgaggaaatgaagaacttgttgattgaaagtttgatgactgagatgattagttctgagaatctttgaggttgaggatgaagtctgatgaaatacgcaagaaaaagtcagagatagtgagggcatgcaaagtgataggaaatcagagatggttttttgcataatggcttgaaggtttgaaaggcagtaatggcaaaatgattgtctattctcaaattttataccttggaagcgatcaccattaaattaaaagaaaaaaatctaacggatgggagcacgacaaaattagaaaagatgggcatttaatgccaaagatgtgcctcgaaatcct

SEQ ID NO: 60842 - DNA, 569 bp, Cannabis sativa
gtttagtctaatttagtttagacaaaaaataaatatataattagcggtctaatgataaattatgaaagtatatatatacattcttaaagctattgtttgtatatttaatgctaataaattaaatttaaagtagctttaagttattaaataagtcattgtactaaaattatacttgtaactcatagtaacataagtaagttgttataaaaaatgagaagaatataattagaggtagatatttgcaacaatttgcatggttcgatggggaaggggggatttttgcaactaagaaaagttcagaaggcaaaattctacaaaaattataattcagggacaataattctatttattttaatttttaatattttattattgtttagatttattttatgattaataatgtcatgtcattccaatgaaagcttggcaaggatttccacttggactcttaaagccatgaaaaaggactaaccaaaacaaaggtaccaatacaaaaagtggagcttaaaatggggtgcacaaccacacttagttttaatgcactaactttataaaataaataattttta

SEQ ID NO: 60843 - DNA, 767 bp, Cannabis sativa
  modified_base (676)..(683): a, c, t, g, unknown or other
ccatgttcttatatatggctcacttctctactatttattccatgtggaacaatgtccacaatattagacacttttgttatgaatttttgttgtgttataatacttttatgttctttgattttagaaaaaaaatataggtgctgctaagatggagaaggagacaaagaaggttgaggagggtaggcatgaacagaagtgtgattaatggtgaaagaaaaagatgagaaataatattataatatttaattattttttaaaggaaatattttcttattaaaataatgttgctaataatctaatacaccttaaatattgactattagaatacactaacttatttataactattagatttagatttattatctatagttataaaaatgtcactaccatagaaaaaaaacaataatgcttaccatagttatattcaatatatatatttgtaatcctaatctgattagaattagaagtacgtaatatattgtattatatataataagatggatgaattgaattttcttaatattatttgagagaatctgattaaaagtaatattgtattattatatataacaaataatatccttattaattcgaatcattggttcattacatttgcatcggttttaggttagtacttcattctcaattactcatgtgacagtcagtagtcccnnnnnnnntaaggggaaataccgggtaagatgtgcaatcccacaccgcctggggaaggtcaagtgggataattctaagactgtgtaggtatg

SEQ ID NO: 60844 - DNA, 1423 bp, Cannabis sativa
  modified_base (158)..(159): a, c, t, g, unknown or other
  modified_base (659)..(659): a, c, t, g, unknown or other
ttcaatgataaaattgaccaatttcattacaaccgactgccaaatattggatgtccaattgtgatcggatcggatttgatgttatttttaaatatccaattagatcggatcggatgttaaatggggttccaacaatccaatacatccaacatccaatnnaactaattagtattttcatttatttttatacgtaaaatatatatatgcatatatgaaaattaatattaaaattttacatttttttcttggattggatggatctaattcaatccgatacatactggatctacaatattggatgaatctaatccaaaaaatactaggtctaaaatattagataaacttaaattaaacgaataaatatatttaaaatacatctaatagataaactgaaccaatctaacacatctaatagatgttcaatcaattagatgactaaaattaattgaatcggatctgaatagatcttaaaaacattaggtgtgatacaataaattataatataataaatgcataataaattcatctatatcaaatcaaataaaatacaattcaattatatataatcaaatatataaaattaaaaatacttaatttagatcagagccaacataatagatacaataaatttcttcattactaataataataataataanaataataataataataatttccctcaaatactgatatctgaccttttctaatgcatatttctctatgtttgaaacactgtattatactggacagcattatattaaattataatttacattattttatatttagtattaatttatttttatgtatacatataaatatataatattttaatataaattaaaatttaatatcattataaaatataatttaatataatacttatacaatactatttaaatggaaatattagaaattaaaactttactattatttttgttcaaaaaaaaaaaaaactttttgccaataatatacttttgaccaattaacataccactaagttttgtctattgcttttcataaagtaaaagagccgaataattgagcaatcgtacatatatgaatatccaaaatatatttcactatatcaactttttttcttttttctttttttcaaaagatcaatcgataagattaataactttctttacaccaattatttttcataaacgtgtaaaataaaagaatatttataggggtgacaaaatgaatttcaatacgagcacatgtacgatacaaattttacgaattaaagttaaaaaaattaaataaaaataaaaatagtttaaatatgagatgactcgcttaaaataaaataaaaattattattaataatacaactatataaaaatatatttagtaattcatattgagttaattttttttaaaatttgttgttttttttacaaaaaaaaaaaaa

SEQ ID NO: 60845 - DNA, 826 bp, Cannabis sativa
atatccgccgcgaagcgcgggatgtatatatatatataaaaagattattacactacttttctctctaaaaattataattgctaaattaaccttagatgaagtgacaaattaccatttgtataatttaatttatattaattagttcgacatatttttaatttaagtattatatataaaaaaaatcattaactaaggtaagtcacatatattttcattttgcagaacactcaactctatatttttgtagtagtgaaacctcacgggtattaaacagatcacgaacaacttttgagtcccaacctgaaccatccatagccaagagtgaactaaccttattattaacaaaaattggggccgagattttacacactactacaaattggacatttagtgactctatttagtgtgttctaacaggttggcgcggtataatcacaaccgggcatttcggaccgaaccgggttcgagcccgaaatttatattggatttaattatttggcattttatttgataatatgaaatctgaaatttatttggaaataattgaatatgaatgactaaaacacccttgtgagagtaaatatgtgtgtgttggccctaagggcatttttgtaatttcacccttatgtgaatattggatgtgaaatgaaattttgagaaaaatgaagttaaaattctggatttgcctctctctctaaccgaccctctctccctctctaatcctttcttgaatttcaagtgtaattattgagttttggagtgaattgcttgactttgaagcttggaattggaagaattttaagcttggaattgaggtattttctag

SEQ ID NO: 60846 - DNA, 1194 bp, Cannabis sativa
gttgagagctaaatacctgaaaagaaaacctttttttggaagctacctataaaaattcagactcttggttctggaaaaatgtggtcaagactattcctatcatcagaaagggcgcttgcaagtttgtctcggatggtgaagatacgaacgtatggaatgatccgtggatcgttcatggaaaggatttttaccccaaacccatctcttcgtgccatgagagggtggttaaggtggcggatctgctcacgaatcatggggactggaatatctccattctcaagtccttgtttgactctgacacgatctcgaatatcctaaaagtggggacgccttgtggccaggggagagacaggtggatttggactaaggaaagtagcgaaaaattctccactaagtctgcttatttgcttcaggcggaggagagagcccctgcctgtgtggtggcgccgaccttatggaataagctttagaactccaaaattctcgaaaggcataaattcctttggtggggtattctctctgatgctttactgacctgcggcttcctggctaggaggatcccaatcgatgacgacacttgcctcttgtgtggggaggctgtggagtcaatggaacacctgttcctcttttgtaactttgcttaccatctctggagatcctctccttggggagtgttcccgatccatggttttgggggtcgagtttgggattgggtgaaatttttgtggaacataaggttggatggggtggactcagacaagctgttcctttatgcttctatcgtagtggacacaatctggactacccgtaataacaaggtacataactctcttcagagtaatattgtgactgccattgactctatctctcactgctatacagatttatgcctcctgcttattccctccgacggttcttgcgacttctctgatttggacccctccgccgaatgactagatcaaaatcaactgtgatgtcaaggttggtggagactccatgtgcattgtggccttggcgagagatcacaccgagacggtggtttgggccgttatttccaggctcaattttagagacccgctgattggtgagtcagcggcgtgtcatcttgcattagattcggctcgcatcagaaattataactatgtcttagtggagagtgactcagaaacagttatcaaagcgctgaaagggctt

SEQ ID NO: 60847 - DNA, 868 bp, Cannabis sativa
tgaagagctctacagtatgagacatagattagagctaaaagatttattttattttagtgtgttttcaccataatatttgatagaaaaccctaggttattttatgcgggttttagacagtgttttggaatagacccttattgttttactttggtcgtgacataggactcgagattgtcaagcatcgttccactcaggtggatccacacactttagttctgaattgagataagaaaagtggtaagcaccgtatgtggctaaatgttagcgattgaatggttatagccttgattattatcaagattctaattaaatgtttgttgagtctcggttgtgatcgaggtttggaagcggttattaccattatgagtaattactcctttaactgcggataggtttcttacttatcgtttgcttcatcgggcaacgatagtgacataatcagctcatggttaacgggtggtaaaggggtactttataaagtaccaggattgtgtgtttatgatattgtgtaaatgtgtaagcatgttgatatgagattgaattgatgaatattactggttattgttttattcacttttcttactgagtctctgtgactcacgagtgctttatggtgcaggtaaagggaaggcaaaggttgagcagccatgagttcgaggttgtaacagcaatgtacatatcagccgcagtggcaccgcccagtgaataggatgctctattttgaatgtattttgggaatacaaagtttatgttgtaaaaaaaagctattaaaccactttgtaaatattttgaaaacagggggaccccatagttaatattacttatcttttatcataaagcagttttatatctctgttttaaattatc

SEQ ID NO: 60848 - DNA, 1083 bp, Cannabis sativa
ttattattggttcttctttgttctttgatggctcgccatcaaatcattattagtggttgggaataacaagttctttatgactgaaggggttgttagtagtgcagagttatgtaccttacaccatagttgagtgctcaagctacgagattggatgaacgtgctgcaacaatttctactgttgtgtcttctaagtgatgaatgaaatagaatataggtgttcttaagattaattgtgatgctgcaatctttttcatttgattttattttagttttttgtcaaacgatcttggaattaggcggctgattatttggctcgtttttctaattctaatcatggtcgtgtctccaacgggaagatgttcgattggagtataggctattattttaaatgattgctgttaataaaattctattatttattctaaaaaaaatctaacattgttaaatcaattacttaattattttttttatttttttttttaaaaatagttttaaacatttaaatttaatttatgagtatcaataaaattagatatttttttatataaattttaatttaaatttaaattaaacgttaattcaattaaataatcataccttataagaaatttattagttatattatttaaaatatctaaacttatttagttattttattatttaataaaattaattaggtaaatttaaaaataaattaaatttatatttaaaatataattgaattgtattaaatttaatctaatattattatttaaattaataattaagtaatagtaattttaatataactctaaccaaacatgcatatgatattactaattcctagtatatatatattaatgtcggttatgtatttttatggggcttttgtcactattataattagtgctaaactaaacttaatatatatatatatatatttcttatatttatttaataaaaattattagttgaacgattttttttctgttaaaattaatgaataaaactaacactgttaaatcaattaattaattatatatttattaaaaacaaaattaattttaaacatttaaatttaatttagaagtatcaacaaaatta

SEQ ID NO: 60849 - DNA, 587 bp, Cannabis sativa
gctgatctaagagaagtacaataccgagcacaaggcaaagactgctatatgagtcaaatatgtattttggtgttttattttcacataccttatgctatttaatctttatcagatgatcaatttttttaatcttttgattagagccaaatttcaaaaccttatattgatttgtctcagctgtttctgttgaaatgttattatgttcctatatttcttaaggttcatattataatacatttacttcctctatatttcaaaaccttatattgatttatcttagttgtttctgttgaaatgttattatgttcctatatttcttaaggttcatattataatacatttacttcctctatatttcttaaagttcatattatgttcctacatttctgttgaaatgttattatgttcctatgtttcttaaaagtcatattataatacatttacttcctctatagctctttaagatcaacgaagaagtagtaattgttgctataaaaagagagaacataacacgattaataaaccatccagtaagctttcattctatgcaccaaaagattattttcttttcttatttttttaagtca

SEQ ID NO: 60850 - DNA, 906 bp, Cannabis sativa
aaagtgtttcccaaagtttggatatacagatgttctctctctcaaattttctaataaacccgattattcaaagttgtacccgaattgttgctttttattacgatacaaatgctcttttaagagctccatatttatagaaagaaaacctcaactaccaaccatatgtaataaatgaggtagctcatcttctaaccatatataataaatgagagagcatgcttcttgataaatgtggcaaataacaagtcctaaaactcttgaaagttgaactacatctttacaactccaagacaagttgacttttgagtcaaacccaatatttttatctttttttctcttcctctattttttttaataatttcttaacatctctataaatgttacacaaaaataaccacataaaagataataatttagtttttgttaactaaaatactaatatatacattttaaagtgatatatacataattttttagatttttttgctattttttagatttttcatatctgaatgctgaaatttgtagaaattttgatagacttcggagagaactcaatggaatcttaaaaattaaaattttcattaccaaaaaaaaaatagataaaactcgatagatgctcgatgggtgctcaatgtcattcctttaaaaaaaattaattttttacttagacctctgtttgagttttttaatgagtttttctttttaatttgggtatttttttttttcaaaatctacatgttggtggtgtgtgtatatatatttgagaagtataaaacttaaaactatcccaaaaagtctatattgtattgaagtttgatatgttttcaagctttacatttttcaaatgtatgtacatatcaccaacttgtagatcttgaaaaaatactcaattttttttttttt

SEQ ID NO: 60851 - DNA, 1310 bp, Cannabis sativa
tagtgctaattgcttttactaatccaaattactaaagcggtcattacatatttctctctcagtcaaagtatgtaattgatttgctagtcaaactacatatggaaggagccaaagcaattcctaatccaacgagttcaactgctaaattggccttaaatgatggtgataccctcgaggacataacattatacaggagcccacttggtgcacttcactacacactgggaagcttgcaaaaaggtgcttcaatatctcaaacgaacacttcctaatggtctccacattacaccaagttcatttctatctctaacaacttactctaatgcagattgggcaagctgtatagataatagacactcaacaggtggctacttagtattcctatgtgacaatcttgttagttggtctgccaaaaaataacatgttacacgatcaagtacagaaagtgaatttagggccttagcaaatgtagcagcagagattcaatggctcaaatatttctcttagaactacaagtttccttgcctcattgtgtaatcatttggattgatgatcaaagtgctacaacattggctgccaacccagttttttatgctcaatcaaaacatatagagattgatcttcactttgtcagagatcaaattgtggccaagaaactttcagttcgttatgttcatgccttggatcaagttgatgatgccttgataaaagctctcaccaaaaattgttttctatacctaaagtccaaactgaaaatgggaattaccccttttcgttttactggggatgttaggatagataactaaaataactgtttttctgttacatgtaagcgattagattttcttgttatgcttttgttcttttcttgcattgtacttagcatttgcttctataaataaaggcttactctagttagttcagtatgttttttaatgccactgtttctagctaagagattgatttttagatactctatgttttaatcttcttccttactgttacagtgaaaaattatgtttttggaaatgctaatatatttattaaattctagtgattaaaaacacaactgttgcgatctacagttgcaaaattgaaaatttttgctgcagaatacaaatttgtaaaaataaaatggaaataacattgcagaatgtaaaacttgacacaatagaattatatgtggtatcagtgttctttcaaacactcctagtctacggggtcatgcctaaagaagaaaatcaattagttaaaggtctcaaataattactaaatacaattaacttaaacaagtttagactccctctaaa

SEQ ID NO: 60852 - DNA, 1206 bp, Cannabis sativa
caaatatctgtatactgatgtttattcgtggcaggtgccagtaatcaatacataagtaaatagctagtggttaaattcagttgagagaaacacacaaaacctaagaaccaaaataagagagaaattctatatgtcaagtaatataaatattttgtatttagctaagatgaaacatattacacttcccttgttcttttaggatttagctaagataaaagttcttactattttgtgtgatgaaatcactaattaaattacaataactgttttgaagtaaatcaaataacagtaatcaaatcaacctacattagaactaacttgactacgatttattcatagcacaacaacaaaactaccatagtttttgtcaattttgtaacacttattaatttggtaatgttatgtccaatcctaaaccttaaaatttttcaaaaccaaaatataaaaatagaaaaatccaaaccaaatattgtcaatcaagtacaataatcactcccaaaaataaataataaatagaaaacacatcacatttaaagtaacaatctaataaaaaaaaattataaccatagtatttttagcaaactcaagccataacaaccatgaccagttcattgtttttctttctttcttttatatttttgttaaaaatgtttcaaagcaagggtattaaattcaaaagtaaaacacttggataataaaaaaacacaaaacggcttaacacatggatcgaatgaagcttttgagacatattttcaagcaaaattgatatttataaacattcattcctagtactctgtatatgaaaatggagaacagtaaatgtaccttcgacttatagtaatttgtaaatgcaaacttgatgacgaagaagatttaaggcctgtaaaaaagaataaaactactcagtaaacaaagaatggaatagaaaaaaaaaattagtaggaatgcacatcattttttctttaccaaacttttattcttttttaaccatggtagataaattttctcatacccagagtaaagaacgaataacatgcaaaagaagaagaatttttgaataaccatagacacttacttgtacaaacccacgatgacggtagaagacagagccggagacacaaaagacgaaatacaccatatattcttcaactacttgagtttcctccctcaaatttgaaaatgattttatgccctaaagaagaaaaa

SEQ ID NO: 60853 - DNA, 769 bp, Cannabis sativa
aacacttcaagatgtggacctcaaaagaaaaagcgaatatactcgatgagctcaagctcccgaactcgtcgccatgaagaggagatgaacgaccttcgctagaggaaccaaaggctagaagccacggtaactggcatgcaaaaagtgttcgagtgacgtactcaaaggcaaaactcaagtctcgcactttcagtacaaaagtcaataacaaaagcacagggtcccaaccacatatgttggtggaagggactccacatcatccacagaaagcaccccaaaagatcagggtagaagggacccagcgcgagacgaggaccctataggtcattcgagacaacttgagcctacccttcacaagatcatttttttttctgactcatttaaatatactaaataaaaatatatcaagttgcaatcaaatatattgattaattaaaataattatcacaaatcaaaaatacaatgagtaaaattctcgataattttaaattatctatcttgtatttctataaataattttctttctaatatatatttttctataaaaataaataatgatttgactacatattaataattttgataatatattggatataaacaaatcaattcttattattgattccgtgtcatatgcgttaaccttaacccaacccaaacaataatcttgtcattcaagttcgactcaatttcaactcgcatctattttttatgaccctgcaataatttgtatcgagtttacgtcgaattgtcacccctatcaattccc

SEQ ID NO: 60854 - DNA, 729 bp, Cannabis sativa
tgtagtttaatatttttgtatattaatttttttattataaactttatttttttattaggggattccccgccccatccccaatgagaaataagtgaggatgaggcgaggaatatccaaaatccacgagctcaaccacctcgaaacctcccgaaattccctcccatagttggagttctcaacccatcgctcgtttttgcatttttttttttccagttttttgtaatattttgcgatatttagtggtgtatttgtaatgatagaccaagtctgaggttagagataaagtttagcgatgttttacgtatttagcgatgtatagtgatatgagactaaaaaatgcaaatcacattgctaatcaacgtgaaaacttgatgtgttttagcgacatttaacgatgtaatttagcgatttaacgatatttaatgatatttagcgacatcgtgaaaactagaaaaaaaaaaaatacataaaacaagctatgggttgagagcttcttcgatttttggggtttcaggatggttgagcttgtggattttgggggtttcagagttgttgagctcgtggattttaggggtttcggagtggttgagctcgtggattttggagctttggaatggagacaacgtgagagagagagagagagagatagcgggagtttgtaattagggttctgggtcgaggttcaacgccgaaggagagagagagagagagagtgacagagagagagag

SEQ ID NO: 60855 - DNA, 701 bp, Cannabis sativa
tagacttgcatcttcgtgatctctaattctttggagacataaagttaacttttatttttaatctcacttaaatttagagatcacatatttgccttgtgagtcgtaaccaaattacacatgcacgagacatggattgtttaatagactataaagggagacttggaattgttaatagactatagccctgtttatatattatttgtgaaccatttcttctcgctcattcatacatatatattggctaatatgaggcatagccacgttttctttcattgcatgcttttcccttatttaaatataaatgcacacatatattaatttactttgagggaacatatatccatatattcaatttaactatcagattcactttatctctcttgaacctcacctcaccataattgtcttataagaattaattcttttaaacttcgtcaggctaaggtttagcttagtcaatccgatctgtgcatttcaaacagggatataataatcgatcaacaattttattgctgtacagtttcttagtgaagattttactgcataacgcatttctttactcaacatttttattttatttttgatttacatctcatattgacacatttctttgaagatgagaatatgttagtattttccttttctttccttttctccccctggcgatttcgttctccctccttttaaactcattttttacg

SEQ ID NO: 60856 - DNA, 705 bp, Cannabis sativa
  modified_base (217)..(245): a, c, t, g, unknown or other
gagttttagttagggcataaaatccaacagaactaattgtataaaatcttctacttttgtggcatagatgtaatcattgtaacacttcttacaaaataccatccaaaacatatctaaggtcatggtattcagatcatgaccctgagatactattgagttttatgccctaaataaaactcaattcaataaataagatttactaattaattaaagatcnnnnnnnnnnnnnnnnnnnnnnnnnnnnntgatttatttcatgattttatgtttaatgtatgaattctattcaatccataacatatagttaatcatgattatagtgttgtcaagacagtgaaatataatcatgattatatgtttcaaagtttaagtcccatgatttgtgagtatattaaatttacactgacatgataatcatcgatagagcttacttacaccttggataagtattatgtcatttctaggatattggaaatgtatgctaggatcatatgtttagccggccactaagtggattttagccatttttttaatcttttctttaattcatataattaaatcctaaaacatagaaaaaatattatcaaaggaataagatgctctcattttcatccaaccatcaaaatgtagtattcattctctgtcaaactagtagtaaatgagagactccatttgtaacgccctaatgctaaggcacgctacagt

SEQ ID NO: 60857 - DNA, 526 bp, Cannabis sativa
aagattttattaaaaaacttatgcacatctatgtatatatagctttttatatatatatatatctataataaaatttagattttttaaaaactttaaagaaaattaaatttaaaagtttttaactcaaaatcactaaatatatatttttatataattatattaacccataaataattttttcgaccctaactcataaaaatcgtgttacatcgtatttgttggctactcctacttctaattatacctattgtcataaaaatacaaagataaaaagaaactatgtgtattacctttgtaaggaaagggtctggttggccatacttataagtaattgcaacaacagctctatctccactagagcttaagtgaacaatgtgaagctcaagatcaaacctttacagcaaaaaataacaataataaagtaagatagatattagcaaacaattaacactacaacaaataattatttttagtaaaaaaattttagtcacaatataaattgtttataactaaatgtgacttttag

SEQ ID NO: 60858 - DNA, 1161 bp, Cannabis sativa
tgactcgtggagtatgtatatttaactacaaaactacataaaaaaatttgtgttcaatatgtatatatatttattaagtataaacattaattctttatcttttaaggcttcatttattgttaacaaaaatttgagttaacagttagtactttcattgagagccttagtaaaaataaaactcgaaacacatctcccctttttgtttcatcacattatgaaaaacactcatcatgatgagcctactgtagaagaagaaacaacaagatgaccgagaaaagagccccagggggcacagactcaaaccatacggggaggggtcatactaagaggaaccttgagagaagtgaccctgaggaagaaattcttgaaagaagggagtcagatgcatatgatcccacaagatatgtccccattattgagttagagaattaacaacttcgttgaaggctggcacagttcaatcgaaagaatcaagaattggaataagttatagctacgaccaaagtgcctcaaaacgatgctccagatgtataggaggagaaacctgcacgacgtctgcaagggagaccccatggttcacggaccaaaagggcacaaggacccaacattgtagaacagggaccaaataatcccactcactcccaggaacaacaaccaggggaaacgtgagacaatcctgttgatgggtgaggcccccagaatcagggtgccacaaccttgcgacaacgggcgaagggacaatagaagtttaaagaaataatgaaaatccaaaagatcaactgcctagccagtctggtcgccctccacgttcaccacaaggatgcaggagaggagaaagaatcaatatgtacacatacctgaatagaggaagattcaccaatttatttgaaaggcgaagacctgctcaagaatcaccacaaggatttgaggctaatacagcctaaagcagatcgaggagttgaggtcagacacaatctttgaggtcatgtacatgggaaaacccaccacgtgggaagagaacacattggtatgaatatcgaagcgaacaagagagtatgagtaactttcaaagttaccaattagaaagtatctccccaaatagatctgtgagcaattatgatagcagacaagattgatggcaaaacatgcgggatcaaccca

SEQ ID NO: 60859 - DNA, 1885 bp, Cannabis sativa
agttcctggtaaaataacttccaacaactacatcagagtagggtacttctgccatttcatcttgctctagtttggttttagggcacattgtcttggacatgtggtactggttggtgattggttgtgtaacagtctttgcatctttcatagaaattttttctatgatcttgatgatgtaatcttcttcatgtagcattagtttccctttgtctctgtccctttgaatgttgatccccaatatcttagttgccacccctatgcctttcatctcaaattctaatttgagtagccctttaaccttgtcaacatttgtcctttctttgctaattattagcatattatccacatatagtagcaagtatagatgacttgtttacttcagttcctttgaagtataaagaatgattataatagcttctattgaaaccttgtttggtcataaacgtgtcaaaacttttgttctattatcttagggattgctttagtcaatacaaagacttgtcaagcttgctcacatatccgttcttgcctttaaccacaaagcctttaggttgctccatataaatgtcttcttctaagtccccatgtagaaaggttgtggttacatctatttagtctatctccatgtcaaactgagtagcgagggataatattaattttatggttttatacttcaccattggtgagaatatctttgtcaagtctaccctttctttctgtgtaaatccttttaccactaatctagccttaaatctcactggttcatccttagtccttccttctttaactttgaaaagccatttgtaagatactacactcttgccttctggtctaagcaccactttttagatttcgttctttatgagaaagtatatctcttctttcatagcttcaaagcaggctttgtagtttctgtctttgagagcttcttcataggactgtggttcctagatttttgcttctaatttgcatatgtagacatatgcaatgctctcatcccataaattatagttgtatttcttattaggcttaggtattattctggccctgtccttaacaagctggtactcttcaaatcctctatgtttctatctttttcatcctggatctcatgttccacctgatctggttctgcctgagattccacctgaactccacctaatctggatgaggttctatttcaggttctgtctcattttgggccatcccaataggtgtacctgcagggttagtttctgtaggacctacattgagctcattagtatttttacaaggaaaattattttcttgaaaaattacattcctacttatacgagttttaaaacttcctttcccttttacccataacatatagcctttaacaccttctagatatcccaagaatacacattttagagctctaggctctaatttccttatgctttgatgtgcatatgatgcacatccaaagattttcaaattagataggtcaaatggtttacgtgtccacctttcctcaggggtctttccttctatggcactggatggacttctgttgattaggtatgttgcattcactactacttcaccccagaatccatttgagagtcttacattgaaaagcatgcacttagcttttttcagtattatcttgttcatcctctcagcaacaccattttgctgaggggctttcctcactgtcctatgcctttagattccattgttttggcagtaacctataaactcatcattacataattctaatccattgtctgtccttaggatttttagctttctgttagttagatttttaacaagtaatttccaatgaacaaacttttgaaaaccttcatttttgtgtattaacaaatagatccacacctttctagaataatcatcaacaata

SEQ ID NO: 60860 - DNA, 782 bp, Cannabis sativa
gcacattttttgtaattattttgtttttgctgtacatttatgaaaaaagccctatttaaataaaatataattataaatgaattatactggtcgtttcgtattaacccgtttataaatgggttgtgtttgagtcgaatatatacctattatatataaatctcgacgatacaaatatgacctacgaatcgctacccttataaaaatttcctaatatatgtggtgtttgctcttgctcataacaaatgagttaagttgaaaaatactacttttattaatcaattaatcaaatttacctctaattttatatttgattgaaacatacctctttttatatgtattgtatccaaaataccttgacaaaagatagtaacatagagagtatcttgaagtgacaggggtaaaattagtagaatatttaaaaaaaagggtaaaaatgatagactttaaaaaagaaggtaaaaatagaagagaacactataaaaaaagtatagagtgtaattttctcgtaacaaattgtaatgataaaagatctgcaaaaaaaaaaggttatatactaaagggatatggactaagtaccaatgacaagagagggcagtgtatggacaccaatcaagcccaataaaaccaacaaaacagttgggtaccaggcccagtcaaaccaacaaatacaaaatagttgggtaaactaaagaaaaatggggcttttttagggttaatttcacaaatgcacaaagacaacaaaaaaataacaaaaatacggttttacggaattttaaatattt

SEQ ID NO: 60861 - DNA, 1024 bp, Cannabis sativa
attttagtaataaaacttttcaaattactgaactgttgtgatatttattttttaaagttaacaacaaagttttactgctaaaatttgagcttagaggatttacaagtaaaataataattagaagattacccgcaaaaaactcactaaaataacatgagtctatctcaaaatttattaggaataattgaattttttatatagaatagtaaaattttctatatatagttataaattgattaatattataacattactttaatttcaacatgtgaattttagttcgtttttcatattgtatttattattatggaatgtctgctatagagtttgattacctgtctttttattataattttagttgataacttatgattaattgggtcttatttttaagtatatatttattaattttaaactctctaatatttgggttagagattctctttaatctcgtcctctcccaactaaaatttatcatgtgaaactcttatactaaactcatattaagatcccgaattcgatcatctattgtgttgaaattaagatcaaaaatttatttacctttattatatgatacgagcagtcagaatttaaattgttttaaacacaacaaattatctcaacattctcaaaatattgcaagaagttttattttatgaaaatgtattctaatttgtagtcgtatagctagttttaaaaaaacatattacaatttatatactttcatagaaagattaataattattgtaagtagtaaaatactataattaatttcttcaccctacacaactttttttttcttccggttctttatttatacaaatgaaacatgaaagtctcgaaagaatagagtttgtgtacatatatgcatataatatatgagagtaaattaatgaagaatgttgatatgttagattatgttccttagatttggcgttaaagtttgaccaacccaacttcgattgagattctacttctcgttcttccattttgattttggttccccttcggattctgtgctatt

SEQ ID NO: 60862 - DNA, 695 bp, Cannabis sativa
ttacatgatcatgttctccccacacccctatgcctggagctagtcaattggagaactggttgtaaaggctctatagtactatcctatacatcatacataagtatacattaattatctcattgttataaattaacaaatggggtacagcaaagttttctccactaacataatagttgaattcgatacaggaaaactatctgttatagtttggagtgtttgggggtcccaactctcccaagttcccaaccccatatcatctcctttttttagctaccattcccaaccacagtacaattatacactacaagccaattctctctctaataatctctcctgcattttgcagtgatttctctataccatatttcaatcaagtatagcagagtattatagaaagaaaaacattacaaacaagagcaacaaattattacaaatcaagaaaatttcactcatagtgactcctcacttgctcatataatcacatgatcaccatagctagaatgaataggattatcccatagtttttctaagcagtgatccgagtgtagaaaattacaataacattaactaattaataatacaaactacaacaactcagaaaacaaaacccaagtaacaaattatcttttgcttcttcacagagctaaattatctatatattcctttgttatttttttttgggcttaactataaaa

SEQ ID NO: 60863 - DNA, 2106 bp, Cannabis sativa
  modified_base (2038)..(2067): a, c, t, g, unknown or other
tcgttttagaagttcatatttaagttgttaaatcaacatacttgtgagtagatttaagttcctggtaaaataacttccaacaaaagactcagcaagaaaataataacaacaatcatatagtctgttattccaatattattatttatactcagacaatcaggatcagatgattacacattacttatatgatgaaatctaaattacctactaacatcagttgcaaacaaacatcaatataaagatatttaataatataaaattattgtgctaatattagaagtcatattcatttttggatatggtattcataatcaacgtttgtacattactctcatgcataagtctaagtcaatacagtcattcatccaaaatgaacctcagtgtaaacatttaatgatatactaatacccatttaataatataaattatatcattacctcataaagtaactacttgctaatcagacaaccctgatgctctaacccgatatccacatgtctcattgcctaatcaggcaatgccaatgccttaactcgacatccatatatatctgtcattgtctaattagacaatcaacaagtaggagacctaacaattatttttgtttatagtcatgacttttgatacctaaccttttggtatccaaatatcattgcctaataagacaaccttttcatcattgtctaatgagaaaatctttacattgttgtctaataacataacattttcatcattgtaatcatataatctttacattgttgcctaataagacaaccttttcatcattgtctaatcagaaaatttttacatcgttgcctaataagacaatttttttcattacataacggcaataatcatgttttaatcttaatatccatccatcctcaataataataattgcattataacataacatgctatgtagtacaatgtacttttttttttacttttaatccaaattcatgcatgtcggccaacccaagtagagaaacattactgatgatcttagccctatgtcgcaacaacggtaaaccaataagtgtctatcccaaaatactgcttaatgtttgcataagataacttagggttttctgccaaattctgtggcataaacaccctaaaataaacttatattttggctctaaaacatataccatattataaagctcattgcaagcttcaaaacggtatatagaatgtctaaaacagacactcgagtaaaaagttatagccaaaatacgaatttcgatcctctcgaaaaaactgaaaacatcagaccgttttattctgctccaaaaatggtctacaatttttcacaggaacaaaataactcaattttaaacttctcaaaatcccaccaaaacctaaccaattgattctaaacttcacaggacacatatatattatccataaaccaatttcaacgtaatataaataaaaaatgagtccttaaataaaaaataccattaaagctcgagcgttgaactttaaaagctcaaactcaatttctacttcaaaactacctcaaatctagcaagtaaatattgaaaccaatcccctattattacaaaaacaaaacctcgagatcacaaatctcacaaccattctaaaacacaaagtcaacatatagaacttcacttttcaacttaaaaagaggatcgattcttacctcaagctttccttcttcaatgattcactacccagctactaatagcactagaaacactaggtttttggctgaaaaaatgaagaaaaatgagtggtggaagtggggttctcgtcacacgaagaggagcaggagagggttttcattttttagttttgtttcatcaaacattaacttatatatattcagataagctcatagtggattatcagaaagtaaatgcattcttatcattcctaattgtattttttcctttcatcctttcgttaattaaatttaatttccatcattcctttttgacctcttacaatttcttatatgtattgtttacttaaacttgagaagtcccttgttggaatatgttttaccagnnnnnnnnnnnnnnnnnnnnnnnnnnnnnnaacatcctaaatatgaatatctaaaacaatgtaaataaa

SEQ ID NO: 60864 - DNA, 932 bp, Cannabis sativa
tttattctattccattcttattcatattcatattcctattctcattcctattcttatattttcattcctcctaaccaaacgtgaattaaatatctagctgcattttccaactgaaattggattatacattcataatataagatgttgtctttttctttatcacttatatattaaataagttatttttaaattgaataaaatgtagtcagtggaccaggacaggcattcgagatggcctaattagataaaagttttaagtggtaaaagtttcttccaccccctataaagaacaattctaataggagtgttttaaagaatgtctagtgagtttttttttttggtatttttgaatgttaagaaccttgagtgagtgtgtgtgagtgtgcatcctacaacattgtattgttgactgaatattccattttttggttatgccttcatttatgtaattgccacttggcattgtattgttggcccccattgtaatggacatatatataatgacattgactctttcagaatcattgagctgagaaatttattttgcctattctctaaattttaacttagaattagagccaaaacttcagccaatcaccaatgttgaccgacaactttagactcccctctcacctaattcagcaaattcaaaccccaatacaatgaatgctagagttaccactgctgcaaatggagctagctcaaatatctacacccaaaacttcactcaaccatttaatccccttaaccaaccattctcccttaagcttgaccaaaacaactagacattatgaaaaacaatggtgtcaataatcatcagagggcatcaacttgatggtttcatatcaatgggagtcgtgcatgtccatctgagttcatccttgtagtagttactacagaaggccaattaagtattgaagtgaaactcaatc

SEQ ID NO: 60865 - DNA, 917 bp, Cannabis sativa
aaagttcgggggcatgattttgtcaaagttcaggggaaagttcaggggcaaaaatcctaattagcctttaatatatgtacctatggagattcttggggtgtggtacaatgataatttaaataaatgcttctattgcgtacttgatttagtatcataaaactaacacttggaaattttataggaatcgtagtcccccattacgatcgtgacacgtggcgttggaaaactaacggtgcctcattgaacagttgtcgcgagacacacctgcacaaaccctaaagggttttgatgatgtggtaccttgggaagataaactcataattaccaactgccatttataaacctcgagaaggtaattaagcgtcacctgcgatgtgatcacatgatagacaactgtcattgcgaaactagggacatgtgttataggataaaattttcacctagaaatacgagtgtagtctcgtatataatagagacatggacccagtttccagttagaaaaggaagacgtgttagtaagcccaatagggctatcctcgcatgataaaaatttggaagaatgtgcgaccgagacaaggtgtagtcgcgcactatgcatggcatagcaaagtaaaagcaagacagaaaagtgaacgtaagtcgcgcatatattgattataggcaacaacaaaatgtctcccctgcatacaatgagaataccgcatctttatgagtgtttggttcgaatgactagtgtgcgtgacaactcacttagaactcgcaaattctatgttgtcagcatgaatgcccaatacgcgactagtatagtcgcatgctttctgtattataaagaagctcgagaggttcacatgaacctcatatgcgagtagcatcggagaacccctgagtttgtgttgctcgaaatatgaatagtcaat

SEQ ID NO: 60866 - DNA, 1321 bp, Cannabis sativa
aatggtacatggtcgatcgatcaggatagaaagaaaaagattcatataaatttcgtatggtgggttgaacaaaacaaaggtatgatatatttcataatattatccgatttttaagtcaagaaaagaaaaacgaattggggccactatatatccccagagcagccacttgcatatataacttcacgtccataccctatagagctatatctgctagttaagcccatcaaaatataatacatatatcaacattatttttgggtaccaatagtaattacttataagagacatcgtcattaaattagatagaatttaatatttaattgcattaataaccatatcggatgctaagctagctgttgtcttttttaacatttctcaatacacatatatataggtccctagcattaattatcttgtatgtatatatatatatatatatatatataaatatggtagtctttttcatatatatatatatacgccccatacctggctcgtgtgaagtggcatgggggacttactagcttatgctttttcatgagtagtcatttcgttgtttgaattaaatgtgatgaatcaacaagtgagcaaaatggaaaacagaagaaggcaataagtggcagctgtatatatacatgtttaaatcaacgtacatatatatatatttatataatatagtatatgcattttgagattcgtttcataataatgtgtaatatatatctttatgcatgtgtatctttatcttaaaaggatatgggacaagagatcccatttcgtcttttcattgatatcatgagtttgattttcattgctattaatgcttttgtcttgtcaaatattgccatgcatttgaattattaatactattcatgactactacgtatatatatgtactgatctctgatctcatctatctgcatgcaccagtggtctataaactaaaaaaatgtgtcaaaaaatagacaaagttttgataaaatggcaaagttaatatcttcatcaagtccatactttagtgcatatgacatattttctagtgcatttaataatattgactatgaaatattacgtgataaatataattaatatatatttaggtaccctttatgcaattcttcttaagtagaagaaggtgttattatttgtgtacactagcagacctaagattttgttcaagcaggagcggaataaaattaaatattaaaacaatacaatatagaaatgtaattgtatatatttatttagaagggacggacacctattttcttttacctaatttatttttactttaatatttttgtatacattaagaaaagaa

SEQ ID NO: 60867 - DNA, 641 bp, Cannabis sativa
gcaaaagatacgggcaataattcatcggcataacaacttttactgacgagttaagatgatgtgtcaataaaagtatttatactagcaaattcaattgccgacataagtttattgctgacaatttgttgtcggttgaggtgtccttgacgacgttttagcggcaaggtagggcgccggcaaaactttggcgcctaatcttcattttaccgtgaaagttttttcggcgcattaatatggtggcaaaacatagagaataagaaattaatttagttttgtcagcaactaaatatgcaccggcaaaagtattttttttaaaatacttattgttatccaagtttgcataaatcagacacgttgcacaatcggagaggggaacacggtctctacataaggcactcggtggaactaaaagaaataactcccagatcgagaaggcagcgggaggcaatggcttccgaaagcaacgtccttcgatgaggatcgtggaaggcaatgcgggttttggagatgttggacacataagctccttgtaaaagtatcgctccatggacgattatacttttttttgacacaggatcagatcttgtcccttgtgccagattgtggtagtgcacgcatgtaccctcgagcatgctttttgc

SEQ ID NO: 60868 - DNA, 944 bp, Cannabis sativa
ttatatggccctaggggcaaaatggtcttttgacctttattttgttgattgatagaagaagtaaattgtgagaaaaggaaaagaaatttctggtttgctttggcccttacccgacccctctctctttccctctttcattttctcaaacctattttcaaattatgaaatttattcaagaattgcttggttgagctttgatttgaagctttgtgtttctgaaatcttaagcttgtttttggattaaagttgaggtagttttctatgattttcactttgttttaattgctaacatgtatggttggaagcatgaactaattgtagttgagtttgtgttgcatgttatatttggatttgtgagtgtatgatgttttgaattttggttgagcttttgatgagattaatgatgtgttttttagcttaaattcatgaattttagatattgtgattgctggaaaaaaaggttgagctgtggttggaaagtgtaagatttcaaagaagaagtttgattgaattatgttcaagttggaactttgtttttcatggatttgtaatctgaaattttggggtgtttatggtgggaatgatgcttgaaattgggtttttaactctctgtatgatgattaaaaacctatttaatggtttgggagttttggttaagaattgggttgttttgatgtgatttaagggtggaaattcgtggtttattattggttttcctgggttttaaacccaggttccgcgacatggttttagcatgccgcggcccgccattttctttctgggcagatccttatgcaaacttcaaatagcaataactttgtgattcagactcaaatttgggagttctttataacattagaaagctcatttcgagctcgaagtgaatatttatattttgaatgccaactatatattttgtaaatgtggaattagggattaaccct

SEQ ID NO: 60869 - DNA, 1102 bp, Cannabis sativa
gtaacatgtcactgtaaatgtgttgtagtttgttttaaacaacctctgttgttgatttagttaaaaatgacaacctcacatgaagcaaaagttcattttattttcaagattgtgaactcctaagtcgatcacttcatggagtggtttgactgattaattagttacctttattcctattgaatattttgttacagaagtttttgatttaccttcatctttcttttcttcagaacaacaatggctccgagaagatctcaggagatgctctcaaagatctctacaagtctttcgtaagtgagtaccctattgtttccattgaggatccatttgaccaagatgactgggagcactatgccaagatgaccgctgaatgtggtgaacaagtacaaattgtaggagatgatcttcttgtcaccaacccaaaggtttgcatttgttaccttttattatatttcagttcttttaaaaaataaaaaatctaacagttttgtgcttcttattctttcagagggttgagaaggcaatcaaggaaaagtcttgcaatgctctccttctcaaggtactcaccaaattttgtttagtcatccttgagatgtgtcgattcgagttctgttagtggtataatttgaagtgaataacccggttgtggtttgtttcaggttaaccaaattgggtctgtaacagagagcattgaagctgtaagaatgtctaagaaagctggttggggtgttatggcaagccaccgcaggttagaacatcgaaccctgacaagcagccttgctgataaaaactcttttcatttcttgatcattaattaaattattgcattacttgcttgcagtggagagactgaggacaccttcattgctgatctctccgtgggtttggctacggtaaccatctaacaaaatgctgtgtttgaatgaattaaaacctttttccagtcttcaattggctatctaaccacttttctgaaatctgtttctgtagggtcaaatcaagaccggagctccctgtaggtcggagcgtcttgccaagtacaaccaggtttgatcttctaatccttgtaaactgtatctttctcatatgttcaatttgtttg

SEQ ID NO: 60870 - DNA, 862 bp, Cannabis sativa
gaaagtcactggtgagaggcgtccaatgtgaggtgccttcaaaggatcagcgattgcaccaactggccttcaattggatggcatggtcggagcgctacatccagtagggggtagtgctgccgttgcacccatatttcaaagacatagccgcttactttaggatttgtccaacataaatcaccccaaaaagtattaaatacttctcgataatgtttttttctctatgagaagctaggatggccttagcctactctgtatgagattgggtattactttgattttaagtctgctccaaacaaaaccggacagggtacttctacttcagctaagttggctaccagtggttgggtgacaccaatagtacgcctctgtctaaagttgggggatatgcttagaattacttcatttcccaagacatctaggagccaatgatagttgccctccattgaggagggatcagcctttgggaaagggcacccaatgatagttgaccctccattgaggagagatcagcctttgggaaagggcacccaaaagcctagtcgaggagtaggttcagccatgggggtagagagccatggaggcaattcacaggcatgtggacaaagcctttcctattgtggataatgagctttaagagcttggtgacagcaagccggagaggctctcttttgtcagccttcaagagttggcctcagtaagttgcacatttaactttgctcacttttttgtgttattatgggctggttggtcataggagctgttgtatggagctagttggccattgtagtgtctttgagaggctggccgaccttggtagcaccatagaggagctggcccgctgtgacagtcagtagtcccg

SEQ ID NO: 60871 - DNA, 3539 bp, Cannabis sativa
  modified_base (80)..(82): a, c, t, g, unknown or other
attaaaaaattgagagaattaaggtgaaaaaaatagttttagagagattttaaaccgtcacatcaccgcctcatacttcnnntttatatagatatatagattattcaatagtgattttttttaataactcgctatatgtatagtatatttatgaaaataatcattatatgttaaaaaaaacacaaaacattcaatttgattttattatagtaattatattgattattgttgattactcaccatgagttggtatcaattgaattattttttatttttttcttttatacatagattatttattggattttttattatttgtgaatttgatatcaagtatgttaatttttttttgaacaatgagcattcattgaaaataattcaagtttacatcttcatcaaaaaatatgagaaattatttattcaaattagttcgtcatccaccatgagtgtacaaactgctaattcatgtatacaataaacataaatcagagatgtctcagaaaaattagataattaactaacacaattatctatgaaagattcaaataacaaaaaaaaaatctcttagagaatataataggcaatccacatgcgagttacaaatacaaaatcaactttctacaaatctccctagtgaaaactcctctaatgctatcaacatgttcacataatttattttaacgacaataaaagctcctacaaaaatgttaaaaaagaaataatgagaacccttttaaatcaataaactaagtaatttaacaaataccaaaaataaattgcattagaataaaaaatatgaaaaacttatcttattcaggcactccaaaagtccttatcaaactgtgtgtgaaaatcaataatcttctaacaaagaacaaaaccaaacaagaacaataccaagaacagaaaaattacggttacaaaatactcacaagaaacttaacaatataccaaaaataaaactaaacaaagacataacaattgtatataatatgtataaatacacataattaattggaggagatttcaatggttacatcaaatatgtaaccatgatggttacatttactcttattcgttagatcattattagacggttgtgattaatttaaaattttactaaaaataattaataaattacatataacttgatactaacttgattttatttatttccttaaaataaaaaaaataaaaaataaataaaaatattaatttctaaaaaggttttgttaatgaagattttcgttaaccaataagtaagtctttttgtaataaatgaactctagaattaaataataataataataaattgtgttgacctcgcttttagccaacgacaatgagtctaataataagcgattaagaatatgatttacgtataatatgagcaaataaataaagaacacaaggtttttaaagaggttcggtcccgttcaattcggtaatagcttactccccttgatttgtattaacttaagagcaaagaacacagtgtttcctctcttgaagctctcacaatgaaatctctcagtatgctctcttagatttctttaatgtaattctctcgacccctttaccagtgagaatggatcactatttatagggctacatggttgaaggaagatttcccttttgcttacaatatctataattggtaagaacatatattacatatttagaatgcacatattgtgggatttggacagcttgccatatctttgtgatacgatcccagattgataggaattactcttgtgcttcacaatgcaaattctggaattgctaagtattgatgcgctgctcagattatccactgctcgactaggaagacatcgtttgtgcaggtgtacgctatgccctgctcggagcatctctctcgggcagatgtggggaatcaggttcacgtgtcaccaacatgtgctgccacgtcacagtgcaaaaaagaggataacaaatggcaagaagattttttacgtggttttgaagttaattcttcatagtctacaagtctattttattttggaattaaataaataatattgtatacataatacaaaatacaaggaaatattgatataatatctctctttttctcaaattggtcatcctttgttccctaagttctatccctatttataggagtttatgatgacaattaatcccttgagatcttgtccctgtaactgttcttgaaacgtggacaatccccacgtttcatacttacatcacatgggatgataataataaatactgccataaccgctctttgtctctatctgtaaacaattatgttgactatgctttattcatctagtggtacacacagccttctcaagatgctttaccctaacaaggcttctcaatgcctaagaatattttaaataatacttctcgtgtcctactataagcattgagtgaagtaaaagcgagacaccatcgtagtgtgataattttgaggtgaacatgatgggagtgcttctgctaatcttctaacatactcataagtatgtgggtcaatgagctgcgagctctttgaataattcattttctaccttttctaaacattatcattctattgtgtattctgtgtatcctaagatgaatattctttgtttattgttcgtcttgttggtctcatcaattaaaagttattattcatggcttgtccttatctttaaaagggtgagttcaaatatttctactaattgtagttttcgaggcgagttgattgaatgcatttattgctttaaaacttgagctggtttattttctagcttttttacatgtgtcaacaccatattgttactcaaaatatgagtataacaatagcttcctaaaaagtatttttttaaaaataaaaaggactttttaatttccaggggtatgatcgtatttttccctccttaaaagaaattgcatgcttcattttggcagttcagtacattgatgtaagcatcatttcaatatttattactttgactcttctttacccattagttcccatccattcgatcagttatcattacaatcaaattatttttattgtttgggtataaaacttggaccttccccttatttttccattaccgttcatagagcttagaatttaaaaatttcagccatttttctctcgaaattgcatacccttcactatccctcacatacttccttcgagtttttgttgatcttattccttaatctcagaatcgagagggtttaaactctctgcactaggagtgttaaacaaggaattctttgagactccatttctctctacgaaccaataagtgaatatccatcattactcttttgattaaaatctctttgttgctgttatctcgattttcccacctgacgtggcatgtccacgcggccaatatcaatgccacgtgagagtacaactcgccaacaaggaggccaagtcatctactcaacacttcaaccaacgaggggtccgagtactgaggagggatgacgacatgcaaaccagccaccctaagggggttggccgaccacccatcgctagccctatggcc

SEQ ID NO: 60872 - DNA, 775 bp, Cannabis sativa
  modified_base (68)..(68): a, c, t, g, unknown or other
agtaatgaaattaaatctgtttctttattgataagaatagaaatgattacattgaaatagagttttanttagggcacaaagcccaacaccttagtccatgagtcaataatattatgagattggctaaaaaagcctaagggattacaatgaataccatcactctattctcttcttaagcaaataagtcaagaatttctaaccctttacatgaaagatttaatgtgtatttatagagtaatagaggtcgtacttagttggtattttcctctaatggagaatttacaaataatacatagattttggcttatcaagtgaagtccaatccacaaggcaatgtgtgtacactgatgtggagatctaatcatggtaatagctattcatgtcgtgttttataattctgggtaattaatgtgatattaattacttgatctttaatttattcagtttccttttttaggtaggataatattctctgtccaaaagttttaggaaagtattccttattctatccagagtagtaaatggaaaactaggattggctttcggatacatgctgagaaccacttccaggtacactgagttgacactcctccgtatgctgactaggcttagtcgtgcgattgttctctcagaaagtcagatgttaattgggcttggcccaatttattttatttgggcccaccgatgggccttaagcttctatttagattccatgtatctcttgccaaaaacacggataacaacatccaacctggtttactttactaatactttg

SEQ ID NO: 60873 - DNA, 1534 bp, Cannabis sativa
  modified_base (250)..(251): a, c, t, g, unknown or other
  modified_base (570)..(582): a, c, t, g, unknown or other
agagagagagagagagagagagaaggctctttctcaatctaacaaatttcactgaaaggttgttaggttaagagcctatcactatctatttataggaatcttttaaggttaggtttgaattacatggcattacaaaataataaataaatggctaatttttccttaagtggccggccataggatgtggggccccactagttacaatttcgtcattttattcaacaatttatcttttttttttttcataaannccatattttccaattttaatcctttaaatgtcaaaactatttatttgataattaaaattaattatcaaataaaattaccatttgtagatgctaaaatctacaatgattggaatgagcgtttgtgggcaccgacaacctgtggaacaaagacaaaggatgaccgtgaaaccttgggacaccggggtggtgctagccgaaggcactccgacggtcaagtcagtaaatttatagtgcaaagtagaaaagaaaataagaaatgtaaataaatatttcctgtgtctatgattatgcgatgatcgacggtcaaaccttgctcacnnnnnnnnnnnnnagtacgtcagatcgtagagaaatgataagtttagacgtaaaactatagaaagagaatgaatattcgtatctccttcgatcccccccttagtctcagtgtgggcctatttattatcttaggaaaatggatacctcttgaaacatggtccatccctagagaaacggtcttcctccacttctccaaggatgagtgtcatcttttccattcattcctccacgatcatcctcttatcagcgtattacttagagggttgatattctcgctccactatgttagggaagatcgttatttttgtgggttagttgggaaacttaacattcttcctcctccacgtgtcaaccctaacattacactttaagatcaagctttattatgggttgggcattcaaatatgggtatgaccccaacgacatggattgggcgtggcccatgtaagccattgggcttacaggttcctcgtttctaacttataggtgggctttgtaagtacttcgatcgttgggccttttcgttgggcttagagcaaattttggccactatagtttgtcccttgctctttaagttgagttatactcaaattaaagagcattactcgtaggcgtgcatgattgactcagagtgcctgtagcgtgattttagatcgagaatgattggacgggcataaattgaagtagttagactgaatatatctataagtaatattgttttgatgagggcttgatacatcagtgattttcaagacaagtgtattgtttatcttcaattttttggtgcctcatcttgctcaatgtaaaattgtagctaattagagttggaggcaattcgagcaagggaatgaatggagataagtgaatgagtattgaatatagtttttcaatgagcaaaacatcaaaaactcctattcaatgacttgtgtatggctgagcgtcaatagattgagtggttcatatga

SEQ ID NO: 60874 - DNA, 877 bp, Cannabis sativa
aaatgggtgtttacagttaaattcaatcaagattgaataattgcttgcttaaaggctcgttttgttgccaagggttatgctcaaacctatagcgtaaacggttgtgatactttttcttctgttgctaaactcacatctgttcggtagtttatttccatgacagctactcattattggcctttgcatcagcttgatattaaaaatgcttttcttcatggagatcttgaggaagaagtgtatatggagcaacctcctgggtttgttgctcagggggagttagggcgaatttgtcgtctttgcaaaatctttatatggattgaaacaaagccctcgtgcttggtttggcaaatttagtcaagccgttgagaaatttggtttgttgaaaagtaagtcagattattttgtgttctataaaaggtcaactattggtatcatttttttagtggtgtatgttgataacatcgttattactggaaatgatactgcaggcatctcatcccttaagtcttttattcatacccaacttcacacgaaggatttaggggtgctcaagtatttcttgggtgttgaagttacttggagtaaacaaggtatttgtctatttcaaaggacgtatgtacttgatttgttaactgagacagaaaaattgtaagcaaaaccttataatactcaatgaatccagctatgcaccttacacatgatggggaaccatttgaagatcctgagaaatatcgcaaattagttggaaagttaaattatctaactgtgactcgtcctgatattgcattcccagttattgtcgttagtcattttatgtcttctccaacaattcatcattgggcaacattagagcaattttatgttacttaaaaggagc

SEQ ID NO: 60875 - DNA, 12791 bp, Cannabis sativa
acatttttttttatttggtgatataaaaaatatcatcaaaaattacacattgaaaatagtttataaaaaattatgaatacaaattaagcttatgtaattaatttaatagtcagttttgttttaaaaatatattttaaaaatataatcaatactattcatcaagttattatgtgaattttgaaaatattgttgtattaaagtatttatttccatatcaaggtgaataattttttccaaaattttttattttgaagcaaaattgacccaagaattaaacacaaaacttaagaaggactcatattttataaactaaaatcaaactcaatcaaggttattatcataggaaaaaagaatatcaccaaaaggttttttaaaaaaaaattacaaaacacaatataaaagcgcacacatatatatactgtatatatttactagaaagacaataatataaatattttttttataactaatatataaaatagatactctaccatccaaaaaatattttttttaacgaaaaataatctaccatttttaagaaaatgaagtaaataaccatagaaactcactatccctaaacttaacttatgcattatcctcaatgtatcaaaatataaatataaatagaaaagtaaaagtacaagtatttactgaaatttttaaaaaactaattataagaaattagaactgaaaaaataaataattgaaagaaagaaattagaacaacacacaaagtttttacgttgttaggggtgttaacgagccttatagtccacgagttaattttattatgtattttgagctagaaaagcctttgagaatacaatgagtataagtttttccgtgtttgcctgaggaagtattgcaaaataattcaacccttaatctgaaggattcattaggtatttatagtgtttataggaattatacttagtttcccttttaccactaatggagagtttacatgaaaatgcataaaattggtctgatgctaactaggcagataggaatacaattagattgtcagtaccgtgtcctataattttggatatttcattaggaattaattacttgatctctagtttaggtaggtttttattttttattttttattttttttttatcttgatacgatcttatatttgagatttaaggaaagttaatttcttaatttgtgcgcttgaataaaaagagaaattggactagtcttctagaaacacgctgtctacgttcaaacactgtaaatctaaatttagccctaattaattcgtgaaaaatttaactatataattaaagattaccggaagcgtactagagtctatataatcgtcttagaatggtatgatcttctaattttgcatcaaaactttccttggagcctttgttttcctgatgatgggaattcaggaatatgaaattgtatgatgcaaaaatagggaccaatacctatttattaataactataaaaatagtaattaatccttttttactatttccaatttggccacttaggggtattcacggattagtttggtctaaattttcatattttttgaactaaaccaatataacgattttttaaataaggcaggaatttttaagcccaaggtgtaccttggccaagcaaaatttgacttgtcaaatcatgaactagtaactattgaagctgctcttcaacactaggggtggaacaaatctatgcaggatgaaatttaggctctcaagaaaaacaatacatgggttttggagccttattctcctctctacaatattgtaggctgcaaatgggttcacaagattaaacttaatgctgaatgactctcttcaaaggctcaaatcaagactggttgctaaagggtttcaccaaagaccaggtgttgattttagtgagacctttagcccagttgtcaaagctccaacagtgagagttatcctcactcttgttgtcacaaaggactgagaaattagacagcttgacataaataatgcatttctcaatggcactcttgaggaggatgtttacatgatgcaacctccgggttttgagtctccccaacatcttactcatgtatgcaagctgaataaggcaatttatggccttaaacaagtcctgagggcctggtttgatcaattcaaaaataccctactacaatggcaattcgagatttcgaaagctgacacatctttcttcattttgaagaaaccacacatgttataatgttgttgatctatgttgatgatataatcatcacaaggaacagttcaagggagctaaacttgttcattatcaaactaaacaagactttctcactcaaagatcttgaaccactcaactattttctcggcattgaagtgtttagagacaacacaggtatatacctttcacaagggaagtacatagcagagttgctacaaaaagtggagctaactaatctgaagcctagccctatgcccatggttgctggaaaacccctatccttgtctgatggagaacctctcaactcaccaacagcttatagaagcataattggagctttacaatatctgagtcacactagaccagatatttcttttgcagtaaataaattgagccagattcttaaagctcctactactgctcactggaatgcaactaaaagagttctcagatatttgaaggggcactatgtatcatgggattcacatttcaccaggcactcaactcaacctggttggattttctgatgttggctgggcctgctgccctaatgatagacaatccattgtagggtattgtgtttactgggggattctctcatttcttggtcttctaagaaataatttgttgttgctcgatcgagcactgagtttgaatacagatctcttacacaacttgcctctgaattgacatgattacaagagttattcaaggaaatgaagttgtacacctctgccccttcaattatctggtgtgataatatgagtgctagtgcattggcttccaacccagtttaccatgcaaggactaagcatatagagttggatgttcacttcataagagataaggttctgtgacctggctgccattggtgtatgactcagctgcttacatggctccccattccttggagattttatcagaaggaatattctagaattgtacaattctgttacaacaaattccgtgcattgtaatcattacttttgtaatattttttttgtataatctcctccatctgtcccttcttcaatggctaagatcaatccttgtaacacttgaatatcaatggaattactcatgctcattgagctgagatttgcatctttcactactctatttttactagtatttccactataaacacaaaaggcatcaatcaagaacaaaccacaacacttccaacaactaacaaacccaacaaccctactagatctcaaccaccatcttctagagtggacgagccgaaagcaaaccaatccgacgatgcccataacacctgtcaccggcgttagaacaagcctcgccaatccccgtttcaaaaccatgttagacttgtcaaacacaatggagataatgtgattcactattgtgagagacaagagctttttgggtaatctcatcacctcttagataaaagacatagccccatggtcggcaaggttatgaccagaagtgaatgtcaacatgagatttgctaggcgatgaccaactttagagtgctacaaaacctaatttatgctcaaactgttgatattaatataacaatgttgtgaaacacattaacacgtgtagtagttgaatgaattaaatattatgtgaagtttaaataaaatattattataaacgtggatgtagtgagactaaaaaaacttcacatcaatctcattttctttcacacaacacaaaatttgttttgaattgatatcactcaatcaatatgaaatgaaatagtattatatacgggtcccatctcttatcattcgttcgtggacctaaaaatggcttaagtaattttgaagtgtactcccaaaaaaaatatataaagattgaagtgtgtgctaatatatcttaataattataataattggattcattttttttttttaaaaaaatatatatataataattggatttttttgaaacgaataattggattattaaatacaataactaaaaactaacaaggaatttaaaaaatgatttcgtttagaagagggacctgccctgcttgcctcccataatgactttcacacactttgataatatatattattgaaatgcatgacgctccaagcgccgagtgctactagtgctcctcttcttttcaaatccatgtcatttcattggccaaccctaaaaaaaaaaataaataaaaaggtcaattaaattattttaatcattttactagcagacgcctggcatgaatagaagtttatggggcacgacttagtacgtgtcaaagttcgagagcatgattcggtacataacaaaatttgggggcactttttggtacatggacaatctccactagtaaaattgatcagaattgaacaaaaagtcattaaatctaataatcacaatagtttatagagaatttttaatggtctgaaaaattcagaagcacaacataatactatattaatcacaattttgtcgtttatgctacatggcatatatgtcactggagcatgaacgacatccttattattattattattattattattatgtttataaattaagtttatatataattaattggatataataattgtaataattttagtaaattaatataatttgagtagcgtttgatgttgtggttgcaacagaaatagtctatataatactatatttggtgtttagttcaacaatcttaatagtttatagagaatttttaatagtctaaaagatttaggggcacaatttaatttatattaaagttggagagacaaaaattctaattatctaaataaaaacgctcatttctcttatcaatattgttagagtttctccaacgcacattatgtttgatgccaaaattcattttttttgtattccaacgttgacactatagctgcactaaatataatgtggaggtacaatatataacatatttgcattgttcaggaaatttgtatggtgcactattttttaaaaggaaagcactgatacactctatttattttggcatataaaagaattttttgtttaattttttttttttgatggttatgtatgagtgagagttgcccatttgcttgactaacaatttgtgggtcatcccatcttatgtggcatacaggagagaagagagaaatgattaaaagatttttaaataggcataagtgtcccttaatatttctaattaaaaaataaaaaaaaattatgattggctaagtatatgaagtgagactaatggggtgactatttttgttcttttattggagatgctcttaagatatcctactaaattttaaaaaattcaaaaaaatttaacatgctgaaaataatgatcaaacagtttcttacacgtgtgcctaatttaatttatatgcatgtgaaatataataataaaaagaatatttaaaaaaattatataataataaagaatattttttgtaatttttggtaccgttgttggaatgaaagaaactataacactatatttagtgttagtgtaattccaaatttgatgtttaagattggagatggcctagtaaattagtaatgtgaaaatttagtgctcaccaatttagtgtatccttagagtggaatgtgtgaagatttcataccaatttaataaaatagtgcacatatgttctaggaccaattccaacatgtcatcaaaagttggatttggtgtcctataatactccaacataacactatactaatcacgattttgtcgtttatgctacatagtatatatgtcgtacactatagtatgaaatttaatatttttattattataattatatatatttatatttataaattaagtttatatataattaattagatataagtaataattgtaataatttttgtaaaatataatatatatatttttttataatttttgatattgtggttagaataaaaataaatatataacatcatttggtgttactgcaacaccaattttagtgaaggttagagatggtttgaataaaatatcactctgaaatgaataattcattagattatagataatactattttagagtgtattttacaaaaactatttatcttgttaaaagacaaaatgagttttatatttttttaaaaatgataaaaataaggtctcagacttatgttttcgacaatttttttaatataactaacttgaagataatttttaacacggacatatgaagaaaatataactaattttatcataataaccttaaatcgagtaattattaagttttattttgacaaaaaattatttcagagttatatttatacaattttaaaaaataaaattttaaaatattatttacccaataattattaataaaaatgtaatttttaatcttattttatatattttgtagtacttgttaactgagtactctgcagctttgttaaatccagtactcgatcaaattagtacctgcatgcattagagataagacaaattttattatagtggcgatttgaaagaaaaataaaataaaagacaatttgaaaaatatgacaaactataaaatccaattatataataaattgttttcttaagccaccagaaaagaaagaaagtaaattaagaaaaaatatgagcatatgatatgaactcataaaagacactcacaattacaaagaactaaaaaaaaattaaatgtgtaataatacaacattttcttataatttttgaaggtaatcatcaatttaatttaattatattcatattatataatttttgtgtatatattttggatatattttttttatttaagcgtttatatattataatcatattttatctgatactcgaacgcaggacctccaacacacaatctcacttatagccacttgagcaagcatagagggttgtagtatatattttggatatgagaatgggctaattcttctttttgatataatttttgaagttttcaagattctattgacacgtgttaaaatatgtttgtgtgaaacccattattgttttatttatttatttatttattttaattactcaattaatagctttttgattgcattcggggattttggggttgtttatgtgtcagtcaacggtttgtaagagtagttgatattaactattggagtataatcggacggtggggatctcatcaatccaagggacggattcaattcaattccaatactcgtacactacctaatgctgaatgacatggactattatttgcgctttttctttcccttttttccaacaaactattactactaatatatatttttataaataaaataaaatattaatatggtatcttatgttaaaaaatattagactttattttatttctcacgcgcgtgttaagcacgtacgcttccacgtaccagtaactatccgaggcagtgcttcatgtacttttctgcgcagcagaaccaaccctactttcaaaaccgtagggtccttccacacgcgatttctagcgcgtcatattcacgatcgagtcttcctctaaaacgtcaataactcgtataagactcttctttctcttctctttcttgcataaaccaactaacacatacaacggagagaggtttctctctccttctctctcttagcgatttcattctttctggtttcgaattctgataatttgggggcgcatcgaaaccctagattcgctcccattgttaaccggtgagtttctcagattcgtttcttttttcttttatttttatttttgtttcgattttttttttcggcatttttagaaactatgttatgagcgcagatccgttcgagctttcatgttttatgtttgtgtttttgggttttcggattcgtttcctcgaaccctttctccacggtgtcctaaatttagagtcttggtttggtttgctgcgttttgaaccccaatatttggattacgtttgtgaccttcaaaatagtttctgatttgtttgtggttgattcccacaatgtatttacggtagattagtggtgtgtatataattgtacgacccttgttcttctcgctttgagttttagtttgtgatggctatattatatttgtttctatgtattaaatatctctctatagatattatccttttgtacttcttaatatgacggagaaaaatatatctgagtctttcgtcgtggctgatttgcatggtactatctgttttctttctttttctaatggaagcgaaaagtagcctttttgtgggtttaaatgtttatttgcttctctttcatgttgtctgtttattttatgatttcttttttacctctggttttgttctctgttttattacgagtttctttttacgggtcattttgttaaattgatcaactgcattgtggtgagaaagtagaaggaatagagaataggggatgcggttttagagcttgatttgttcatcagagttaattgtttttatataatacttcttagctaagagaggacgtaggagaaaaaatcagagttttactcgattgtggtggatatgatggagatttcagcactcctttgacccgagaaattaataattccatgaatagccaattaataatctttggacaactagaccagtattagcagctgaaggaaaaaaaagcatatatgatatgatgcttgtgctaaaaaatttttttgcatctatacttttttggttttatgataattaccagtctgaaatgtgattatgttgtcacagggaggactgcggaattgtttgtaactaacgtttgtaaaatggatttagaagataaattgcttgctaaaggtatgacctttatgtttcctattgtgcttgtgtctttgtgtgtgttttccactcttatgtgtttgaaaaccttcagtagaacttaaggaacaaattgttcgagtactgtacattctagtaggtgacacttataatcaatttcgtgtactgtacattttagtgagaacactcttacactcttacactctttggtttttataatcaatctcttaaagttttaatcacttagtagagcatgatgctgttttatcctgcttaacaaactacacttttgatgctgtgttggtttttgctatttatattattacgcttgtatagaaaattgtattggttttcattttctctttatcttttattgtttttaattttaagtgatggagaatttttcaatagcttcgttttaagtccagttcttgaaaagacatgctgagctcagttttgtgttttccatctccagtttctggtgttcaaagcctgtcttccagtgtgcaaagcactcctgagaagaatggtaattctgatgatgcttcaagaagtccagagctacttcaagaatttttgagatctggtcccaagaaggaactgttaaggacttgttttgataaggaaaaaaagaacttagttacatcaaaaaacaaaaccatggagatagcaaaggtgacgagcaagactaataagaaggtggattcaagaaaagcttcttctagtcctagcaatcagccttctagaaagcaaaacaggaagggagaaaatccagtgcgactccctccatctcttgaacaatcttccgaatttggattgtcaaactcgtggatatgtaaaaattctgcatgtagagctgtcctgtcaatagatgacacattttgcaggcggtgctcttgctgtatctgccacttgtttgatgacaacaaggaccctagtctttggctggtttgctcatcggaatctggggagggagactcttgtggattgtcttgccacattgagtgtgcccttcaacgtgaaaaggttggggtggttgatcttgggcagttgatgcagctagatggaagttattgttgtgcttcttgtggtaaagtgtctgggatacttgggtgagtaacaaattaatgcatcttaaagattaaatataggcactgataatgctttttatatgttaagaaattcttgttaactttaaacctgtattgtgtgtaagaccatccagttttaatattgtactaaagatctgtttgattttattttataatggcagatgctggaaaaagcaactacttgtagcaaaagatgcacgtcgtgttgatgtcctttgttacagaatatacttgagttacagactcttagatgggacttcaaggtttcgagaggtgcatgatatagttaaagaagccaaagctagattggaaacagaagttggcccggtgaatggtgtttcttctaaaatggcacgtggaatcgtcagcagactctctattgctggtgacgtgcagaagctctgctcccttgcaattgggaaagcagatgaatggctggccaatgtttctagtctcaatccaaatagcagaggttggaacatcttatgtcttttctttttaattactttagtttttttcaattgaagttgacatgaatacatatgtttcttggtttctcttgcagaggattcacttccttctgcttgcaagtttctttttgaagaagtaacaccatcatctgttgtgattattttaattgagctgtctaaagcatcttcgaatgagattaagggctacaagctttggtattacaatagtagagaagatggatattcaaaagagcccaattgtgtctttccaagaaatcagagaaggattttgatatccaatttaaagccttgcactgagtatacttttcggatcatatcatatacagaaactggtgatttgggtcactctgaggcaaagtgtttcaccaagagcattgagatacttcacaagaatcctaatttacaagctgtgaaaatcgataagaaagagaatacctccactgaggaaagtcctagtgggaagggggaatcaaaaaatgcagtggcagctggttctgaattcaaggttcgagacctgggaaagatactacatctagcatgggctcaagagaaaggctacctagaagggttttgcagtgcggatgtagaaaagtgttgtgcagctgacaaagttgtaaaaacagaaatcatacaagagcgggtgccttctgtctcacgtgggcttgacttgaatgttgtttctgtccctgatctaaatgaagaactaactccaccatttgagtcttccagagatgaagacaatggctgcagcttgcagctaactgttgaagcagatgacgctgcttctcatgacatattgaagaacggtttagcaagatcgcatggtagtggtgactcccagacctggactcatggagtgacaggagatgtgccagccgttgattcaaggaccgatttttgtcggaaaagggcattggtgaacacaattgaggaggcacatgagtgtgacagtacactgattaatggttctccattccgaatatccaatggatctagttccttggatgaaaactttgagtactgtgtgaaaataatccggtggcttgaatgtgaaagtcatataacacaggaatttaggttgaaattgctaacttggtttagccttagatcaactgagcaggagcggagagttgtgaatacgttcattcaaaccatgattgatgatccaagtagcttggctggccagctggtagactctttctcagatattatctccagcaagaggtcaaagaacggtttctgtagtaagctgtggcattaaaatgagaggagggtcatcatacttatgatgaggattgctatttgctctcctccctcaacagttttagtttacgctcttctttcgataaacgacctttgacctgatcaatttcgccaccatctttgtacaggcaaatattttttgttaatcactgtctgtatctgtagtgtttctcattagtatcacgggcaagatttgttgcggctaaatgatttggttgctgatcaaggagacaaaatatctgaattttctctggagggaggatttggatgaaaggatatatttcacatctacttctacttagagaggaagcatttcttatatttcttaattgttctaattacaatgaagcagtagtagcattcatggaggaaatttatgaccataattttaccatttgccttcttaaattcaaagaagggtacatgattagatcatgaattttacgtggtcttatgatatatttcttcttattgatctattcttttatggaagaatcttcttttttaatttaaaaactttataatttcatttataaaggaggtcattgttgactgttgtaatgcctcgtcagctgccttatataaatcaagggaaattggccatctccattccaagtggtagaaggttagataatcaagaattgagatgaagatgcgtgtgttgaattatagctctggaagactggaacatgtctgtttcactttttgcaaaaatcatctcattaacactccgcgtatacatttcaatgaattataccagtcactcacttgaattttagacactttttttatagacaagatgtgtatttaagtttagacataaatagtttggaatgatgggatggcattatttttaattgtatggttgaaattaattatataaaaaaaatgtgtaatttgagtatgttacaattattactcccttccaaaataccagaaaagtgttcctgataatttcataatttgattatgttacaattcttatgttactctcaaaaaaaaaaaaaaaaa

SEQ ID NO: 60876 - DNA, 885 bp, Cannabis sativa
ctttttgtctgtaatattcataaccaataattgtaaagtagtcatgtcttttgacatgagtttgtcctattctctcaaaggtgttatctttgtgtattattctaaaagtactcttttttttggtcttctaattccttttggtacgtatggcatctagcaatcattcaatcaaagatcttgaagaatagtgtgctaatgtagtgattgagagagaggatgatcaagattttgttgttgatctcctcccaagcattggtgtattgttggttgatttcttactggccgtgctattgatggaaaggtatgtatgaaggaattggagcctattcggtatctgttcacattttatcatgaatttgatatttagagcctccgagggttatcgatgtaagctcgtagatttttaatcgtatccaatttgtttaaagttaggtcaagatcttagaactatcccccttaatggtcttgatatgtggatccaagtgcatggactacaagcggggttcaagacagaacatgttctacgtagggtggataactatattggttcgtttgttgagtgtgatccaaaaaatttctaaggtatttggagggattatttacggttgtggttaccctcgaaattattgttccattaaagagaagaatgaagcttcatcaaacgagtgttgattttgtgccgtttcgggctattttaaaatatgagtttgtcccgatcttttgttttatttgtggtataatcagccactctctttgaggtcttatgtccatgattctttcattttagttacctcaaatagatatttaatggttgatttaacctgtgtaatttaaaactaacgtttgttaaacatacgaaataacagtagaacaactcaaaaataa

SEQ ID NO: 60877 - DNA, 705 bp, Cannabis sativa
agggccgcccaggaagacaataacacagatttactgccaccacaagtagatgggcatttacaaattatcattgggggccaacacatagctggagattcaggcaaagcccgggaaaggtatgcccaaaccttacagcacgagcaaaaagaagtggtcctggccgtcgaagaaaggaaatcaaaaataccacgggtaggggaacccaccataacgttcaatgaagaggatgctgtcaaggttaacttcccgcataacgatccgttggtcatggatgtacagatagccaacaaaacagtggcctgaaatatgatagataatggagcctccgcaaatatcttattcaaaaacaccgtatgaaaaaatggggctccaactcaagaattaaccacctgtcttcagcccgtatacggtttctctggctagagtgtcgcacctttagggaaaattctcctacccctcactattaggcaagcttcgaagagcataactgtaatggcacaatttttggtattggatgttgcatcaacctttaatgtcatattgggccgaccaacgttatatgacctaaaagctgttatattgatatttcattcgtgccttaagtttcaaacgaagaatggggttaggcgcctgagaggaaatcaacaagttgcacgggaatgttacaaccttactttaaccaaagctaaaaaggaagtatcctct

SEQ ID NO: 60878 - DNA, 1056 bp, Cannabis sativa
tcttcgtacagataatctcgggcccctatgttatcaatgttaatattttctgagtagagaaatattactgtctgattagatgccctctgttcagtgaaattgtacatgacaggtgactcatataggggaacaaactcgtgagcatttttttgtggaccctcatccacttaagcatgttcttatggaacatacacctaatgagccacctatccttcgtcctcatcctcatcctcattctgctcttgtttcacaatatttttcttctatttaagggatttaatttttgctcttagtttctcaattttcctatgtttttgagccacaacatcagaaagttcccttttctgggcatatcaagtagggtaccaataatactctcacacacattttttcaatatggatgacatccaaacaatgtcgaaccagtaaaattttctaataaagaggacgaaaaaagatttactttctttgaaaataagcatttattttcttattttcttgcatctttccatacttaaaatctactagttctacttcttcgagaatttgttcccctgactgtggcaaaggagccatatctgcctctttagtaccatcgaatgctttcttcttttgtctatcaggatgatctttaggcaagtaccatctatgacccatataacacatcttgtgtctatttgccaagagatgagcctatgtgtttgtgcaacaaatcagacaaccttcataactttttctggttaggcctaataaattaatttaagctagaactaatagttatcactaactctattttctgcttttttttgatgaattagagaattatattccgcaaaccaatttacatcctaagaacactacaataaaaagggagcctcaagattttaaatctatacaaatagtgtatttacatcattacaatccataaaaccaatccctatctttacaactcattttcttaggcaaaaacatgctaattcgggttttgattcaccattgcaagccctcaatcaatctaccataatcaggttgttcttcttgccactcaagcttatt

SEQ ID NO: 60879 - DNA, 810 bp, Cannabis sativa
ttaaaaaagtagtatataggtaattctcctaaaaaataatattcaaatactttattggatgcatgactgatttttatacgcgaggtgagtaactatttaaattttactttcagtactataaactatttaaattttcacaaataatctatatgacttaactacaatgttagaactctccttaaatatcaaaacagataaaaaatgtaccaaaacacttactctaaagagtgtactataaacactcttttggtttggttggttgcccttaattatacggcgcctatagcctcctatattagtacacatacacatacaacaatacaaacaaatattttgatattattagggcattgctattaggtaccagttgtgcctagtaccttctcgacatatcgcgttgcgattggttaacgatactccctaaaagatattatattaaattatatgagatctgatacttacttataccaatagcgatattgacacataagagggtgctagacaccactagtgccctttagcatttctcatataaacatttatatatatatatatgcactcaaacccaaaaaaaaaattatgtgtatattgattcattcaaccatttattcaaacttgaaaaaagtgaaagaaagaaagtaagtaaaagatggaaaagtgtgtcttcattctgcacgccttggcattggatcccgttttttcatcctcatttttcttaaagttcccattcctcacttttattgtattttaaccttcttctccacattgcatttatttatgtctatattaatgtaaagaaacacactcaaa

SEQ ID NO: 60880 - DNA, 1135 bp, Cannabis sativa
atagaaaactaaaatatagctcaccctttaaaaaaatatactctaatgatgtgctaaaaagttatgcatatttaacacataacaaatcttgtatcaaatttaacacatttatttgatacaaaagttgtgtcactataaatgtactatttttttatttatttttatgtcatttatattatttaattagtatatttatattttggttttacataataaaatttaaaattactatttactataaagtaaagttattttattattttttttttatttttgataaaaaaacattaattaaacatcagaacattatactaaaaattaatctaaatatgtatttattaaattgtttacaccatataaaaatgtgatttgaaattatttacataatgcaactgcggtttatattttttctaaattgtgttgtgtagtgaggtgtgcggttttaaattctataaaagcggtttaaactgcactgcaccaaactattacaaaaataaatattttttaaatatagttttcaaaatttatatatatataaatatatttatgcaagatttacgtgattaaaatttattaaattatttggttaaaatggtattataaataaatgttgcttaagatttatgtgtgatttattgttccgattatataaatatatgaataatatattatggaaatataaaaattagttgaattatttgttgcggatatatatatatatatatattcaattttaggaatatttgggttgaaattcttttaagatttataattgttacaactctaataaaaaaaatagtagcaaaaatatatcttacaattttatagtagtcttattttttttattgttaagtgtaaattaaactcattaagtaataaatttaaaaatacgtggctacatattatttaatatataattttaatgtgtgaaaaaaaacataaaatatataactttataagtatatgaaagtaaaaatataaaatatttaagcttcaaatatcattattactgtatataactactgtattcattattactacttgctttttacataagtgggaaaaggggtgtggtccctctcctagggtgagactgaggctgtgtctatgagtatataactacactgtattcatt

SEQ ID NO: 60881 - DNA, 1421 bp, Cannabis sativa
attagatgttaattgacatatataaattctaattcaatccacacatagttatataaattttgaaaaattatttatacaattaacattttaatgtaagaaaataataatttaaaaatctaattcatataatacaaatatattttaaaacttaatttatcaaatgtatattatattcttatgtataatttttttttacatacaatttaaaataaaattgaacatttctttttacgtacttataatttttttattcctttgaatttattgtttgttatattttatttattttaatttattgttggagacataaaacaacaataatttgttttattttattgaaaagtaatcaatttaaaataaccgatcaaattagcacttttgcggattgaattggattagatttgagttattgtgcaaattggattaaatccaaaatatgaaatccgcacttagtgcagatcaggtacaccataagaaaaatagtacaaattaaattagatgagcactcttaaaggtccatgctaagaaaacttcattaatcaaattacatcaactataataatgtttttgatacacaaatgataatcagaccaccaaacaggattattagaagccaaaagaaaatatttagttaaagtaagtgcaatcacatctaagacaatacaaaaaaaaaattacactaaaagtgaatgatacatatatcttacttattatataaatgtttatttaatacttaatgttatgtcttaaccgtttttgttgagttttaacagaattttgtgtttatttttagcaaaaagtgttaattttaacataaatgtaacatttgcatcttcttagacaatcattcacaatagagttgcatctattgatatataagcatttgtccataaaaaagaagtaactattcacaattgagataaatctattcatatttaaagagtaacaaaaccacaagaataatatgttgaccaaaacatatgaaaccgcaagcttttcagccaatatactagaaattgcatataatatatatttatttacatgataaattgtggcataaatacctaatattttaaattttatacacttcaatatttaatgtttattttttgcggcaaaaatacctaatgttacgattgtcttactaccacttcctctaactcataaatatgaatacgtgaagagcccaaatgcattacatttatttaatttattttaaaatttaatatttttaatattaaaaactaaatgctacttgtttaaaaaaaaaaaataagagagatacaatactaaattactatagttaagtgaactagtacaatatatgaaaaatgattatcgaattgaagtgccaatatcatgtaaaaattgttatgagaattgattttttttttttttgaaacaagtagcatttaatttct

SEQ ID NO: 60882 - DNA, 695 bp, Cannabis sativa
atatataaaccgttaaaaaattgtaaaagttcatactaataagtataacaaatataacaaatattaagtgcttttttattttatatgtatgaagatatgaagagataaatgaagagataaaaattattaaaaaaattattaattaaataataataaaaaaaatataattcaaatctatcatatttttttttaaatatataaatttatatttagatttgtatcatttttcaatataaattctatcatgtatttttttttttaatttgaattttatcatattttcaaattttagatttacattgttttttatgtttttttaaatttaatttttttgtaacagtgttagttctaaccattaattttaacaaaaaaataacaataaaccgttaaattaacaatttctattaaatccactccaaaaaagtaataaataatttccgtactttgtatataaagaaaagataaagatacattgcgtatgtaataaataattaatgatggacagaagagtacttgataagacacacgtgtgatagccaccacaagcaacttcttcagagtaaggaagttcagcaatcaaggagggtgtagcttcgctgttctctctgaaaccctatttaaataaattaaaggaattctagtaattaatggcaaatttatgaaccaagtcaagtaatcggatctaattgtttatt

SEQ ID NO: 60883 - DNA, 1563 bp, Cannabis sativa
tgcagcgaaaagaatcttgattttgcattcttgatcgattaccaagctctaattgtgggaaatttacaactaaagtgtagaatcaaatcaactaaaatttaatcaacaaacaaatagagatgccaagattaacaatttacacacaataatcagagattaaaaataggaaagaacaaagtattaaaactagatacgattaaaacaataaaacaataaaatcaacatcaagatatattctagttcaagtccaatagttcgatgtgatctatggctgtactctagttctgaaacaacactaaatcttctttattgattgagcaagaacaatgtacaatacagtcgaaaacgattctctgttggattctctcaaagtgtttatcttttacacccttatccaagaatcttcttcatctacataagacttttcaaacaaaattcaaaaccaatctctctatttcctctctacctctctttctacctctcaatctttctattaagatcacctctcgaaacttctctgatctcctttgtagcaaaatactaagtgttggtggtatttatagatcctaaagtcggtggctgcaagtgctaagttgttaattagttacgacttaaaaacttaacaaactcctcataacagaatctccacatcattataagataaagagcttccggaagagatatacgctttctggaagaaagaccaaagcaaaccctgaaggggcttcccggataggaaaggtgccagctggagtcgactatttgtgaattcctttcaagaggaaacaactagccattcggaactcctttatggagaaaggctagttttcctgaagactccatgacatccatcattccacgagattttttttttgatgaacaagttagacttccaggaacgccctcctgaatgacatctaacctttccatgaccagaataatttttggagatctttttatttaaatgaattataccacaaaaaggaaagtgagagtatatagtaataagctaagcacaacctaatgcggtttgggtcttcttctcacaaaaaagagattccaaattcaaatactcctccccaaatgcagcaggacgactcgttttatggattcgtgtatgcaccaatttgttttgcttgattcggataactcaagcttgctggtggccttgtgttgagtaatttggaatgctaggaatgataaagtttggtagaacaaagtgatgggggtcgaaagcattgtggcgtctgcaacaaacttccttaatcaatggcgggttgctcaaaattcgaacaatgagctactattcagtggtttcattctgggggatggggtggagcaatggtgtgttccaagcggtaatagtattaaggttaatgtcgatgcagctatgtttaatgataactctgcctatggtgttgagtttgtggcgagagattccaactgcttttttgtagagggtggtacaaagttattccatggtacgatttctcctgtggtggtcgaagcaattggggtccgggaggcgttgagttggatcaaagatcattcgtggctcagtgt

SEQ ID NO: 60884 - DNA, 1828 bp, Cannabis sativa
aatatatatatattttgactagttaaaacatatatttatacttagaagtgataaatataaacataataatagttttgacatattggttaagttatctcacacatgttatagaggttaagacttcaaattttaagtaaaaacatctttacttttaatatttagtttactttttgctttcccttcaaaaaaaaaaaaaatatgccccagtcaactttagttagttactattgtgttaaaacaaatagttgctacttgctagctttatttactaattggttgcttaaacattcacgttgtatgctactctcttcactaaattattatgaagtttagttacttcctctaataattacatagtatcaaaatcattgttccaattatctcaaatcattgatcaagttgattttaaattcattgtctttttatttagtgttcttgcattcatatcggatttcaagcactagttttattatctaatattcatttacatgttcctacaacaactttaacattggcatccatcactaccttaatcattgaatggttttgccgttctcgttccgtatcacaatccctatcatttaaagggaaatgcttttgtgaaatctcaactaaaagacggcagagtgagaacgttttcatttatgggccaagtgatacataaatgacttaatacagagtgccaagtggcattacaagaagtaaaaggaatactctaaaataacataaatcaatcccaatccaattgtatcattcccaatgctaacaaacaaatcattatcacatagagaagaaaaaaattcaagtgtgcagcaatttagattgagacttgtgcattagatatttcaacactccctgtcaaacgaaggggtgggggtcgaacaccaagtttgtcaatgagatactgaaatttggtaggtgatagtcctttggtgagacaattagccacctaatctaaggataggatgtagcgaactgtaatgaatgtctatggaagcttgaatttgagttctttcaattaggactcaatttatgtaatttgtgaggcaacatgagcaagttctatcttcggattcagtgttggatcgagaaatgatagcttgcttctttgaagaccatgacacaagagtatctccaaagtagtcacaataacaaaccacaaatcgtctatcatttgggcaacatacgctacaagaaaaccttgtgctggcaaaagtacactacatgcgccggcgaaccttttccgacgcaatactttgtcggcaaaacatgtcagcgaatcttggtcggtaaagaacgttttaccaacgcataggtgaaatgcgccagcaaaatgtcggcaaaaggtaatcgccggtgtaaaatgatacccttatccgctctgaaccttctttgatatatttttaccggcgcataaaatgttcgtgccatttctcggattggcgccaaaagttttaccagcgctataagtgcgctggcaaaaagttttgtgccaatctggaaccttttagtgttaagttttgccggcgtaataatgcgccggttttttaaaaaaaaattaattgtattatattttatattataaactaaaagttaattatattttattttatattaagaaaaaaaccatcagaatttacattaaaagataaacaaacattaattatattatgttgtactaaaattagtatatataaatactttcaaaaaaatattagtatataaacaaaacattaacgttcgaatcggataataaaaaaaattaaagttctaatttgtatataaaatatctaatgatctataggcgagtaatgtcatcgtcgttgtt

SEQ ID NO: 60885 - DNA, 657 bp, Cannabis sativa
taatgttgggattaaagttaattggagggtattttttttattttttttaccaagtatattaaaacaatatatgctatttttaagcatatattgtcaaatttccctttgattttgtctctaaattataaagtttgttagaaaattttaacagttatataattatcctttttctattaggttttgtttattttaccttttatttttttttttgaaaaaatcattatacaaataaatcaaagttagacttcatggtcattatacaataagttcgaaggtatggccttgatatctaaccaaccataccaattatgagaaaaagctcattttgccacattatgggccttaaagttacaagaccgattaatattagaaaaagcacaacccacaaaaacataagaaatgcttaaacaatgactcgagtaatttttaatctcccatctagaatccaccccgttgagagagttaatcaccaccttagaataacaaatttgcaccccttctcagctgccgccttcaaagccaaacaataagtagccacctctccacacaaagcgcctgtgaagtcaagtcttaacgtaaccacccaacacaccaaaccctagtgatctctagcgacaacagcgatacacatgtgctccaaacccactcgaacatcac

SEQ ID NO: 60886 - DNA, 818 bp, Cannabis sativa
  modified_base (613)..(613): a, c, t, g, unknown or other
aatactgtgacacgatttttttttttttttacatttttactgtatcaactttacaaaaatactgtgtttaatgtttcaaaattttaaaaatactgtgtttcagtaaaataaaataaaaagctcaaaaacaactaaaaaataactttagaacaattaaacaaacaactataaaacaacaaaaatataactacaaagcaacaaaaaaataacaaaatttgatctagttgcaataagtaaaataatatcaactccttaatatatttttgtattacacatttttttacttagttttgacaacctgatttatctttctgtactattacattattttttttttttcatggaatctgttgttgggattttattctttcaacttttttttctcttttcctatttgagttagtgatagtcaaaaaaataataaactaaaaaacaacataaaattaacaaaatacatatatacaactggaataaactgaaaatatacacgataaaaaatacacataaactaaacaaaaactgtacaaaaaaacacataaaaacaacagaaaataactataaaacaattatacacctaaacaacaacataaaaataactataaatcaacagaanaaataacaagacatcaatcttattaaaatatgtaaatcattcataaattaatcctgaataaactacaaaacatccaaaaaaaatatactacttttattaaccatgtaaaagataaaaaaaatataggaagagtgttcttattttttttttgtaagagcgtgaaagagtgttagaaaaacgaaatataaaaatatacacttattat

SEQ ID NO: 60887 - DNA, 1531 bp, Cannabis sativa
taatattccaatttttattattttatattatatatagatattaattgatgcttatgtggtgtcagtgatattgagattgttggaggtcgttataaaaaaagagacatcaaagttataacaaattagtaagtattgtaattttttatatacgttttactttatttgttttcttttttacttattattaaattcttttaattttcatgtatagttcgatcacattaaagttaactttatggggaaattttggtgagatgttcgatctaaatttatataagaaagatagtggtccatttattgtgatagtaacttctactactgttgaaaatttttgaggtaattatttatttagatttcatcattcaatatttgaatattcaataatatatatatatttatgtatattaatttttattttttattaacttctcttctacatgtgcaaccaaattctatattaatcttcaaatagattatgtagcatcattaatccaaaaaaaatccatcaactctaagagtgtaaaagttattgagagttataatgttaagaagacaactcttgaagaatatatgtttcttaataggatgtccattcaaaaattgttagaggctaattgaagtgatatccaagtaaaggttttttctttgggtattattattgctattatttaaaagtttcaacacctataattttactttatgataattgttttattgtaggaatatattgttactatgagagcaaaaattatagtcatagataatatatttgaatggtattatattttatgcaaatcttgcttgaaaaaagttgtacctaaaaataatatttattagtgtggtatttgcaaaaaagaatttgaatatcatattgtgaagtaaaaaatttatatttagttttctcaaaatgctaatttattatgttatttgtgttctctctaatttttgtttcatattttttttcctatatttttcaccctaatatataggttcaaaatacatatcaaagtcaatgacaaaactattgaaacaactttggtattatttaatgaagtatagctgaaatattactggacacatcagtaaataaactggttaacaaattatctccaaacaatgatattcctatagagattcaaaggctttgtgggagagattatgtttacaagttgaagttgattgagtacaatttgaaagaagggcttaaaaattttactgtgtcaaatttttttaacccggatgaaaaattagaacaagacatgaattaaagaatgcaaaaataacaaaaaggatcaaaaaagtacattctaaaaataatatatcaaatcatttagaagactctgatgaaaattattgtgatactcacaacaaagaaagaagaacaaaccaaataattctcgatgatgatgaaaataataatagctaagtagtattatttgttggattaaaatcctatgtgggcacatatgtataatgtatatgctattataaagtgtgatacaaaattaagtgaccaattatgttatgggta

SEQ ID NO: 60888 - DNA, 1070 bp, Cannabis sativa
ccttagtgacgcgcgttgaagtgtcatttatatagttttagagttactcaatgtgtcactaaaacccatttttctagtagtgttgtagataggtgtatgtgcacctaaatacaagtcggtaatatattatgtgttgtatgattttcttactaagtctgtcaactcacatatattgtttgcatgtgtagataaaggaaaggctaagattcagcattagtgagtccagagctcggggatgattgtacatgtcaagatggtacgacctagagagtttggtctcgggacaacttaggcttcattttgtagtctctgtgcgacatatttgtaaagtttattttgattatgaatataagttttaaaagcaagatcccgactttttgcatggttgtatgtatatgttataaaagtttaagtcaatcaaaagtttaaattatcacaatttttgagaaaaccctttgattggcaaaggtgtggactgcaagtaaaaaagtcattgtaggatgcctattcattagggcattacacttcaactccctcttcaagagctttatgcttctcatcaaccttgtccttcaaagattgctttaactatgcaatcttcttaatcttctcctcaagttcaagagttaattgatccttggaagctttcaagtcaagattctccttctcaatgagagtaatcctatctaaagttgaatctcgctcgatagcaagagtgtttttctgatcctcatgttcttgaaagagacgattgatgcgagaagactgttgtgtatgcaaattaaagctcttgtaagccattcgagaagcctgaatttcgaagaaaaagacaaaaggttagaacttctcaaggattacgtaaaaggaaaggagtaaaagatgcttaccatgtacatgaggttctcgcttctgtccattagctcagaaatattcccgtgattgagaaatccccaatcatccttttctaatccataaaaaaattagcctacctagtgaggtgctcaaagacaagttttgccccagctatgccagtagaaaaacttaagggaagactcatttttagccattgg

SEQ ID NO: 60889 - DNA, 697 bp, Cannabis sativa
attttaagtaagattttatatatatatatataattctatatttttattaacccacaaaaatattcaaactaaattattttaaatgaaactaaatattattttttataaatcaaatgagatgtcttatgaacatttttttactatttatctattagacgtgggattttattcgtaactaaaaattaatttctttcatataaaattttaaaaaattattaaaactgcgcgaagcgcggatttataccctagttattaatatttaaagttaatactattatctattctaaaaaaaaaaaagttaatactattatctaaaaacctatcatcttctctataatttattaattaataacatattatattaattaaaatcacaaattaattactagaatatcattttctcttgcctttacccattatctctatctaatcaatatatcaatatcaatatcaatatcaatatataaaagagagttttaaagcattgaggtagcattttacaatccattcactctatctattttttattttgttaaaaatttatatttttatctattttatatttatttataagaaaatgttcttggagaggcggccatgattaataatgttcttggagaggcggccagcctcagcagcaagctgaacaacaacgcaagtgtaagaaagaatccccaaaaagaaaaatgaagggaaa

SEQ ID NO: 60890 - DNA, 687 bp, Cannabis sativa
tcctccacaggagccatgagaggcattgcttggaactatagagggttggggcagacctctacagttctggagattaaagcactagttcggtcgtgctcgcctgacttcttattcatttctgaacttaaaagtgaccccgctcacttggtaagttctctaaaaaacttggacttttactttaatattattgttcctgcgattggtggtgcaggtagcctcctgttagcttccaaaggcgggttttgaatttgaaactatctgcatttctaagaaccacatctctagttttttgtactcggaccctgcgcatcatccttggtttctgtcgtgtgtttacggcccgccttacttcaatgagaagatattgttctggaggaatctgatggatcttggtctcaagtttgggggaccttggttgatccttgggggcgttaactttgtattgaagagctctgaaaggatgggatcaagggggagagatcagcttttgcctgtcatttctgatttggtcaatagttcgggattgatagatttgcctgttaaaggcaattttctcacctgggataaccatcgtgatggtgaggctcatgtcaaattggcccttaacaaggctttatccaatgctcagtggctgggcctttttctgaaggtgggtgttcattcctgccacacatgcaaattggatca

SEQ ID NO: 60891 - DNA, 745 bp, Cannabis sativa
aataaaaaattaccataaaaaacctaaacctttctctaacaaccaaataaagccacaaactaacctcaattcagctcaactaacacaattttaacctcggaataaagtctcaaacgacaagaaaaattacagaacccatctcataggaaaatcataaaacacctaacttgaaacttaagaaaaacaacatgagatgagctagaacattaccttgagtttgaaatcactaaagctttctagaaatccttgaattaagcagaaaaattccccaaccctagcttgttctagggagcttgagagagtttatcttttcttgatttttcttacttttagataaaaaggaataaatctaatggttttctaatttaattaaaacaattttcatattattaaaacttaagtaaagctcactaaagaacaagaatcaaatggccaaaaagacaattttacccctcactaaattcaaaaagcttctaagtcacataggggtattttggtcaattcaaaatctcgattaatctcgacattcccaaggtctaactatattgccccgctactaccaaataccaaaatatgattctattggccaaacgccgcattccaatattgtcaggcataaaacatgcaaaaacataaaatttcatgtatgtcataaataatacatcatgaattcaaataaatctccataaaatgataaatcataattttattctagttttgttgatttctcttttagccaacgaca

SEQ ID NO: 60892 - DNA, 1150 bp, Cannabis sativa
tactgctaagttctcaaagtgcctacaaatactgaatgtttccagcatcaacaacaactaagtgtctcaagattttttcccaaatatatattacaggtcaaggtggagaattgttgtattttgtgtgtcctgtaatatagttagttaagttggattaatgtcataactgtcatgatagttatgacagttggttacagttagccttttgtccacttaggactattataaatactatgtacatgtacaggttgtaattcaagttaagtttttagtgcatagacttgtatgattctattagttcaataacaataaagatcaaatcattctactctctcgagtctccatttctttttctctcgattactgttttgtgactgtgtgcatatgttctaatgtcccttatggaattttggtatgaatattgatctaacctggttgtttccaacaataataatttgagaaatttaaagatcttatgtttttatttattgaattttattttacatttttactcattttttcagaaaaagaaaaatattattttcgtgttgcttttccaataacttcaaaaaaaatatcaacaatgtcaaaacaaccatttttcaaaaacaacactctatacttttataaaaataaaataaaatttgtaaaaaaaaaaaaaaaaaactgctaaagtccataaaaatgtaaaagttttactatttttgtatgtttatgaaataatccattttttttattgtatttatacgatcactaaacatttttctcattaatatataatttgaagtttaaattttaactttaccaaaaaagtttaaattttaaaaatatagtttgctgttaaattatagaatgattttctttagcaaaaaaaccctaaactccattccaaagagtaaaaactctcaaaaacgaagactagttggatgtcattaaagattcatggcatcagattgtattgttgaatacaatttgaatgatttgaccacaaaatgtaataagattatgaacaacaatattaactgtcctaaaataataaaaaaaaatggcatttaaaaaaaggttaattagcaattttttcctcgaactttgacaaatactaaattatgccccttgaattttttgaccgttaaaaattacccctaaacta

SEQ ID NO: 60893 - DNA, 688 bp, Cannabis sativa
tttatttttaaattgaaataaataataaatactatacataacaatcttaactgaaaataacgaccgccggcacttaattttaattggaaaaaaattaaaatttctgttcttaaatttataattattgaatattgcttttttttttgggcaaagcccgctagttttctctcggcttaaatacggcttgtcggggttgtgtttttctactgcaatttaatttttattaatgtgattagttttgtctttatattatgatttttcagtgttttagttctgtttatgtaacatagttttgttttatttggtgttagtttttttttgtttttcgatggcttgtcattgaattattgttagtagttatgaataataagttcactacgattgaagagattgttcgtagtgcagttacatacttaatccaatagctgagtgttaaagctacaaggttgaatgaatttgttgcaaatgtttctattgttgtatcttctaaacgttgaatgaatagaatataaatgtttaaaagttaattgtgatattgcaatcttttttatttgattttattttaattttttttttcaaacgatttgagaattaggagattaattatttgactcatttttctaattataatcatgactgtatttccaataaaaaaaatatgattattgaattgcaagttattatttta

SEQ ID NO: 60894 - DNA, 821 bp, Cannabis sativa
tatttattacgttatttttcaaaatcttaattttgatttaccatataggagttaaaaatggagcggagaaatacctctaaattttgatagaagtgagagatagaagacatgcctcgagcgaagaggttagaacatctttaatgggagttgcctatagaattatttttggcacatacgcaatgtggttattattttctcattgtctatatttagaaacacccatgtggcattattttatctttttttttaaaaaattattttatggtattattttatagtatttaataaaatttaatcatttaaatagtgtcacgtgggctagtgggcaatttttaaagttgttaattattgaagtgatttttatatgaaaaattgttaaattttatgtaaatgaaaagtaaaataataaaaaaaaaaaaattaagataatatgtacattttttacaactattgctctccttgaagatgatcttagatataacttcactagggcttttggtagaagagagaatgggtcgcatggtgtgagttggtgtagctgattggaattaaatataactcacgtgatgatgagcgttatgagttatgaattgatttaagtcttctcatgcttttagtgaaaatggttgaaattgaagttgattggagtgagaaggtttggactttggagattccgttaggtttagacattcatttgggctttcactcctcattttcaattttactaatttgtgcaccaaattttaaaaataacacaaaatagaggttaagttaaataatttttgtatttaaactaaagagaatacataattggctaatta

SEQ ID NO: 60895 - DNA, 822 bp, Cannabis sativa
ggtaaaattaattccaacagtacgttcatttgattttgccattttcagaggttctagagcaaatgctgatgtctcgtttttttaccttattaatgtaccttttctgcgcactgtgttgtttcctgcgaggtgcgaccctccaaaaataactaaaatatgctcgccctctactgggggaggttgtatccttagattatttgggttattggactgattatgttcgtttcattgtgtcctcacatactgtcttgaatatcctcacgagattaggttctcgatttcatttttcaacggacaacaatcttcagttgtatacccaatgtctctatggatacgacaatacttacttgtatctcgcttattcctcgcatgtctcattgggtctggtctgcgaaatgcaacccgattttcattggtgaggtagatatttttccgagtcacatttaattcagtattcactgaataaataggaacatactttttatgtttcttttgcttttttttatccttggatgagtctcttgattcatcattccttttagtattcgaaccatttagattttccactttagtagtcacaatgctcactgttgctatactagtgctaggtttatatcccgagttggactttaacagattgatttcattctgtgcctcttcttttcacacaaaaatctgtgctctttcgttgaactcgttgatatttcttacaggatgtccttgcaaataatcccataattctccccttgtagttgacaagtcagttataattctagcctaaagggctgttaatcgaatgttgtcattcaagtttctaacttt

SEQ ID NO: 60896 - DNA, 2394 bp, Cannabis sativa
aaataacttacaagtttattatacaaatagtgtcaatatatattcattatttgaaattattgattatgatcaatttattaacaaaataaacatttcaatttaactgaaaaaactttcctatgaaaataaattttcaccaatgaatatatggtatgtttaaatataattaatttattttaaacatattttgtaaaagagttaattaatgtatacaatataataattttctcatttattaataatttaatcatactctttgccaaaaaaatttagcgataactcatattattatgattagaattatgtttagttaagaatatttaattttaattacaaatttgtccaaagtaattttaattacaagtttggtagtaactaaaactaagaaattaaaattaatattatcacatataaattgaaaaaaaatgaaaaattagtttaatattttaatatcccaccagcctgaatacaaaacgcacctacacactaacaaaacaatatgaattattttatttgaagaagaaatatttctactcagacatcttcgaaattataacactagtattaaattgtatgattataaccacattaattatttttgaaaagaaatattgaaaaatgagtaatttatttttaggtaaataccattttgatattgtgttttaaaaaagttatcgattgaaccttctattttattaaatgataaaatgtaccatgtagtttccaaaatgataaaaatataaccttaagctcaattttcgacaatatttttaatataactcacttgaagacaattcttagcacgaacagatgcaaaaatatatataatcagttttatcataacacctatagatcaggttattattaaattttattttaataaaatatcaattctgagtcttatttgtaccatttaaaaaatacagagtccattttatgatttaataaaacaaacggttcaatcaagaacttttgcagaatacatggtctaaaatagtatttactctttattcttttagtaatttattttttttggtacaaatattaatttggaaaagaaaaattaacattttttgctagatcataaagttatatttggaaattggattttagtgagaaaagaaaaaactaaagaaaatataggaaaaaaattgtggagaataaaaaaaataaattattttttcaagtttgaaatggattatttttttagtaaattgaaatggaaaattttgttggattgaatatttttctatacaatttttcttccataccaaatatgatcattttttttttattttctatttttttatctttataattttccaacttttttcttttctcactaaaattaaactttccaacatagcctcctaaatgatgatcataaggagttgatatatatatatatatttatatttatttatatatataaatatatatatggcccaacaataaataattttagtaactgttaaaaaagcaagatacaaaacagtactgatacagtattaattaatttagttatcaaaggctcatttggtatgccatattaaatagtattattgtattgtattatattaaattaattcatatatcatacttttttatataatattatattaaattttaatttatattaaaattatgtatatttaggtactcataaaaattagtatatcacatatagttttatataaaaaatattgcataaaatataatttaatataatattatccagcaaaaaaactgtataatatgatgtacaaaataaatcctaaaatatatatataaatatacttataaaccaaccacaaaaatgaaaagaaaaaaaatataattcatcttcaaaaatgtaaatatcatcatataagcgaattgattatcatattttaggtgatatttttaataaattcttaaaagggtcggtacacttatttatttaatatttagtagaatttgttagtgttattttctttatgattatgtatgttatagttttttagaactacatgtaaatttttataaaattttaaataatttacaatgactaaaataaagttgaaatattttggataaacagttatttgaattttatttttaatactgtaaattttttaaaaattttaaacaatttacaaaataattctaaataaatttaaagtacatacacaatcattaaaataattggattgaagaccaaaatggccttcgggtggtacgatataaattttttggactagctatataacaatttgaattatatcctgaataataaagctttaattagcttccacgccatcttgaataaggaaacaagaaacactactgttgcttaaacttatcatcaaacctttttagataattatctaccaaaacaagaaaaatgagttgaaa

SEQ ID NO: 60897 - DNA, 913 bp, Cannabis sativa
cattaatatttgtttcacctattacttagttatatatttttcataaaatacttcacctttctcatttacaatatgtaagacattttttttctaatgtatatatagaacaattttttatagcgacgtaggacaagagctcatgggtggggtcaacttcctttcctcaccatcatctctgttaacacagttgacatcgatcttgcaagaacttcgagcttctcttctcagatctccttagaaatgatgaaagaaaatcaattatttaaagaaactgtattgtatttattagaattggttagctatattagttagttagttgttaggagcttaagtcacttagttaattagttaattagttaagttagttaagttcttttcctaattaactttatctcacctactgcttatataaactcctctgcctaatgtattcgatacacaatatattttgagtaatagagattgttttcttcatcttttgctctgttatttctctgttatatatggtatcagaagtatttttatccattgcttccatgccaagaccttcaactcgctcccgagatggtgctcctccatctatggccgatactacagtagcagacatcacctctgaacatcctgcttctcctaatcttaactccttatagccattcctcgtagaaatcacaccaggcctccatcaaagaacacctcgaatcttgaacttcaagatcaatctaccattatcgacgatcaatgccacattgctcctctagctaatcgtcctttcaatgatgataactctagtctattctttcttagcactggtgaccatcccagacttgtgctggtgtctaccgtcctcaatggcagtaactaccaatcttggaagagaggaatcaccatggcattagtggccaagaacaagatt

SEQ ID NO: 60898 - DNA, 533 bp, Cannabis sativa
gggtgttacccacataaaaaatcatgtttaaactcttaaaaattgtcgcgaattgccctcgtgagtgctctaaaccgtcgaaaatactcaatttttcccgataatttaaaacactcatttaattttattagcaacgtttctccaaaaaaaaaaaatattttgaggactaataggaattctcaattttgtagtagtgtgtgctccagggtaccttaggaagttagcatgaaagagacaatactagaaatggtttgttcaattcctcacttctatatcgttctttcaagtataaaaatgattttatttatttttttataaaacacatgacaccaaatggatatttattgttattcataaaaaagacaagagatgtaagagcacaaaaaattggtgaccacgtggaataaaaatacaatcagattaaaaaaaaaagtataatttacggtataaatacttaaatttaattttcggttgtaaataaatatttaagtttaattttttatggtaataatacttaagttatatttatagaa

SEQ ID NO: 60899 - DNA, 594 bp, Cannabis sativa
aagaagaaatgataaaaagtcaaaaaaagagacatggaaagttctttttagattgaaggttgtcatttaattatttgaatgacttatttgtgaagttgatctctaaactagtcaacgggaaaatattagattagattgtatgactttgattgaattatgttgaaggtaattttatgtttgacttatagatggaatttatttattttttaaaaaaagttagaattttaattaaaataaaaatttataataatatttaataaataataaaaaataaattaaaaaataaaaaacaataatatcattttttttaaaaaaaaagctagccccaaaatggagaatcgacatgtatacaatatttttttttttattttttttcccttttacgttttttttttatgtatatatatattttttatttttatacaaattatttttcttttgaggttatgctgtttctatttcgaagttatgttgttttcattttaaggttatattatttctaattttataagagtttaaataaaaaagctctaaaaaattttatatttttataagtaatatatcatatataataaaatatatatgataaatata

SEQ ID NO: 60900 - DNA, 667 bp, Cannabis sativa
gtttcccttttcagataagatattttgtgcagagcagtaaatgagaaactaggattgacttccgaatatacactgagaacatcttccagctacacggaattaacattcttctgtatgctgagcattaacgtaagctcatttggcgaggcgtgcagttgttcttttggagggctagataacaattggactcggccaagtttatgtaattttgggcccacttatgagctttaaacttctaataagaatccacgtgtcccttgccagaaacacggataacatttacgccccaagcttctcgaatgttgtggactgcagagtcttgcttcagtctatagatgtggacaggtggaggctaaaagtgaaagctttataaattctaatactttctatgaatgggaaacatctttcaatttttcgaacttaaagtcttgtgtggcgttatcttaatagctggcgaagcatctattcgcttgacaaagcgtgtatagcaaagcaattgaatgtggcaactgtttactttagtgcgattctcgaggacaatatcatcattttatttacctttgttctagctacaggattaaatgcctaatggatgggcttctatgacattggatctgttatgtgtttttggaatatgaaattgggtcgttgatcctagcttcacgta

SEQ ID NO: 60901 - DNA, 894 bp, Cannabis sativa
aaataaataagtatagcttgaaatattaggatcattatttatattacattagatctgaaaagttattttacttcgtgattaagatacactttcagtgttgccctttatttgagcatataatcttacactaaaaatataattatttttacgcttggatgaacttgtctgtatcaatgacttataatatataaatgggtaaataacttgctaaaatccttcttgggactaaactcaaaactaaaacatgtcaagatagtgtgacttggagagttcagtctcgggacgacttggacttcattttgttcttgctgtgcgacatgttgcaaagtttattttgaaaaaaaaaaagtataagatttaaaagcgggatcctaactttttgtttggatatgtatatatttataaagtaacgttagatcaaaagtttaaatttgtcacggttttcaagaaaactatgtgattagcaaagacgtgcactgtaattagaaaatcattatagtgtgcctaaatattagggcattacactagagctaaaaatagacaatcccttcctacactgatagtaggcatggtgaactctctctatgggtggggcgagtaccgtggcaattgaatgcattgtaaatgtaaactaggattgaaccccgagcttgagggaggaaagttgggaaaagtagccactctcttcgctcaagccatggcttgaagaatcttcaagctttacccagaaaacccattagaccattccttctcgaaatttcttcagatgcacttttgcaagacctgttagtacttcgacgtcggtctatactctggcgctgcgcaagtagaacccaaatagagataacaggaaaagagaaagaaagagaacaaatttctaccttcttttctttt

SEQ ID NO: 60902 - DNA, 976 bp, Cannabis sativa
aatcatatggaacactacactctcttttttataatttcatagtaaatgatatgaagatcaaaaaaaaaaaaaaagaaagatgtttataataaatcgaacgaaaatgcatgcacttcatcaaaactacaataatgaaaataaaactaagattgcatatttgaaatctcacaattttgttgaaagctcaagaaactctcttatccataattgatggctcacacactcaataaaaaaatacatatgcctaaacctcaaaataaagaacagtgtctggtttattaaaaaaattaaataaaataaagaaggtgactaagcctaaagaaaaaatggtttagaaagaagagtgtaagttagggttatatactttatttgggatttgagatttgagatttaaggtttgatatatacgattaagagagggtgatgcatgattttatatatttttaactaattattattattaataatatttttaaaaaatttgaattgtatatgaatatttttttaattaattaataaattaatatttataaacttaataaaaatattaaaaaataagagaattaagaagaaaatatatagaggtatttgaagagattatagagtgtcatgtcaccgtataatattttagctttatatatattgatacttaaagttactctttttgactaagatgcttttagatattttacatataatttataagatgtttttacggtgcacctcgatgtaccgatatactcttttcgtgttttcgatatcttgaatagttataatttactttttatataatcatgtatattacaattatttaagacattttgtaaaattttaataacttcaaaataatttacaatgtatacaaaaagtagggttcaatcaatttttttgtttattttaggctagtataaaataaacaagtcacacacgtgcaataggctatgtgaatctgaatttttgtacgttaaattatttt

SEQ ID NO: 60903 - DNA, 621 bp, Cannabis sativa
tgtgttctttgtagtcagaagatcagttggaactccccatgcccgaccccatataggaaagctagtcaaatcattcttccaagattcattagaattctccattttccccaaaattagcaccccattagataaataccatggcattttagataatattcttctttgaattgactcaaagaaaatgtaaaagataagaaaagacctgaatcaatcttctctttgatcttgatattccattcaccatccttcaatcgccatatccctcccagcaccttcttgaggaaacccctactgtgatcagagttcgtacagagtcgaccccgtaggttgtatcgtgcgatcgtaattgataagcttttgtccacttcccattcttcatcttcatccgtgacctgaagattatgagttttctttagaatttcatccattgcagagcttatcaccttaatcccagagaaagggaacccttcgaacacgagggaagaagacagggacaaggctgagccgaaccctagcagagcgggaccaactatactctaattattttttcatgtcgtaaattgggtaatatatatgaccaatattattaagtatgtattagggaaatttttttaagatttt

SEQ ID NO: 60904 - DNA, 1206 bp, Cannabis sativa
taaactcacaccacactacattatgggtgtgtgagactgaggagagagagagagagagagtgtgagataggagtataaggacaaagagaggaaatgaaaaatcaattcataatttctctctcctttttaccgcatatcttagcttattagtttcttgcttgtttatattaatatacatcatatatataatgttataaataaagtctttaattaattctttaaaataaaaaaatatctaatttaacttaaatttaaggaaatttgcagcaaaagtttcccaaaagttcactttgatactgtaactaattagttatatcaagatgtatacaaataagtttttagagagtaaccaaaatgtatctcaaattatatgatataaaaataaaatttttttatgtaaaggtaattaattggtttcttatcaatattattagtaactaaaaagttacttttaaaagtataaaaaataaaaaaaaattgaaaaataaaacataaaaaatataaaaaaaaatataagatttagctaacgtggcacgtcagcaataatatatagtaacgttgttattaatattgttaattagacacaaaaactagaggtattcacggtgcgggttgtagccatttttttaaaccaaaccacaaatgcattttttataattttccaaaccgcaaccgcactgcgagatcttaaaaccgcaaaaatcacactacgaaaatacggtgtggtatggtgcagtttgagcagtctatactatcataattatcaaacattataatgaaaattttaaaatcaaactaataaagttttaataatacaaaacaaaaaatcttattaaatttttaacacgtacaataattatcaagttattatattaaattatttctaaaaaataaagtaatatacatatatatatataatatatgtgagttcttatatgaaaaataaaataaaaaatatatcgtaaaaattggtgattttttaatatatagtgcagtgcggtttgaactgtaattattaaatttaaaatcacgaaccgcattgtaccgcgtgatttggcaaaaatacaaactgcaactgcaccgcaaaagatttcaaactgcaatttttatgcggtgcgagcaatttatacaatttgaacaatttgatgaacactcctaataaaaactatatattagtgtaaccttcccttttattgtactcttggt

SEQ ID NO: 60905 - DNA, 2968 bp, Cannabis sativa
  modified_base (1419)..(1420): a, c, t, g, unknown or other
  modified_base (1584)..(1586): a, c, t, g, unknown or other
taattttttattatgactaaaaatcacatttaattacaaaaaatttttgttgtgacttaaaaatgatcactaaaggtagttatttttggtagtgaattaccatacatagataatgaaaatacaaagaagagaataatgttgcctatagaccaattcataggggtttgcatttaaatactcatttattttcccataaactcttaattttgagaaaatttaaaaaaatatgggataatatatataagcctgaacacattgagaatcatcaataaagctcaacaaaattcatgtaaacgccaaaagcaatagtgttgagacgtatgcaccaaaaataatcataaatatcaaaccactataacaaaattagtaaaattaattgaaggcaaaattgaatgaaggaattttaggattaactaacattcttttcacattggaataaatgaatgccaacctcaattaattagaaggataaaaaaatcttcaaattagttatataaactagtaaaaatgtaaaattgtataaatgaagttcagggttaactaattttcttttcatattggaataacactgtatatcatcaagatgcataatggagtttcttacctgcgtgtgttgctcgacttccattttattggtttgctcttgaatttttgcatgtttatggtatcgttcgataatattctgcatactaaaacatattataaacaaaaagttgtgatcagtacttaatttaatttatatatatagatgtaattcttactgggcaaagcaacttaagacgtaccgtatagaaattgtctacataaatacataaaaacagaattaaattccaccaagtttaaagatgaaaaatcagaattgtttcgtctctcgatatgtatgctatatatgacattggggtttttattaggatacagatgatggcagaattaaagtttagactaattggttttggttcagcgcaataaaattgaacagaatgtaaaaaaaagaatcaactttcatgatatttttttgtttaattgtattataaatgtactaaattaattttaatggaatagatttcccaccattctagtgactattttattttaaaatgaaaaataaataattcaaatataaaataaaaaactagtaaatctttttatcaatttttctcatgtatatcaatttttattcaattttattcttattctaattcccgttcctacgtttcatttataggatcatattcttgtatttggtgatgtattcttaagagtcttaagaataatattgaatgtagaatagcatattataggtactaaggatggcttctaataaaaaccaatgattaattagagaaagagtgtaacaatgttaacgtattgagatattgtaacattatctatcactacaaaaaaaatttacttttagtnncaacaaaacttgtgattaaaagtgaaaaagttgtgactaattataaattattgttcttatgttgtgattaaaaggtccgtggcaaaaagtattagtctcaaaaattagaatttgttgtgactaaacgtatttttaatcataatacttgttgtgactaaaattannntagtgacaacttgtatctaaagactatgttttagtcacaagtaacattgtgttgtgactaaaaggagtcccatttagtcacaaaaaaaattatattgtgactaaaaaattttcactaaaagtagtaattttttgtagtgtatatataaattattaaagatgaaacttgctgaacaaaagttataaaatattttctttcaaaaaaaaaaaatatttaacctggcaggcataggattcgtataatcactttaaaactaataattaatttaaaaaataatagcaaccaataaccatatgataaaaacatgacatgagatgaaaactgttgaactcctaaggagatttgagttagattgtcacaaaaatagctagatctatctctcaataaagtgaatcaatgggatcaaagtgttcgtaaaatttatataggaataaagtgtttccagttggaaactatgtgaaacatatcaagttcatcaaaagtcgttattccttataattacaatggtttgagatatacacatataaatacataaatgtttcggtgctgagctgcacaaatgtccaagtggcattcggcccacgatatagaaatgtagtgaaaatagttttctgagatattataagaaattaattgagttcaacagttcttgtgcagctacaagatcgactacaataatgattgaattgttgactctaattgctcaaattatatgattgaggagacgaagagaagctacaaaacgttatcgagtacaaaagtggtcgtatagcggtgacaaccaacaattcaagattaccgatcgctcaaatcagtaaaataacaatcacgctgagattcaatccaataaaagtttcactccaggatgtctaccatgtactaggatgaagaaaaactatcaatggcgcaacttacaacatcaagccaccatgttatttttggtcctcaagatgtcaagatcttgaaatctttggaacacagatgatggaaggacgacatttagagtctgtctatgtaatgttagcagaatcagcttatgtaggcaagactcgaaaaaaatgaaacaatagatttgtggcatgcaagataaggacatgtcagctatcataaactcaaggtgatgattaagaagactatgctgaatggtcttcctaaactcgaggtcagaacagagaccatatatgctggctgccaatacaatattaaggcgcatcaattatcctatgaagattcaaagttcaaagcgaaagcaccattgaaactggtccattctgatgtgttagggtgagccaagcaaccatcaatcagggacatgcaatacatggttacattcatcgacaacttctcaaggtacgtatgggtttcctttatgaaagagaagt

SEQ ID NO: 60906 - DNA, 782 bp, Cannabis sativa
tgagtttcttgctaagtgtgattcttcctcagctcctcctctgcttcactatgatcaatccctaggagccaaaattcggattacatccaatcctttttatattgcctgctcccgcacccgactgcagcctcatatagccaatcccgcttctttggctccacatcctccctaccggtttcaccaagcccccgttatcattgaaggccctttcaatgagcctacctcagcctatggagtacaacatctcagccagccacaaactacactaatgggattacacactaatctctcttcaccccatttcaatctcaatcattccccccccactaccactatttggccggctcaccaaactgttgctgctacagcaaccattccttcacaagctaactcccctgctatctcaccaaataacactgctccacctaacctaccgccatttccacccatcaccattgctgaacaacttgcaacaccacttcctaggcccatttccacttctcccgaggctcttgtggccaccactagggcccctcaacatgtggtgccggtctcccaagctttttctaccatattagcggacctgaacccatctcagccacttcgcttcgctgtgggctcttctaccaacccagctccaagttcctcaagggctaggaagttcaaggctcagcgtcctgattgcctgaacgctgctgaatttcgaagaatgctcaaacgcacacgcaatctagccaagtcccttaaggaagagactgttgaagaggcggctgacgctcagc

SEQ ID NO: 60907 - DNA, 1494 bp, Cannabis sativa
taattgattgctaatttaataatcttttaaaaatacgtatttttttaatcactttacgagactgaatatggttccaggagcaaattaaaatcctaaataacgaatgaaaaaatatatccgtaagtgatagtacgtacgaaatataaagagaattctaatatattatataatacattgttaattttaataaatatgtagtaccatgcaatgcatcttaacgtaatataaatatataattgtagatatacccataacataaatatatactcgttaccgtgaacttggattatttagcaaaaataaaaaccgaaggtacagaaaaatcctaaaagtgaaagaccatgcatgcgaaaccaatggctttaaaaaattcaatgtgatacagatacaatacagatctgtactgcatacattttaacattgaaagcgtagccataatgagtgtgagacagatcaaaagctaaatagattagaagaagtagcagagaaaaccagggactagggaacagtgtagtgtgtagtatagctgcatagggtagtacgaattggctctaaaaagaaagcatgaccaatattgatatatatatataaaaccctgttttcacctgcttatgtcagcaacgagggacagaggaatagggaaaagatgggcagtgttataggtagttgtaagaagcatgtcagtagtccacgctatgtagataacaaacaaatatataaaagataaatactaaacggcactggtgatagtgatagcaattttctatgtgttaatatcgctattagttcaactaaatattgaatctcatataatttaataccataacttttagagaatatcgctagtcaaacacaacgcaacatgtcgaacatgtcaagaagatgttaagtaccactggtaccttatagcaatgctccatataaatatgaatgtactaaaactatatatatctttccagctgctttatcatttgatcacgtatttattacaacacagaacacagtaaattaagtttggtagggatgacattaagacgttttttaaaaaaaaaaaaaaaaaagacactaagacgttgatccgaaccctaaagtttctagaccaacgacttttcttctttatattttaaaatatatcgaatttttacaaaccatgcattactcaacttcttcaaattaattaaatattattctattctaaaatattatttcttattataataatatttttttacatatcttgataataataataatatcttctcctaagtcaattagttatatcgaataataataattaaaatttatagaacctaaaataaaaaaaaatcggattctctatatggtaattataacatatgaaaaataatatgtacattatatatttaacattaaaatgacagagctaggggtgccgtacgtggcccctccaaattttttattttatttaaaataacatgtaaaagaaatcaaaaataaaaataaataaatttttta

SEQ ID NO: 60908 - DNA, 2291 bp, Cannabis sativa
agaagggaatttggattggagaaaccccgcaaggcttgtttggcaagcatggcctgattatgggaaataagggatctgaaacctagaccgccaaagaatttcgaagagcaaagaactcgccaatttttccagtgtattttagatcctttccccattgatccccaccaaaattgagccattagtctttcaattttgtgacagattgaggccgggagtttgaaacaagacattgtgtaagagggaatggcctgtatgatagcttttaagagcacttccttaccagctttggagaacaacttgctattccagatagagagttgggaactaactttctgaagaaggaaatcaaaattagatttctttgaacgcccaaaacattgagggactccaagatacttactgatgaaaggcctcggttcaagtcctaaggaatcaaaaaaataagtagaaatattcgtaggagtattgggcgaaaaaagaatggaagatttagtgtagttcactttttgaccagtggctaagtgataagctttaagggcctccttaagggcattacaagatgagggggacgctaccgtgaacagaagagtgtcatctacgaaaagcaaatgagaaataggaggggcattgcgagccactgagatgcccttgaaagacccattcagttcctgaagacgaagagcagcagtaaggccttctgagcagagaaggaaaagatatggcgataagggatccccttgccgaataccacgagaaggatgtatggagcttttgatgtgaccattaatactaaaacggattttagcagaggatatgcattgatggatcaaactaatgaattttataggaaacttaaacttattaagaatggccaaaaggaaatcccactccactcgatcaaacgccttttccatatctagtttgaggcccacccagccaaacttgccatgtttgcgatggtttatagcatggacaacttcctgagcaataaaaatattgtcaaagataatccactcagacaaaaaggcactttggaaaggggaaataaggcttcccagaacactcttaaggcggttggaaagccttttagagatgattttatagatcgttgagcagaggctgataggacgaaagtccttcaaagaagaggcattggatttcttagggatcaggacaatgagagtctcattgacagaggaaaaatcagccacatgattaagagtgtcgagaatcacagctgtgagatcagtccccataatatgctagttcttttgataaaaggttggattaagtccatcaatcccaggagccttatcactcgaaagttggaataaggcttgcctgacttcatgagcttcaaaaggtgagttaagaaactgaatttgttgactgtccaaagatttattaatggcagaaaggaggtactgagtagcttcgctattagactcctgagacttaaaaagatcattgaaataggaagacacctccctagagatatcatcaacagaagtgaccactcttccatcatcacatttaagctttcgaataaaattagtctttctcctagcagtagctttactgtgaaagtacttagtatttttatcaccagcctgcagccaatgaattttagaacgctgcttccagagaatctcatttttataaagaagggagtccagctgagattgcaaggcagatgcctcatgaatcttatctctggaaaggggcaggttggaatgaatggcattaatagaattttctaaagcattaattctacgagaaagactgttaaaaccagcattccagcttttgatatcatccacacacatttgctgcttaagaaggaaagtgttgagggttaagggagtgtgactagaagggcaacgcttccaactatccttaacagtttcgtaaaaagacggttccgtgagccaaaagttttcgaacaagaatcttttatgtctcagatacatcatactagcatcattaagagttatcttgatagctctatgatccgagccataaaaaccaagatgaaaaagagtggtgttggggaaggtatgctgccatttgtgattaactacaccccaatcaagcctctcacagacactaccatgtttccaagtatacttggaaccaatcggattaagaggcaaaagggaaaatttgctaacaaaattttggaaatgagtcatagcataagaagggggattagagctactagacctgtcgtttaaagataagtaatcattaaagtctcctatgatcagccaaggaagtaaaggagcattatc

SEQ ID NO: 60909 - DNA, 915 bp, Cannabis sativa
ccaactccgctccgtacttactcgtgttggtagggccattattgtacttcaaggagtcactaagtgttgtatcacatgcacaacgtaccctctggtgctcgtgttggtaacactgtaactatcctgaaattctatgttgtactaacaccttataactatacatttaatagtgctagtagtgtaaatagataataacaaatattcattcacatatatatactttatgctatcttacctcgtttccgtgctcaggtgtgccggtcagcctgagtggaattacagctcggcgtttcataggaccctaaatcacaacatttgtaattctggtgagggacacgctaaaatattttttgaggacttaaaatcaaaactaagaataaccctatcgatgaataggatggtaataccgccaaatagcacaaaaatgggaaaaactagggttctaaaaaatggtccaaccagcaaactggttcccaactggaagtccagttccctggggatcaaccgatcgaccggttgctacaggtccccttgaactggtcgatcggttcagttctgggaacctcaaaatgtccccatgacctcaaattacacccaaacttcataatattctccagaatacctatatatattcaaaccaacctattctaaacaataaaccacaatattgaccacaaaatttcaatctataattaaagagcaaggtttgaattcttgaactcaaaccttgcctaagtgccactacaaaccacgaacgtagcataattcaacttaaattaactcaagttaacttcagaatataactttaagcaccaaacatcaccacaattccaaaactcaagaattcaagcttaaaaaccttactaccacaaagtaaaacacatagaagagaagcaagagatgctaccttagatt

SEQ ID NO: 60910 - DNA, 1985 bp, Cannabis sativa
tttacagattagattagattaaatcgtgcagattgtattgaattaagtattttataaacaccccctaaataactacaactattcatcttgtaaaacattattttattattttataattcaatctctatcttcctatattaaataatataattcaataaaaaaatatggtgtagaaaaaaaaatagtgcatgtaatataaatgtgtaaggttaaattaagaaaaaaataataataataaagttttagtagtatattttaaagaatagagtaaagaatcttataagaatttgttatccatgattctgaacaagtgaaataggacataaaaagggaagataatctcataatctcactaattacaaccccctcaataaataaaaggaagattatatggttgttgttgattgttgctttacattgtatgtgaatttgtatttcttgcttgagtctttgtaactcaagggtgctttgcggtgcacataagaaaaaaaagaaagtaaatcagccatgaattagagattttctaacgaatgtacatattagttcccccgacatattgtgcttaattaacatgaccatggttttgcaatattttggctaagtataaatattttgtaataaaataatacaatggtacttttgtaagagtttataaaaggggatccccgagctttataaattttaaaagttaataaattataatttcaaaattatttaataaaagtttaattaaatcacaatttctttcctaaattgttagtttatcataatgaactaatttataaaagcacacacgacgtgcatttacaggttagggcattatattgacattctccttctcaaaattaatggcacacatacaaatgtcactatcaatagtgtgtcacttacacgcttactcatgaactgggcctcacctactcgaccaagtgactaatattaaattgtatttactctatcagtggacttaaagcaccaacaaaaacttttttaggtccagattcgcccgaccaattagccaaaaaagcctattactatgtcccttcatgcaaaggattaacaattttatgtgtaaaaaatcagttaatactccacaagcaaagagcttaataatattgatttgtggattaaggctcgatgccccaaccatgtaaaaatctttagctcctcaatcttcttttgattcgattttcgaaaatctcgataaacaagattcaaaaacttgtgtggagtagatgctcaaggattaatgcctgaagatattttgatctaacttttcatacaaagtatatgtcaatttagcattttatttggcacttcaaatcaatcatatatgcttcatacttttacatataattaatcttagagcactctcaatggctcatttaaaataaagatttttaaaatttttaaagaacaatgggacaaaaatatcttccaacaaatgatgtaaactcctctcttttaaagcatctctattttattaaatacttttctacacgtagagaatcactattcatcatttaaacatattttgataatatttcaactatattatatttctttatattatatatattaaaaaatatattatttaaatgatacgaagaaaatatagaaaacaataacaatttataaagttagatttagtagtgaaaatgttaaatctaatagttacaatttagatataagaaaatatctatttctaatttattcttagtaagtgaaataaagatattttactaccttctataactttgagaatttgtatcatatatgctatactttaaaatgatgtaaaacaaaaaggtggtattttagtgatatattttaaagaataaagtgaaaaaatgttaagagtattcttaaagttggtacttgttaatttatttctcgagggcaatgaaatgaccaacacattagcaaaagttagtattaaagatgattatgagaaccattctgttgatgtaatgatgaattataat

SEQ ID NO: 60911 - DNA, 783 bp, Cannabis sativa
tttttttccgtaatatattatctttatatcatgatttaaatttgttgtcaccgcacgtcacttgtagttgccactaccacaataaataaatcaaataatgagttaactatgtatttttagacataatctaaattattcaatcataaaaataatagaatcaataaatcaattgaaaactttattatgtaatatttataaatattattactacttaatttgttctgactcttaattaagatgaagagtatgaattgacatcaaaactagtatttgattattattttaatccattgtagtgcttgatttaaataactaaattcataaaataaaattaaaattaaataatacagagtaaatagttctaaattatgttaaaattttaaataatcgtatatatgatttttttttaaaaaaaaatcttaataatcatatatagcccaaaataattaagaaaaaaaaaagtttttcatcttttcaaaaatctataatcgaaattataatgtagaattttttgattattaatatttatgaattaaaaaaaaatgattttttttttaaaaaagttatttatataaataaattatcaataaatgtatagatatttttttattaaattatatattaaaataaataaataaataaaaagaactccaaagcaaaaccaaatacgacccgacctagatagttccatatgctgactaaagaaacgaacgtgcttatgctctgtttcgggtacccaagtgatgacccaatttgtctgagattgtctatggccgttagagt

SEQ ID NO: 60912 - DNA, 805 bp, Cannabis sativa
atatgtaattattactatttgatatccaaacaacacacgttattatattttaaaatatattcaagtaaagtttaacgattagacaacgacttgtcattgcaagaattaagggcatgataagggaaacgattcccaaaatatatcatcgcatgatcaaaacttgcgagaatgtgcgaccaagacagggtctagtagcgcgctatacatcgtcgcatagtaattgaataaaagagggacgtagaaagaagttagcacatcgcaacatgtagaaaacatatggagacaaaagtgtttctcccccgtgccctatgtaaagaccgcaactttacaagagttaggtctgaatgactaatatgctcgacaacttgaccagtttttgcgagttctatgttgtcagtacatgaatgcccaatacacaactgatatagtcgcatgcgtttcatgaattaataagaaccccaagaggttcgtgcatcgataagaaccttgattagaggttcatgtatttattcgaatctcttgagattcatacataattgcagaccccgagaggtttatgcatttatttgaacctcacgaggttcatacatcaatgcaaattctgagaggttcatgcgtttataagaaccctgagaggttcatccgtctatacgaaccctaagaagttcatccgttcatatgaatcccaagaggttcacacaccaataagagctacaagaagttcttggcgtcgatatgaaccccgagaggttcacgcattcataaaaaccttgcgagagagtcatacatcagtaagaaactctat

SEQ ID NO: 60913 - DNA, 1009 bp, Cannabis sativa
aagaaaagttatccaacgcgattaacaattccaatctgtagattccgactcgtgtcttgaatagaattactagaatgtgtgaatagtacggaatattttggatcttgaacaatagaagtaaccgacaagaggttaaactaaaaaccaggtacaaaaagcacattagttaaacaaaagttagcattaatgtgaacaataccagatttaatgacatgactatttataccagtaggtaaagtaacatgcgaagcactaggaatagtatcaaaagaagtaaaacatgttttatcaaaacaaacatggtgggtagccccactatcaactatccagatattattagagaaagatatagatttaccagtgagattagatgccattggaatgttgacatcaatcgttgattgggtctgttgaatctgtttggtaagttgagaaataatttcttgcaacgaagtaagtttgtccaagacagagtgagaagcagaagcttgattagcagccggtcctttgacttgggaaccccgatccgaagtggagcgctgtgtagaatcagatttgcacttatcaaaataaacgggaggaaagccatggagaacatatcaattctcctttaagtgacctggtttttggtagtgagtacaaaaaggttgcattttttattgcgagggggatttgatggctgagatgaagtggcgacgatgaggttcgggagaagacgaagtttcttttgtcgctcatcctgaatgatagtagagaacaccttcgagagggatggaaaaggttcagtgattaacacttgatcccaaactgcctggtatgattcattgaggctagtgagaaactgaaacaccttttcttgattctgaaacttggtgttatcagcagaagcttaacaagtgcaagggaaacgaggtcaaagctcattgatatcatcccatttagcccgaagcttggtgaaatatgcagtgacggattaatcaccttggcgtaaacctgtaagagattcttg

SEQ ID NO: 60914 - DNA, 937 bp, Cannabis sativa
  modified_base (521)..(539): a, c, t, g, unknown or other
tgttaaattgctaacagttttctgattttgggggtttacccgcagaaatttgggttttgggggtttaatgaaaccaaaacaaaagtattgagggttttgccgccatttaacatattagaaaatgtcttaaagttagttatattaaaaaaaaaaaaaaatttaaaaattgagctcagggtcttatttttaccattttaaaaaatatagaatctattttatcatttaacaaaacagatgatccaattaataactttaacaaaatataggatctaaaatggtatttatccatttttaaaattagttagtttttatcatttgataataattcatatcctaaacaaaaattgtgtttcatgtttcgttattaaccacttttttttactcttactactacttatttattattggagaattaccccgtatactatttttataatttttttttttaaatttacgatttgggtttctaaagtggttgcagcgctagttgctatatggatttctatacgattttttgttgnnnnnnnnnnnnnnnnnnnagttgcaataggagtttttatgtaaaatttcgtaaaaatacaaaaaaaaaaaactgttttaaagtgtaaaaataaaaaaccccttattattattgtttatttttagaaaatatataaattttgtactatgataatttttaaattattaaacaaaatagatatatatggtatcatcttcctcaacgactccagactccagtgtcaatctatctaatatctatcctatatataagtgtacaactaaattcataaattgtttgataacattctaagatttttacattatatattgtcacattctcaattttttatttatttattagtaaatttaataatttaaattaaaaaaaaaaaaagaaaagaaaattgaacaaacctcaaatttttttttttttttt

SEQ ID NO: 60915 - DNA, 1099 bp, Cannabis sativa
atcatgtgagccagcaatgtctcgaataatttgcgttgcattttattcccagcatccttaacaagagctatgagcagctagttcaataaatttacccataattccataacaacctgggaacaattgtccagggatttcaaaaagtagtttcaagctgcaagagatcaccaacctaaagcttcatctttaaccaacataaaataacaacctggtgagtctcttaaggcatattaaagtcacttcagcatagccgctacaaaagtcaaaaacctgaatgatagtattcaactaatgacacttcaggcaggaatcacaactgagttatccacgactggaggtgaattatgggatgatctctagggtcaccttgtgaggaacattaatgaattcaatgaaagagcacaagtccttgtgtgtaaagaggaagcaagaaatgaaatgaagctattgaaaatgggctcacgaagcaaacccagcaccagtacgataataacgagcataatcttaactaaagtggacaatcctagtggttcaaacacaaaaagaaaggattacttaaaagaatcatccaagaataaaaaaaaaatagaaaaagcatgacaagtatgtatcgatttattcggtatatactgagttaaatgaaactcatgagaacatattccttgctaataaaaatagggttgcaatctgtaaacctgagcccatggggcacgcgaggcataagcgagattcaacgaaatactgtcgattctacaaagatataggacataccactaaagagtgccgacaactggaagatgatatagagagtttgatctcgtgaggatactttaggcagtatgtgagaaatcaaagaaacaagcctaaccagcctaataacccgaataaccagagaatgcaacctcccctattgagggtgaggatatcttggtaatttcaagagggcctcacctcaatagaagtagtaataatgcccaaaagagatatataaatgaagtaaagaatggacaattgacatttgctccaaaaccattgaaaatggcaaaatcaaatgaaccttcaattatcttttcagagaaagatacaaaaccatgtaaaa

SEQ ID NO: 60916 - DNA, 1112 bp, Cannabis sativa
acttgaaaattaccacatcacatgacactctatataagagagtggtagacttggccttaattgctgaggaggccgagcagcaagtaattaaagagcagggtgtaggggatgccgtcacggtatcaaatcctcctgctagtggtaatatcagtaaggggaccgacagtggcaaccctgagcacaaacggaaggctgaagcttccggagaatcagggggaaacagaaagtttcggggaaacagaggtggtcgtcagggtcgtgggtcctcattccggtcatatcccaagtgtcctaaatgcaagaagcatcatcttgttgaatgtcgagccaagtcatgtttctagtgtggcgtagtgggccactttatcagagattgtccccagcccaagaaagaggagcctaacaagaatactgcatagaacccagggcgacttttcaccatgactcaggctgacgctgatgctagtgcgttagttgtgacaggtcagttgtctattaatggtatttcatatactgtgttctttgattcggtagctactcactcctatgtatcgagtagagttagtgaaagtttccacaagccgtgtgatatctatgcttcgggttggaaccctgttaccctcgggagaccttatagcatccactaggtggattcggtgcttgtctttttggattgatggttgtgagttgaccgccaatctaattgagttacaactgtctaactttgatataattgtgggaatggatttcctatataaatatggagcgaatattgactgtaagcgcaagatggtggtgtttgagcccaatagtgccaacccagcggtgttcgtgggtaagattcaagggacacgcatatcaagaataacattgttgaaagctaaggacttgatgggcaaaggttgtctggggttcatagttactgcaacggacaccagccaacgtgtgacatcggggcctgacaatatgagattggtatgcgagttcctcgatgtctttccagaagacttgtggggatttccacctacccgggaaattgaatttgttattgaatttgttccgggagtggatccagtatctaaggctgttgggttttatgttggaaattattt

SEQ ID NO: 60917 - DNA, 944 bp, Cannabis sativa
ttaaaccgtcgagaatgtaaaaaaaaaaaaagagaaaaaaatacaggttttaatggtagaaaaatctgtatttttccttaatttttttctgcattagctttataattttacctaaattaaaattaaaaaactaattaattttattacaataacaactaactttaaaacacattaaatttatacaataaaaaaataaatatatataataaataaaaaaatatataaataaatgtatttataccaagctctgagagagagagagagaaaaagagagaaggagaaggacaggaggtggtggtggtccgatgtatgagacgcagatgagagggacatcgacgggaggtggtggtggtccgacgtatgcgacggagaggagggggagaccgacgggaggaatggtgggtggacatcgatggacgagagagacgagaagaaagggagatcgagagagggaggaagacgacgagagagggggcgatggtgcagaggtgtgagtggggttttggagagttaagatttttgttttagggtgtgggaaatggagaagaaataggtgataagaaataggtgggcatgtggaaaataggaaaaaaaaaaagtaggtgggcatgtgggaaatgtggcgagaagtaggtgacgattttttaatggacccttatactcgatggtttaaaactgtcgggtatagtataggcgacggcccgacggttttaaaccgttgggtataatgctctcctaaaaatttgcattttattaaaaaatatcgcctattttgtttactacgattttaaaccgttgggaattctaaatttttactgacggttttaaatagtaacttaattttcttagcgatggtccctaaaagtatcatttttaggaccgtcgcaaattttgatatttgtagtagtgagagtaatcctatacaagtgagatacagtgatgac

SEQ ID NO: 60918 - DNA, 1006 bp, Cannabis sativa
ggatcggatgaggaaaaaaaggttggattggatcggatggccacccctagtcagcgtcatacaaaaattgctctatagacgattacacttttttctaacacgagatcagatcttgtcccccatgtcaggtcatggtagtgcgcttacgcatctctagacataccttttgcccaatagtctcattagagagtatattgcaaaggagagacctttgcatgacatgtgttctggttcgtatgaaatccctaactgcagttgtacgccacacgatgaagaaggttcttatcaactgatggtcaaattgtcctttagtaatactggcctggcagcgtgtggagtatgaaaccctaggtgggtaaatggtatgccctttaccccatgtgtgcctataaatactcctattttctttgagcaaggggtgaataatttttcatttacagatactctgctaaaattcctaacgtgctttctcctaagaagagaaataagaggaatatagagatcattgctgtaaacacttgtaatacctaaacacttgcccaaagaggctggtactattgactcatggactaaggatcattaacgtctgaaccacgtaaaaatctaactgtctattatttaatatcttttattttcttaagctctatttaattagttttcaaaaatcttggtaaacattttggtgctttcattgagagctaaggaaagtttagtgaccctcatcatgcttcaaccatggcgcctacacgaaaaaagcccgacaagaaggctctactagatatggtcatgaaagaaactgactcccaagccgtcggcccctagataggaaatgatggaggggccacaacccctgctgagaactgagaaggggacaccaggaatgttggcaataatcctagtgatagccaaaaccctggcggtgaagagaaagaatatgttgggaatattttaccgggatctagatttactaacaagtatgttgataaacatcctaaatatgaattct

SEQ ID NO: 60919 - DNA, 957 bp, Cannabis sativa
ttttgttaattttttataaaaagggacatttattaacttaattgttagatttagagctattttgcatcttggccctaaaataaggaagattttccttaaggtttctattatatgaacttagaggaaaaattctagttataagttgaggaacacctctttttttgtatctattaataaaaaatacacttatattatattttattaaaatatatctatttttataagtgggttgcccaatatatcctcactctctatttaagtctagcatataatttatattaatttaaggggtctaatatggacatcatgtataaaagtgggtatattttaaagaatattaaaaatgaaggtaaaaattaaaacaagtaaagtaaagtgagtatacaatataatttcttcaaaattctcggggtttggacgtaacgaaaaattttataacacgccaaaataagatattttgtttcatcattcattcattcttcaaaaaaaaaaagatatttgttttcattaatggcttttgagaaatctaagacttataatgaggcactagtaagaatatattgtagtggattaatctatgtacattgtaaactttagagtaccaagtagatttatgaacagggccgatcctgagttgaaatgggtcataagcaaaatttttttgctcttactataaagataaatggtatatttaaaaattattaatatatatattttaaaaggtatttatttttatttgagcccctaaaatgagtaggtcctaggcgtgggcctagcccgtctatgcctagggctagccctgcttatgaattgtgtatgaatttatattagacctttaatttaatttttgttattacttattgtagtttcaattttgaatcttcattgttggtctaacttgacttgttatttttaatgagacaaatctcaaagcattgtcatccattagacaacata

SEQ ID NO: 60920 - DNA, 573 bp, Cannabis sativa
  modified_base (233)..(237): a, c, t, g, unknown or other
atttataaaatattttaaaaattatatatacaattaaatgtatattccatataattaaaaatctgatacatataatataaatatattttaaaatttaaatgtatattccatatatataattttttttgggaaattaccttatatattgttttttttttttaaatttacagtttgggtttctaaagtagttgcagcgctagtttcaataagagtttctatacgattttttgttnnnnnttaggttgcagcgctagttgtaataggagtttctatgtaaaattctataaaaatgcaaaagaaaaaaaaaaactgttttgaaatgtaaaaatgaaaaagacccatttttttttacaaacaatttaaaataaaattaaatatttctttatctatacatttttcttatttgaatttgttatttattattttgtttattttaatttattgtaaggaatatatataataatattttattttattttattgttaattatataaaaaatactttttttataaatattaaataatttaatacacaccgaaataaaaattaagagggtcaaatacataatttat

SEQ ID NO: 60921 - DNA, 2742 bp, Cannabis sativa
gtgtaaaaaaaaaaaaaaaatcccttaaaaaaaaaaatcaagaaaaaaaaatatgaaaggcatttcagaccacaaagtagagcaaaaggaaaagtcaaaaaggaaaatatcttcagaacaattaattccaactacataagacataacagaggacaacatagtcaaatcaaacatacaagacagtagttatcaacataagacatacccaaacacagaattcagtaactaaaatagtatcaattaaatgatggaaccaagaaatgaaatatcaacatacaataaactccactgatcacataacaaattttaatacaagaaagaaaaatatggtctgaaagtaaaaatgaaagcatagtaagtacaaagctttacaggagaaccaacaaaatggttacttaagcatagaattcacccaaccagtgaagtttttgcctaagcatactacatcctactagctaaagcagcagcagcagccatgcccgctcgccgcttatcgcttccagtaagcattgtcattcctgttgttcctgaacgcgcagcagccaaccgagtaaacaatgatgaggaatatgaggaacacaatgttgaccacagccaccttcttccaatcactcctaaggttgtcaagcagtccagccttgcatgactggcaattaaagcacagagtattcgggtcgttgccccacgcagagcagtcggggttggtcgagtttatagttgcggttgttgtccattgtgtagggctcacataggtaaagccacattcatcggctggcttacagcaaccagactgcagataaagaaaaaaacaatagtttaggaaccatgttatcatctttgaatatggtttcaagtgtttgaacaattggaaaactaatcagaacataggttcaaaaagtaaattctaaacaaagtaaccaactaagagaataatatccatgcaaaattgaaaattctacttttattattatttggttagagagcacaaaattgaaatctaaaccacaccacctcacattttgcaaccaacccatcaaagcactttaagggacaacaaatttgatcactttcattagtactcaaaaagaaataaaagggacaacaaaacaaagttcattagatgttaaaagaaaaagcattgtcaaatgacatagcaaaactaatactgcaaaggggttgaaataaaaaatagaaaagctttttaaaaagataaaagccttttaatcatcctcaagtcaaaaaccatgttctaaatcaaagaactaatacataacaacaacaaacaatgaaatgttaaagttggtaataagacataacaaacattttccatggagaaaaagtaatgtgagattggggctcaaatctacaaaagattatataaagtggggtttttttttccttcttttaacttatagatgtcatgattaagaaccctttactttaacttcaacacaaaaaaggtgtctctcaactaacttcactttatgaattaaaaaaatgaaaacttcaagaaaagagagaatcttttaaaggaaaaagaaattagataaagaagttcatcaactcaatcatgcaacatgaaaaaattaaacaaaacaccaacagaaattcaaagatcactgaaaagaaaaacttgcagagatggagatctaaactaacaaaacttcaccacaagaaaaacatatatcccaatgatttaaataaacatcaaaaagatgaaaagaagccagatcttaaaaacccagaaaagttgaaagctttgtatacctgaagagcattcaaattctctttataaaactctgtgacagtatcattgagatgtttctgagagaaagaagaacagacttttccatcaataagacaactcttgattttgttccagttcttgggactgttgactcttttctgcaaccagttagagtaatcaccaagcctatactccttgtaacccctttcagagacaactcttccagcacctttgttagtaacaacaaaggcaaaaatagtgaaagagaagagaataacaatgagtagaaacataacaagtaggtaaatccaaagaagccatgaaactctgcaaaaagccccaataattccagcaagagaaacaagcatgagaaaaaccccaagaacaattacaggggtatcaagaaacttctcacactcgctatccccttggtttctcagccatactccaccgattatgatcggaattgcaagaaggaatgtggcgatgttgaggattccgatcaagttgttgctacaacgaaccatggtttttgagagagacccagatgagaaaaaaagttgggaatgaagattgagatgaaaaaatgacgacccaaaaggtgtatgaagtggttggttatcgaaaacggtttcaagttcggttcttgaaattttcgaaatgaaaagaaatagagggtttgttagtgggttatataggaaggaaaaaaaaaaaaaagatcgaatttttaagaaagaaagttcgtggaatttgagaattttaagagatcgattttacgcggaaagcattatatgaggttttgactagatattcgatatttaaacgcaactaccattgatgatgatgatgatgaaggtccttttgggtttgtctttttctttaatattttctttcctaccttcttacatgtgataatgatgctatttatttacattattttagttaattaatgttatttacttaatttataatatactatttttaatttttcttat

SEQ ID NO: 60922 - DNA, 615 bp, Cannabis sativa
aggcaggaggaacaaaccaactaccacaaaaaggaccacaccagcccccaagctgttaccagctgtttacaacactcataacatactgatctttcctcttttgactttacaatgaaccccaacaactctagccttaacaatacacttaatttccttactaagggaagaaacattgttacaaacatcattaaaaaggcaatcattcctgttcttccacaacatgtaaagcacagcagcgatgacagcatttaaaactgctgcagcaagatcagtttttgcaggtttgatttggtgaaactctcttaaacaactcggccagttcagcacaccagaccaaccttcaaccctcttaatcagctttttagcgaatatacagtcaatgaatatgtgattatgggactcaggatccatatcacaaaccacacataagtcagaagcaataggaaggaatctgctaagaatgtctcgagtgagcaaatgttcatttataacttgccaataaatgaacctatgcttaggaacaatgagtttatgccaaacattagttgcataggggaccttagcagcccctaacatttcatcatagaatctctgcactttgaatttacaaccaga

SEQ ID NO: 60923 - DNA, 853 bp, Cannabis sativa
aaaatttaatggtgtttggcacaaatttttaaaaactgtttttagattttttttcttacgaaaaaaaaatcaatattttagcaccataccattacattaacccatctgagtctagtttcgggtatggtttcgggtttaggatccgagtatgtgagcaaaatataaaatataatatgttagacaaaaaattatttttgaaaattgaaaacagcattttgatattttctattttctaattttttaaaactcaattttttaaaaatatttatcaaacgactcctaatagtttttaaacattgttttcagttttaaaaaataaaaaacagtttttaaactgtaaatccaaacagcctcttaatttttttcattctctccaaaagtttattggattccctctctctcttatgctattctttctctctcttctctgatacattaaacgattccatttttgaagatttgtaaattccagcaagataaaatccactaattccagcaacggcaagagcaatacaacaactttggtaccagcaagaataaagctccactttcgacagtaatacgatcataatcacacacctaaagaactgatcaacctctgtaaaaaaattccaatcaacaattgaaaaaaaaagtctttgatcatctttattaatatcggtgacaaaaaatcaagtaaatatatatatgtatatataaatagagaccgtgagaaaaaaacaattattaaaaaaagaaattaaatttatatgtatacatataaaattgatcatattaatataaatatatatatagggcaagactatggtaggacctagcaaaagttccctaccggtagggaactttttttgac

SEQ ID NO: 60924 - DNA, 1009 bp, Cannabis sativa
tgatattagttatagtgtgggagtatgtgctagatataaaagtaatccaatggaatctcatgtttctacagaaaaaaagattattcgatatgtcaatagtactcttgactttagaatctggtattctaaagacactaattctggcttggcatgtttaagtgatgcaaattggacaggcaatgttgatgatcataagagtacgagtggaggttgtttctttcttgggaacaatttggtttcttggcatagtaagaaaaaaaattctatttccttgtctactgctgaggctgagtatattgctgctggtagttgctatacacaattgttatggttgaaacaaatgttgattgattatggatttgagttgggtgtctaaataattttttgtgataacaccagtgccataaaacatttctaaaaatcctgttcaacattctcgaacaaaacacattgatataaggcatcactttattagggaacttgttgaaaataaaacattgccgttagaatatgttgatactgaaaaacaattggctgatattttcaccaaggccctagactcaagtcgctttgactccctcaaaaaatccctgagactttgccttggctaatctcttttgttttcgaatatgtacaaaatttttcagttgttctttgcttgcatctattcttgtttgacaaaacatgtttatgctcttggatgataattagcttaggatcttgtactttttatacttttgaggttgtgttaaaagattcatgttactttttatgtgctattgggattgtctaaagtacttttacaaagttgagcgattcttgtttcagtttcttgtcaggccccttgcttgaataaagctagccatactgaggtgtgaaagccatcttttgagtaagctagaaatttgtaattaagtgttatgaagaggatgcactaccatagaaaatggctaccttcagtattgtgtgataatatccaattgtgggatcaaattgaaaaatgcgaaaa

SEQ ID NO: 60925 - DNA, 792 bp, Cannabis sativa
ctcaaccattccttgatcatcttgatcttccaaatctaccacaaccttacctcgtgaatccatactctcttttcttaagaacagaacaaaagcagaacaacttagaacagatcaataccacgacagagaaaaatcataccatgtcataagacaagactcactcgtattattaaaacttaatacaaagttaaaaaaagaatatacaaacacattaacaaattttgcttatactttacaaacagtgtatatatattttattaaatatttgattagtattattaatatttataatgctattattaatcgagtatatttattatgataataaatataatttgtttattaaaaagtcataacaattttaaaaatgaaacatttaagtttatttatttatttgaataaaaactttttttgtttattaaaaggtcataaattattgtaaaatgtaacacttatgctcataattagttattgaaaaatgtgtttaaaaaataaacaaaattataattaaatgtgaccttatgtattaacactgaatttattattattgataatgttaattaattattaatctaatatatttgttatgataatgtttgtaatgatatatttttttggactaagtttgtgatgatatgtacatataaatataaatttataaataaaacatgtatgtttattattattttttgtataagtttatatgtttgttatttatttttatcatatatagtttgtatataaaatttagattatgtttctcataattaatgttaacgcagatttttatta

SEQ ID NO: 60926 - DNA, 692 bp, Cannabis sativa
taaatctcaaatgagctatggaggtaatcaaagatataaaaaaataaagagaaaaaataaaaatccaaggaaaaggaaagggtctcttaccttgaagatcaaatagatgaagcaaaaacacaggatctatggcgcataaaggggggaagagaagaaagggaaagagatagagagagatcgagctaaatatgagcttctctttgatacccaaaaaataaattgaagactatgtgtatgcattctagaaaaaaaaaagaacacaaacctaccacctggcattaggtagttgacatctggagtaaaaataaacatgtgtcaagagtatcctttgtacaaaagaaatatatttcatttctaaaaaaatatatatatttattagcataaattatcaaataaataaaggctatttttgtaaattaactatgaaaggccgaaagatgaagtattctcttttttatagaagttatagatataccaaaaaaattgttgatcattattttcgacaaatacttaatcttatattataaaaattgattatgtataagctaagttatttttatatggttcaggtattaattaactttaatttacgaatcacttgtatttatctgtgtaatattgtaattacaatagagtttcttttttctttttatatagtttgggtataatatatttctatttaaggaaataaa

SEQ ID NO: 60927 - DNA, 994 bp, Cannabis sativa
  modified_base (154)..(178): a, c, t, g, unknown or other
  modified_base (229)..(234): a, c, t, g, unknown or other
  modified_base (355)..(374): a, c, t, g, unknown or other
tttactctttggcaagataaatccaaaaaagagtaactctcatagttcattttctcatctcataaaatgagataaaatcactaatggaaaaataattccaaactccattcaaaaattgatgaatatatcttttccattattattattattattnnnnnnnnnnnnnnnnnnnnnnnnnttattattattattatatacaattagttactcatatattatcatataccannnnnntatataactctcatgcataaaattatctcccaaaatttaatgctaattattaatatattatgtatgttactatcatctcatacataacatatatagacataatattaatatacatcacaannnnnnnnnnnnnnnnnnnngcatatatataacatatactcatcataatatatatcatctccatattatatattatatgtatcacatacataaatattctcatcataaatatatattattatatgtttaatatatatataatatatataacttatatatatgtcatgtattatgtatatctcacacatatacatatcaacatgtaacatatccaaatatcatattatatattactatattaatatgatatacacactgatatatataactcatatatatatctcatatataataacataaaaaattcatatctcaacataagaaaatatgttaatatatattctactattaaaaaataataaatcacaaaatatcacaattcttacccttgtattaccacatgttgatttctcacctttcattgaagcaaggtaggaaaagataagtttttgactgttggaaattattgtgttctaatagaaataccaaaccaacaagattacaacctctatgataaataatacaaaggataaaatcacggattaaataagttacaacactaaacaaaatatacacataaaatagagaatatagagatgaagagaaaaattacaactcaaagaaataagctacacataaa

SEQ ID NO: 60928 - DNA, 1164 bp, Cannabis sativa
  modified_base (660)..(661): a, c, t, g, unknown or other
ttaaaactaagaaacaactcgcacttcgcgtatttatttttagcaataattaatttataaaattatataaaattttaattttaatattttttatataatatatataataaaataagatctaaaaaaaagttataaaataactcattataatttcaaaattattatcatcactgtagctcacttgtagttactaatattttcaaaattgatatcaccactatatctcacttgaacactattttattgaaagtcgttattattactgtaccaactgagaacaaaacaataaaataaatttgaaaataaagatgacaaaacaaaacaatatgacatctatggcttatgggatatatatacataaatatatttttttaacttattagttaaaaaataaataaaaaatctaataatttgttagcatgaattataaatatttttttaaatcgtaaataatttatatttttaatagcaatatatatataaattgtcagagaatgatatatatattaaaaaattagtatatatttttttcttccaattaaataatataatatttttaaattttaataataaaaaaataaaaaataataataagtgtacatgattttttttaaaacaagtaaacatcccacgcttcgcggcggatatataaaatatttnnaattatatataaaaaataaattatgtattttaactaataataattacttaataaaattatattaaagttttaactttactattaaaaaatgtgtgacataaatacttaaaatattaaatttgttactaataaataccagaattcgaaaaatggtagcataaatcctcatttatggtttaatttttaatctgatgtgtgttaaattctgagttcgaattttattgtgtgtgtttttaatgtttgagttttagtgttatactggggttctaatgtttgagtctatatttataagatctgttttttttttatttatttatttttatagattttgagaacttaaaatttgatgttgtttctattaattattgagattgagagtttgatttttcacacgagaattaaaattgccttttcgttttatagattggaaaataagtttatggaatgagaattttgaatatatgaaaatagaattagaaaatagcatttgaatcgagaatcaa

SEQ ID NO: 60929 - DNA, 1096 bp, Cannabis sativa
  modified_base (553)..(555): a, c, t, g, unknown or other
gtcttcgatttctcaacaacacaataaatctcggtagtcttattagccatggcaggtaaggtactccaaccctcgctcttatgtatcataatagctttgatttctttttgttttttatgtcactctttctcttaattaacgttaattttttgttaattttgtattgcaatgatagcaatagtggtctagaagtatctcacctcttaagttttatctcttgctttgaattaattactaaagcttaaaatttatgtcgacactataacgagagaaacgttatgatttctttcatctctcgctttgaattgattctgaagcttgaaattctaaggagatgtgcttgaattgttgctagaaggtaagtatgtacgcgcaacgataataattattatcttttccatagatttatgagatttatgtatattattaatcctattgtgctaatgatttgaacaacgtattgatttttaattaaaattgaacaagaaaaaattatattaatagaattaaatgtagaattttgcacaaaggtttaaaagtgttgtaagactgnnnaacaaaacggtgtagtattgtaggcagaattattattctagtctaatggtagttaaacatataccacttaggcttcaacttgaaatctcatgcttagttcttctagttgtaaaaaaaaaattaaatattatttaaaaatttattatacaagaagagaattctaatctatgtaaaaagaagtcaaatttttgttaaaaaaaaaataaaataaaattacattgtaaatattataattaaataacttaactgttaaaataattataataggaatttatatgaaaaaaattatttataaatattaagtgctaaaagagactttgttaaatattcaattaagaaaataattaattataattaagtaattctaagaaggaaagttttaccatatgataatctgttattataattaaaaaaaatataatcatgatacttacaataaaaatgtaactatataatattagagactcaatattataaattatacttatataatacattacatggattacacctaaatatctctcctaaacatacttattta

SEQ ID NO: 60930 - DNA, 571 bp, Cannabis sativa
  modified_base (42)..(54): a, c, t, g, unknown or other
catcgttttagaagttcaatattaggttgttaaatcaacatnnnnnnnnnnnnntctaagatcctggtaaaatatatttccaacagcttgggcttgtcccctccagccaaaaagtccaaaggcagtgagactccgtttaaagagaaggtactagctgaagtggtcattgacctttctaaagaacaaaccgttgtggaccctcctgcctcgaaagttactaagtctaaaggctcccgaggagggattttgaacgaacctaagcaggtgaaaggtggatccgagctgatcagaagcaggtttgattaagttaaggctcccgctccacctttggtattgcacacagagaccaaaagaggcagagacatgctcaaccactatgtgagctggtcggtcccagaggtgaacgaacaattggctggggcggataatgacttgtctttggaactagttacgggaggagtcttgaaagagctttcataggtaagtcttttctaacatttttctttcattcctctttgactagttcggattttaatccctttttccacacagactagtttgaagatggcat

SEQ ID NO: 60931 - DNA, 1056 bp, Cannabis sativa
actaagttctttataaagtaatgaccaaattttttgagtgtatgtgcaatggaggaacagatgctcggtcgtttcattactggacttgcaacaaacacaccatcccagagatatgtccatgtaagcatgggcgaaggtaggtgtggacaaggtggggctattgcccctgctcaagttactcaaatttcaaattttccattatgcatatataaactaaatctatcaccttttaaactttttttttgtttttttatatatatatatctctttatatatgtatgtgtccaaaaatagtcgtagtatttcaatctccataatataaatattatattttatgtataataaatgttagtccaatcatcttttattggtacactaaaagagttctgcacttaactcattattcactattcactaagagagcacacataagataatgcaaaagacttttcatttcaacaacaaatgggaagaaaacaaaaacctttcaaatctcaactcactattcactaagacaccttatataaatacttcattgcaaatcactcaatactacggtaatttagaaaagttaagattcaaaattatttttttcttgatactagtagaagaaaaattggtagttgatagcttgattctcaagaacaaaaaatatctttcaaatatcaatattgtatcagccatcaaggtattttgttaatttgttatattgtatttcctttgcatattttataattgatatttattttttattattatttttactttctttttaattttttattgtttaatatcttcttaattatataatattatcaatatgaatttttagggaccccttgttaagggaagaagtgaattgatgaataatggatgttcaagaaaatatatttcactaccaggttatttatatttatttatattattttttttcttttttaatttttttttaatgactcattttttgttatcattaatagagatggaaatttatactgcggggataggtctgttggaaatttattttaccaggatcttagatctacttacaagtat

SEQ ID NO: 60932 - DNA, 1062 bp, Cannabis sativa
gcgtcggttattaattattatgttgaaaaaagcgactctaaaggcttgttttgtagtagtgcgatctgggaagaacaagcgacagttgtcaaccaattgactgttttgttcgcagattgtttaataaaagcacaaaaaactgtattaagatcagacattaatgtacgacaatcaaaaataactaaaccaataggagataataaaggagtcgaactatcataacatcaataatgcttttacaatctgactcaacaacaacttgatctaggccccgttctttggtccagctcaaagcttccttcaatctaattgcctccaccaaaagaggagagacacggtcatgcaattatttagaccaatgataaaggacaattctatgatgatcacatgccaatcctccaatctcaaaataaaaagccccagaagtgaaagaggcatctacattgactttaatcatatcaatactgagaaccaaccagtactgctccacatgaacacaaagactgaaatctattgtgtttgcataatttttgtgagcaatcttttattgattaaagtaagacaacgcaacagccaccaccccatttgcaacagaatttttattttttcaaacaagcttgtttcttgcttttcaaagagacaaacaaattatcgcaaaatgacaaactaaagtcttcgaaaatcctatgactaattgataaaaccatcttgaaaaatcaatggccgaaaagctgcaaatagtcccatcatcccgttgccaacaagctttggctaaataacacttaaccaaaatgtgaaggattgattcattcataccttggcacacggggcaaatgacgaccacatcaacatgcctaccttttaactgggtcagtgttggtaagcacccagaacatgcctccaaagtgagtctttaaccttagaaggaattttgagttgccatataatgccctttaaaggcccaaattattatcttccaaccactaccatgacacactaggagaagcttgtaagcactcttcactaaataaacacctaaagtctctataaaccaataccaat

SEQ ID NO: 60933 - DNA, 969 bp, Cannabis sativa
gaataatttcatcacatttaaatttaaatttatattttattaaaattaatacatattttttaatttcaaagtttccactctattaaacgttgaatgttatttttaatttaaaattttttcaattattaaattatgaactttttaatttatcaaaacttaacttaatcaatttaacctattagtgataaacataattttttttttgtaacatctataattatcttttgaattttcttatttctttaaataaacaatttgtttagcattttaaagtttctaattatattttaaaataaacaaattaatttttagcattataaaagttaccaattaacttatttaaatgaattttttcaaataaattatgaactttttaatttatgaatttttaatttaattaagtttctaattattatatatcaacaagtaaatttgtaacattttaaaattaccaacttaattaaatttatttgtgttataattaataaagtcttaactaattttttaaatttaacttattattataactatgatattaatgatgtactcgaattattttttaaatgtaacctattattgaaactgttatgctaccgaaaattcgacaacataacattttacaattgattactcctaaatttttaacacctacataaaaatcacaaacacaataccaaaacagtttacatattaatttttgccacccatccgaccgcagcatattttttatagaatctacttcactatggatgaatatataagatattcaaactctactaatatgcattttcaagtaaactttattttaatattataaaacatataatataagcatactaaccttccaatataacgaagagtgatttttgccaaacaccgtgcaaaaggacaccaaaaatctatttatatataaatatatatgtatttatatgtatatatatatacatgtatactacgtgtatatatatt

SEQ ID NO: 60934 - DNA, 1335 bp, Cannabis sativa
  modified_base (183)..(183): a, c, t, g, unknown or other
taatataaagaaaataataatttaaaaatctaatacatataatacacatatattttaaaacttaatatatcaaatgtatattttattcttatatataactttttatgtacaattttaaataaaattaaatatttttttatacatatatttttttttctttttttgaatttgttattttatttnttttaatttgttgttggagatataaaataacaataatttattttattttgttgctagttagatgaaaaaaatatattttttttataaacattaaataatttaatattaaaaagtaactactctaaaataaccgatccaattcgcacttttgcggattggattgaatttaagttattgtgcaaatcagactgaatccaaaatataaaatccgcacttagtacaaatcaaatacattataagcaaaataatgcgaattgaattggatgaatagcctttatacattttcatatttggatggtaagaattaatttgtggattattaagagaaaagaaccaataccgacacataaatgaacacgcggaggcgcaactttctttctcatatatagaatataccatttggtggtgttatgctgttggtgttttattgtgtattgaatttgtagatggataatatataaaaatataaaattgctaattgtatacccaaaaggataagataatatgcgcatatttgtaattgtacacctactaatagtgctattttgtcttttttatttttatatatatataagaatttaactgacaatgactttacactaatatctattttatatctcattcaaaaaaaaaatatctattttatatctattttagtataatatatgtgaaagccaaattttctatgcagattaagaataaattgcggtaaaatttttgaaagtttcactttattagtaattaatttttaaaatttaaattttgacagcaaaatcttctaaattcatattctcttagtaatttattattttcatctaattctaattattaacaatatacacgtatacacaatatacacgtattacaattttattagtacaaataatttaattatataaaaaaagaaaaattttctaaagaaatcatcttaaattaaaaaaaataataaataaataaaagaattaaaaaaactaaaaatacaatttccctctaaaaaccctcctaaaaaaatcctacaaaaattccatatctcttctacctccctttcttactaatcggtaacctctgctaactcgttgctgacgaaaccccagcagaagctccttatgccagtctcgatcagtttcacacaatctctctctctctctctct

SEQ ID NO: 60935 - DNA, 1346 bp, Cannabis sativa
  modified_base (1314)..(1321): a, c, t, g, unknown or other
ttagggtataaaacccaacaataaagtagtgttctaagaaggccacaggccacatggaacattaaagtaagtagtgttctaaagctaaaagccaccggccatcaaaatgcacaggctatacggaacataaaaatattgtctatgttatacaaacataattttgaatgccactaatgaaaatattgtctaaatgtttgcaggggcatgaagagctaaatttgaagccgcgagattaggatcgccaaagtctaggccagccccagtatcaacacgttggtcaacctggtggtcattatctggaccgaccacctcctccacaggtgggtcggccaggcccttatcatgagtctcttatgatgacccctctcgataggcggcgacctggtctacctccatctagctctcataaagggcctttccataggccaactttctatccacaaaagcctcattgcccatgtatcacagactagttggaggttgcagaacttgaactcataagtgagtttggagaacaagtccagcatactcctccccttatggtcttctggccatcaagagcctccctcaatttctccttgtgcttatcaaggttagacttcagcccaaagatgaaggtagcttgtgcgatgttctttatgtttctagtgccaagcatagtctctaagccaaaaaccattctttgtctttctgccaagagatcctccagctcagatatggctttgtccttcactacaaggaaagcctccaaggtcttcatctgctcctgaaaagcatctaaggatccctaggagccatcacgtgttgagctcagcttcatcaaggcctaaaaacaaaacaaaacaacatcaatatcaaaaccacaacactggctggctagtcccccatgggattgctatggctggctagcccctcacagcaacatccaaggacggccagccacatgcaacaagcctcatggtcggccagcctatagagtgccaaaaaggtgaatagagctgaaaccacaacttacaagacaaagatctcaaagacctttagagtggagcctatctggcctaccgtggccaagctctttcagatcctcttccatgaaggggagagctctctctatgcacctgttggctgcctcagtagccccttgtcaagcaactgaccccactcctctaccgagcctctgagtaccctggcttgcaggccgtatcataggctgcacaactggtgttggccctagcaaagggggaggcagtaacgacacgacagcatttccaccatgagaagtgtaaagattgcttagtttaatttggaaattannnnnnnnttatgtttaattatgaaaattattt

SEQ ID NO: 60936 - DNA, 837 bp, Cannabis sativa
ttataactagtatgacctctataatataatactcactgaatccttcatagaaaaggttgaaaattctgagtttacttgctcagaaaaagaatggagtactactcgtatactcattgtaatccctttaggattttttagcctacttcataataatactaacttgaaggctatttaatgtcataaccacgtaaaaactctgagtgtcttcttcatatatatttcttttaaaattctattttttttagctctaatatttaataattagctttttgaaaaactcgataagcacaagtaatttgttattttaagtaaatttaaaattaaatatgtagaactcaatattgaattgtacctaaaataatataatatgagatggagccaagtatgtacaactgaaggggtcttggccctcccaaattttttattctctagtaaaattatacttaatattttgaagaaaaaaattgcattttaacctctccttaatttgtgtttttagcatttttcccctaaatgatagagctatctaattggggtgagtaggacccaaactaatctaattacaaaactaattcaatctaatgcatataaaaaaattgaatacacaattacaattgaatttaaataattgaattataattggtttgaatgggttattgaatgacatggaattaaaaactaatccactctaataaataataagtatatataatatatattaaaataataataaatttaattatatgtattttccctgattttgtccaaaatacgtggatcaaccggactgtgacacgtggactgaagaagcaggactttgagataattcgactaagt

SEQ ID NO: 60937 - DNA, 716 bp, Cannabis sativa
cagaggcctcgaacatttatcttcgtctttgtctgcgagcatcatccatactgagaaggcaaccttatctctaagcccaactagatgctcaccagattttgcattcatcttcattttcgtgtttatttatttttttattggatttgtgtttgtttcaaaccttagatggttgtggttatggtattttttgggtcaaaacatgcttacgataagttattgatagtttatcgatgatttatgtttgtgtaacacaattttgtcaaattaaaatttatcgatagcttattgatggcatttattgataagttatcgatagtatatcgataggttatcgataatttctgtttgcacacaaaaatagcagtgcacagacaaaaccatcaataaagtaccgataacccatcgataattatattttggccaaaaaaccatacaaattcaaatataaattcaaaagaggaagagagagcgaggaatagcttttggtggtctgtctcggtctcgatttgtggggtggtgacgaatgacgatggtggttgagagaagctgagaaggatgaagagagaaagatttgggtaggtaagatttggaagttgttgggttgagttttgagtagatgaggaggtttggtggtggaggagaggaggttcgatagtagtggttggtggtcttagtgcctgagtctggatgtctcggtggtgagagagagagagaga

SEQ ID NO: 60938 - DNA, 630 bp, Cannabis sativa
attgagacagacaatcttgtttctatataagccattcgaaacactcactctatgagatccacctttggccttcttatcaaggactgtcaaatacttttatttaccctttctaatgttaagttatcttggataaaacaatcaacaaatcgagtagcacatcatattgctagacattcacgactttaccctagttgtagcatttctgagtttttcattattgctgaattccaacatcttttgtacttaaaatgctagtttatttgaataaattcataaaataaaaaaaaacataatatcactttcaaaaaaaaaaaaagtactattaaacttaattttatgcaataaattttacacatttttaaaaaatacataaattctacaccattgctagttaagaattaatacatagctacgttttctactttctccaatcaaattagaaatactattttggttttttttttttttgggtaaaaattatcgattaggttttttattttgttaaatatttgaattctatatttttcaaaatgatataaaatagactttgaatttaatttttttttttaaattaaaacttaataataacttgatcttaatttttattacaaaaatgattatatttttttt

SEQ ID NO: 60939 - DNA, 1167 bp, Cannabis sativa
aagattggtgaaaaaagaagaaactatgccaaacatagctttaggatcattagtgctattattcttcttcctatgggaagcaaacctatgaaaaaacttagtattcttatcacctgctataagccaattaaccctagacctttgcttccaatagacctcctctttataaagaagagcatctagctgagactgaagattttgaattctaagggtagtctctcgactagaagacacagaattttgaagcctagcgatctctttttgagtatcttgaattcgggattgaaacataatcttagtagatttgttccaagacttaagagtagaaacacaagcatcttggcaaaagagaaactccctaaaagctttgtcatgagaggatactcgagaagaatccttccaagagttattgacagtggagtaaaactcagggctttgaagccaaatattttcaaattggaaacgcttcctacaagattgaactctagacacaacattttcagcaagaacaaccttaagaggacgatgatccgagccataataaggcaaatggtgcaaattagcattaggaaaaaggttcctccaggattcagatcctagagcccaatcaagacgttcataaacaaatctattatgccaagtatacttgtccccctcaaaagaaaggggagagaggaaatatttatcaagaaaatgagtaaacctctccatatcactatgattataataagtgctccctattttatcgtcaaaaaataaaaaactattgaaatctcccataataaacgaaggaagattgggggcattagaaaaagttttttccaaaagattccaagtataaacacgattagaagcaacaggggcaccataatagccagtaaaatggaacatatcattatcattaaagcttatattacaatctatatgattactagagtaagataaaatatttacataagtagtagctttccacaaaagaagaagtccacctccaaaatacttcctagggacttcaaaaccatgatcaaaacctaaagctactctaacacgatctacagccataacaggcagtctagattccatcaaaaaaattatatcagggcagtgatccttgaccagcagggagagcctcctgaatgcacatgtactccccaatccacgtgcatt

SEQ ID NO: 60940 - DNA, 1430 bp, Cannabis sativa
cacatatctaactgaaagttcattgttgataatctgatcacgaacaaagtgttgatcgatttcaatgtgcttacacctagcatgaaacacagggttggcggcaagggcaacagccccttgattatcaacccaaattatgcgagtggcagcagaatgaatttgtagctcagtaaagagagagtgcaaccattttgattcagccgctgtattagcaagagcacgaaactcagactcggttgaagaacgtgtaacaacatgttgcttctttgctgaccaaaagagcaaattaggtccaaggaagacagcataactacctgtagatctacggtcatcaaggcaacttgcccaatcagcatttgagtaagcttcaatggataagtaagtagctggtgaaaggaatagaccatgagaaattgttccctttaggtaccgaaggaaccttttacaagcctcccagtgcacagttgtaggagcatgaatgaactatgataatttgttgataataaaggctacatcaggtcttataagtgtcaaatactggagggcacccaaagtacttctatagaaagttttatcctcaaaaggaagaccctctgttagagacaatttatgtgtactgcttgttggactggtgcacgattttatcccatccaaatgaacttttaccaacaaaactgagatgtacttgctttgagacaagtacatacctgttgtgtttctatgaatttctaccccaagaaagtagtgaacctcacccatgtcttttagagagaaccgattattgagcttgtcaataaattgctgaataagaatagcaatatgatttgagtgtctcctgtcccatagataaacaaagatgtatccgatttagattctttgaaaccctaactaaacaaggtcattttcaatttgtcattccaagcccttggtgcttgttttaacccatatatagctttgttcagtttacacacatgagtagaaaattgagggtcttcaaaacctttaggctgagtcatatacacggtttcactcagtttaccatgaagaaaagcattagaccaaccaacatcatctccaaagtcaggcacagtttgagcaataaaaacctgaggatcatagtcgagagactattctataagataaacttgtggatgagcagtagaagacttaggagtgacccaattacgattgaacctatagtgacaagtcacagaagtatgcccaaactgcatgcaaacttggcacaatggtctgttattgttgacaggcctgggaccatttgttcgattgggaaatcttggcatattgtcagatccttgccctcttccagcaccattataaggtctatatgtgccatttcttgtgcccattgcaagattggcagccatttttgatgaaagatccaaaatagttgagtgcctctccaatct

SEQ ID NO: 60941 - DNA, 854 bp, Cannabis sativa
ttttggctttgactaggaaaggctgagatgcacaaaaaattctaacacaaacttcacttgtaaaaactggagggtgtaacattgccgggtgcgtggcagacttcaagtagtccttttttttcaagaaggagggttgaagatgtgccacacgttcagtgatcttctacacacgagaaacattatgcatgcgagagtcatgttgaatttttatgtagcaagcttcagcttccacgagagaaggctaaagttgcataaaaattaatgcaatgacttcgcttgaaaagatcaaaggaaggaagcatcacggggattaaacagacttcgagcagtcctaccattctgggaaagagggttgaagatgtgtcatacccccagtgatccttcttggacggaaaacatcgtgcatgcgagagtcatgctgaattttatgtagcaagcttcgatttctgtgaaggaaggataaagttgattaaaaattcaagctttgactttgcttgaaaagatcaaagggtgaaagcatcacggggaataagacagacttcaagttgtcctaccattctgggaaggagggttgaagacgtgtcctacccctagtgatccttctcgcacaaataacattatgcatgcgagagtcatgttgaatttttatgtagcaagattcggcttctgcgaaggaaggctaaagttgcttaaaaattcaagcttcgaatttgcttgaaaagaacaaagggtgaaagcatcaccgggaataagacagacttcaagcagtcctaccattctgggaaggagggttaaagatgtgtcctacccctagttatctttcacgcacgaaaaaacatcgtgcatgtaagagt

SEQ ID NO: 60942 - DNA, 1705 bp, Cannabis sativa
tttttggttttgagtggttattcaagcaacacttgtgtgattttttatgacagatgatgtgttatactgctcataaatttttttattgctctttagatttgctgaggtaacattgaagctggtctagtaagctttagtacatttctttgaatttaaacttgagatgttttagaaggatccttaactgatgcctcagttattattttatgtcccatgtgattattgctttttttagcaaggtgatcagtcaaaaagaatttttacttaaggaaagaaagtacagaaaaagaaattgatgactaaactattattttatgtcgagcatcgctatttggcactggttgtgcctagtatcacctagaggttgtctattgcgattggttatcgatattatataaaagttgttatattagatgttgtgggacctaatacttaattgcaccaatagtattatgatcaatgttttgcttttttagaaagacttttaggttgggtctcaaaaatgatgcttaaattactatttttcgtcccttgatatttgctttttttttttttatcaatacagtcagctttaggcttattttgttgaatgtgggccgtgtgctgtgattggaaacacttttgaggtttaatactaattcctcaagggcaagattgtagagtagagggccgcctctcgcacacaaagtgagttaattgcttctctgaaggtctcacactctgagattacggccttgccttcttcttcttcttcttcgcccctctaccacctgaagctgctcagacagacctcaactcctcctttggctgaaatggctttggttgtaatatgtggccaaccctgtagtggaaaatccacagctgctctttctctctctgaggctctcaaacaatcagaatcagattccaatcttacggtaaaggtaatctctgagacttcctttcatctcgatcgaaatcaaagttatgcaaacatgcctaatgagaagaatttgaggggtgttcttaggtctgaagtagataggtctttgaccaaagacaatattgttatagtagattcattgaatagtatcaagggttataggtatgagctctggtgcttggccagagccgccgggattagatattgtgttctgttctgtgatgttgagaaaaccctttgtagaaaatggaacgaagagcgcagagaaaagggtcaaccttcttatgacgataagatattcgatgatttgtcttctaggtttgaaacacctgatagaaggaaccgttgggactctcctttgtttgagctatgtcctcacaaagatggtgttgacaagtcttcaactgccataattgaggctgttttgcacttgaccaaaaagattgattccaaaacaagggatgttaaggttctgcagcccaccattgctactcagactgggaagttttccgaggccaattccctgtatgagttggatagagcaacgcaggaggtgatcagtgccttggtggaggctcagtctcaggctcttggagggcctttgaatggagtttctctcggtcaaggtttgcctgttgtcaacatatcaaggcctgttggcttgcctgagcttcgcaggctcaggcgaacttttattaagttgacggggcaaacgagtttgagtgggccaccaccgccttctgatgcagacagtgccaaaagaatgtttgtagattacttgaa

SEQ ID NO: 60943 - DNA, 828 bp, Cannabis sativa
ataaactacttatcgcttactaaattagactcactgtcgttggctaaaagcgaggtcaacactttaatcaatggaagattgctcatgaaaattttgcaaacagaatagattccggtccttgtgttcgtgtagagcattaatcggttttcattattgatatgattaaagtcaatgtagatgcctctctcacttctgagggtttttattttgggattggaaggttggcttgtgatcatcatggagctctcctttatcattggtctaaaaaattgtctagtcgtgtctctcctcttttggcggaggcaattgagttgaagaaagctttgagctagactaaactagatcaagttgttgttgagtcgaattgtaaaagcatcattgatgccttgtatagttcagcttctttattgtctccttttggtttagctatttattctaattgttgtactttaatgtctgatcttaataatgtttcttgtgtttttgttaaacgattagcgaacaagacagccaattggttggcgacaattgtttgttctttcccaagtcatggctatgatggggggtttgtccctactacttttcaaactattttggtggataatttatccaaacatgaatgagatgcatatctttttgtcaaaaaaaaagatggtttttttaaaaaaaaattctaaattttatgaggagtttaagtgaaaaatggggtgagggagaaaaaaatgatgtgccattcatatttcataaataatgaggggagcttgtgcctccaaactcattgacgggctcacactctaggaatgaaaaaaaccctgccaacgtttattt

SEQ ID NO: 60944 - DNA, 665 bp, Cannabis sativa
  modified_base (537)..(537): a, c, t, g, unknown or other
atcctagatcgaaagcttccaacataccgaagagaggtggaatttacgatgtcaaagatgatgtagatatcaagacatcattagcaaatataactacgagagttgaagctatgtcattaagtcaatccatgaatatccctatacacaggaatgaaatttgttccttatgctatagtataagtcatagtgcccagtcctgtcaatcattgcctatatacaaagaggtattttttgaagaagtaaacgctcttcaaacttatgggaaatcatttgatagcctatttgctcagtcctacaatccaaattggagaaatcatccaaatttttcttggagacagaaccagcctccaatgaaccaaggggaccaatacaactcacccaatgagagttatgcccaacataatatgccatatcctcaacaacaaagaaaaccatctttaaaggataccctataacagttaatgcaaaccaccccacagtccatgttaaaacttgaaacacaaatgggtcagcttgctactgctgtagctgaaaggnaaaagggaaaacttcccagtcaactcattcccaatccaaagagtcagttcgaggtaagtacatctaggcctactgaagaagctaaatcaatttctatccttaggtctggaaaaattattgaaaaacct

SEQ ID NO: 60945 - DNA, 1520 bp, Cannabis sativa
  modified_base (214)..(230): a, c, t, g, unknown or other
tcttttaaaccttctgtgactaatgaaaagggaattcaatgcagggaatgtgaaggatttgggcatattcaatctgagtttacaaacactttgaaaaagaataagaaaagtttcaatgtaacataaagtgatatgatgaaactgagagtgatgaagaaaattatgagaatgttgctctaacttctgttgtgactaatgtgttgtgtgattcacnnnnnnnnnnnnnnnnngtatgtttaaataataccattgaacaagaagaatctgattctgatgattctgaaatctgtcaagaatctcttgctgaatcatacaaagtcatgtatgaaaagtggattaaccttacttctaaaaatagagtgttgattaaaataaataaaaaattgtctcatcaaattgaaacttttgagttaaaaataaaagattatgagacagatttttgtgttaaagatgaaaaattactcttttaaagaaggaacttgaaaattttaagaaaaatatctaaatacttaatcccggatcttctatttttgaagaagctcagaatgcatgtcaaaaaggctttgctggcattggatcaaatggtatggaaagttccgaaatcacgaaatttgtaaaatctagtgttccaacgaattttcctgatgctgcaaatttgaagtctgctgcaatagattcaaaacctgtcgttgcagaagttgtatctgctgacgcaaagtctccaagatttgcaaaaagagtaagatctgaggtaaaaagattcattcctacttgtcatttttgtggtataaaaggacatctcagacctaaatgtttcactgtgcaaaatatgtttaaaacaaattattttggtaatttagaaaaatctcaaaagaaacataaaggtatgaaacaaaaatggattaagaaaaagggtctagctggtttttctaataaaagtgttgcatctcaaatgtggtattttgatagtggttgctctagacatatgacaggtgagaaggattttttgctcatggagtgtggggaagtcacttttggcaatgggctagctggaaaagttgttggtatgggaactctcaactttgaagggttgcccagattgaaaaatatgatgttagttgaaggactaagggctaatttacttagcattagtcaaatttgtgaccaagggtatacaatctcaattgatattgatcattgttatgtactaaatgatgataatcaatgtactttgcaaggatttcgatccactaataattgttataccctaacccctatgttcacttgtcatttagccatcaataacaccatggatttgtggcatgctaaactcagacatattaattataaaaatctaaaaaaaattgtcgaatgcaggtattgttcgaggtctgcccaagctaggtaaagaaagcattggaaagtgtgaaccttgtcaacttggtaaacaattaaaaatcaatcacaaacgtgtgtatgatatcaatacctcaaaagtattggagttgcttcacatggat

SEQ ID NO: 60946 - DNA, 1605 bp, Cannabis sativa
  modified_base (1209)..(1218): a, c, t, g, unknown or other
  modified_base (1560)..(1561): a, c, t, g, unknown or other
aatttataattataataattaatagaacaaaaaattctatttaagtgtaatattctttttatttaataaaatacaaattcttatattgttgaacagattgttgggagtatatttaatacgatattaacttaaggtatcaaacaacatatgagatgatatttattgtattagtatgttgtttattaaattaaaatatgttagactcaatcaaaaactaaattatattaataaaaatataatatatactttgtacattgttattagggtactattatgtttttttcttttataatatatataagtaaactttgatatattgctcaaaccaactttataaactaaacactactgtcaatcaaagtaacctgcaaaaaactaaacacttcacaaattacactaaaaagaggttttgaaatcatattacatcattttaactagcttttttttttctacactagtataccaaatcatattgtaaagcctcataaaaaattttatttacattatacctactctctaaattacttggtccaatatgccaggttcctcactcttgaaatgtagtatatgaatgctgataggattgctaggcacacaccatgcctaaacgtaagtaaatgactttctttatccaattcagcaacaatccaatagagatattcctagtaaagatatgaatacacaacatagcctttgtaaatctttggtttgataggtctagtagatcttcttaagacttcagcagcatgctcttagggagcagcaactggtttagcaggttgttcaacagttgcagacaactcttgaacttcttgatctactagattatcattaccaacttgtggattcaaagattggtaatggttgttcaacatccgtttgaactacaaggttgttaaccattatcaatcttgctcttaaagtggcagattttgaaggatctttctcgggacctaagtcctttgattgaccactcccattgatcaatgtatttctaagaaattttgtattccttgattccacaattcttgtgctatgaaatggaaaatagaacttataacttttagaattttcagcgtaccctataaagaattcgcttatggtccttgggtccaatttcttctcttgtggattatatattctgacttcagatggacatccccaaatgcgtgcatggtttaatcttggtttccaacctttccatatttnnnnnnnnnnttttgagactgcctttgttggaactcgatttaatatgtacactgatgtctttaaagctccagtccgcaaggatttaggaagattagagtgctgtatagcatactctgtaccttgtccattaaagttcagtttctcctttctgaaataccattttgctcaggtgtaccgggcaaggtgtaatgggcaacaatctaattttttttcaagaaactttgcaattggaccatgtgcttgtccatcttctgtgtatctaccataatacttacctcctctatctgatttcactatatcttaagttgattgttgcattgtttctctacttcagctttaaatatcttaaanncatctaatgcttcacttttattatgaagtaagtagatatacatg

SEQ ID NO: 60947 - DNA, 974 bp, Cannabis sativa
tttgacaaaggtaatcatggtctttatctaaaggcttgggataagctgtgccttcccaaatctttgggtggactaggctttaggaaatcgaaggagatgaatttagcttttcttgccaaatggggctggaatttgctaaaaggctctcagtccttatgttgcaaaattttggaagctaagtatctaaaagggaaggagttcctcagctgtaattatagggactgtgattcctggttctggaagaatgttgtgaaagccaaatccattctaaggaagggggcgtgtaaagtggtaacgaatggcagggcgacgagtatttggagggatccctggattcctcacctgaaaggttttatcccgaaacccaagggcggggtcttaaccaatgacagttgtgttgataacttattgctgggaaatggagagtggaacttcccaaaactgcatgatttatttgacaaagacacggtgtccgcaattgccaaagggggaaatccctctgctcaaggagatgacaaatgggtgtggacgctggagaagagtggctgctttacaagtaaatctgcttatctgtctcaagttctggaaagagctcctcattgtgaggtggctccggctctatggaacaagttgtggaatagcaaaattctagaaaggcataagatcttgtggtggtgtatcctgtcaaatgcacttcctattagatctgtgattgggaggcgtttccacattgaggacacttgctgccctttatgtggcttgggggaggaatccatggaacaccttttcttgtcctgcgatgtggcgatgcatttatggcgatcgtccccgtggggcatctatcctatttgcaatactgggattcgaatgtgggattgggtcaaatttatttggaatctaaaatctagggggatccgagtggaagaggttttcctgtttgcttcgactgttgtcgaaactatctggaaagcgcg

SEQ ID NO: 60948 - DNA, 1508 bp, Cannabis sativa
gacgacaaataattacgattgcattatgtgttattatataatacacttgtgtgcatcccaaattatatagaatattaccacccaccatactttttgtacgtataatatagaattcttattcgatcgttaaaaacaataacaaagtattccgatctaaaatgaactgctaagggatcactaccagtgctctttttgtcaaaaataaataaataaaatagttagtagaaaggggagtttaatataatatattttaaagaattaataaggtaaattttatagattaattagtgttaatactttttctgtcttcttgtgtaggttttcttcttagggtaagagttggtattttttgaactggtgaaataagacacctataaaattatgttttaatataatacttattaaatggtatttttgattaatatgtttatatttcaaatatagtaaaagtaagtttgactaactaacccaagggcgtagagggtagttggggttgccaattaagccaaaatctctagagagaaagtgtgaatcaacatatatacatatagtcaatattttcaccttaatttcgttgcatttggcacagattaatatagatatggtcaactaattctccaccaaccattcctcttcctcagactttgtctcaaatcccatgtggatatatcaaaacaaaacatatatagctacttaataattaaatcttaaaaataggaatttgttagtcatctcgaattttaaaattcgttttcaccattcattaatatatcaatatatttgtctccttttatttatgcatattgattaaagtagatatagttatatatattataacttagtttttcttttctgaagtcagtagcacgcttcagatgttcacactcataggaccctttcccaaaaacaattaaatatattgacttaaattttataatattttgttgtataacttctattacttgtcagtagtgtttatagtactagtgcttggcattaattctactaagaattaataaacaataaagaaaatagttttaatgactggaccttttaagattatcatattagctcttaattatttcagaaaacaattaagaaaaagaaaaattgttaatatcctcttgaaattttctatgaggaattagatatgcatgcacgttatatttattatatgaactcgacttgttattttgattagttatttttattcataactcatcatgtataaagatggtcgtattatactaacatgtcttccaactaagaaaatatatgggatatatagttttggaaatttaataagtaacagcagatccatatatataattaattgtatttgctttactgcttaattagtattgaactttattttttatctgaattattatatgaatggtggatatatgttttaaaacatgcagaagcgagtgagtttctgtccaataaatgaaggagagattcaaattgctgtggcatagttctccaacaaattaaggcaattgatt

SEQ ID NO: 60949 - DNA, 2356 bp, Cannabis sativa
ataattgacgagacaatatgtccacctcaagataaacagaatatataagaagaacgtacaagatgagacatcaaaaagtttgtaactcattgacccaaataattgtacatggagaagattacattcacccatctcgccctttatgccacctcgcaaataactacaatataaagaacactgcgagaagaagaatatctatacttagcgtttttcctctaaagaaggataagaaggataactcacattcagcgagaaataacctttttagtcagcatacactactaaaaaatgatctttcccaacggttttaacttgttgggtaaagtattcctgtcggtttctacaaccgtcgcaaaatgggaaaaattggcgaaggttcgaaagtgtcgccattttctcattcccgacagtttattattttaaaattttaaaaatcttaaatttttattatatattcgtttatatcataattataatcgtcaaataaatcaagcataaataaaaatttattaataacacaaatataattacaatataaaattttatactcagttctaattctatcatcatcatcaactatgaagtaaaaaaatatttacaaaatgaaatacactttttaaattctaagatctcaacttcaaatatcgtctagtattgctctaaagaaagacttaacgatatacctgcacattctaaaaaatctattgatgaataagcacgttaaacttataaataataacgtaccatattgcaaatacatcaacacaaaaaaaaaaaaaaatcaaagtatttaattaatccaatatcatataaattttgtaaaattaaaatttaaaattaaacattacttgaactattagtaaaatactattttttttttctaactattaaacttatactaaaaattttctttaactaaacaacattacatatattaatttttctagtaacaaattacacattaatattaaaattaaaatgcaataaaaaatacttatattttcttaccccaatctaacacttttcctttaatatttatgcatttttagtgaaatttatcctaattctatcaaaattttaacagtataacaactgtaatcagacgttcccaaaaatttcaaacatgaaaatataagaaacaatacgtacacaaaacaaaacaaaacaaacaaaataacattaacaatacaaaaactatccgcacatttgaccgcagtacaattaatgtagaacctacttcactacgaatgaatatctaagatattcaaactctactaaataaaatttttgaaatttttagtcattatacctttctccaataaaactagctacttttgtactcttcaatcaacaccaagaactcaatatctaaaaaataataaaaatattaatattgattaaattttaaattttacaaatactataaacttatatatatatataaatatgtatggactaaaaatacatatatattatcgattataaggagtctctctcataagactgccaaaaaaggaggaggagctcagtaaaatttgacaacgattaaaaaattcaataataaatatatataaaaaaatcaatagcaatttaaataaaaataaataatctaaatataaaatttcccataattaattaataaaagctcaaaggaaaatcaaactaatagctaaataattaataaaaattattttttaatacctaaataattaatattatcgaaactaaatattttttattgtctaacaacaaataatataaataatttttttattatataacaacaaataatctaaactaaattttttttctaaatatctaaatctaaaactaaataattaaactacaccaaatatttttattaatacctaaatctaaaataaattaaataattaatctaaattaaaatttaaaatatgtattaaataaacaagtatatatgtatatatataacagtatatataaaatatttataaattaattttaataaataatttaatatatacctaaaggaggtggtgggtgttagtggccacgaggaagacgaggatcgtggttgggaatggttggtgattaagtgaacggattgagagaagaaagaaagaaagtatcgctggtggtggagcttgtatgggggtttcttggtggttattcttcgttgatggtggatgtcgctccaaatgggatttcttggttgttgtccttctgtggtggatatggatttcgttttcgaagcttcaaagggagattaagggagagacgagagagggagatcattggtgggtttcttggggtatcggcgctgttggtgtgtgtgtgtgtgagagagagtgagagaatgagagagagagagaga

SEQ ID NO: 60950 - DNA, 550 bp, Cannabis sativa
ttttctctctctgaaattgcttaaagaaatcaactctcttcttctctttatataggttttgagggcctaaaaaggtggataaaacgcacatgtttaaatttcactcggatttaaatttttgggaaacctcaacaagatatttttttttctgctgacaaagaggcgggtcgcggcatgctaataccatgccgcggcccgtgtggccttctgagatattccccttgattttttcacgtaggcaggccgtggcaagctaataccatgtcgcggcccgtgtggtcctctgatccaaattccacatgtttttatcttttttctgaatttaaatttgatattttacaccatgatatttttatgcgatattttatcctttttctattgatattttctaactcttcatctattttaaatctgtaaaattaaaagataaaagcgtaaaactgctccaaacatgatttaaacttaatagaaaaatatgctaaaattaatctaaattcaatagtaaaaataacctaacaaaatttcatcaaactaagcttttactcgtcct

SEQ ID NO: 60951 - DNA, 1292 bp, Cannabis sativa
aaaagaattcaacaaacactttgttgtcagcagtaagtttagaaatgctaatcaaattttttgcaattttaggcacaagcaaaacatcatttagctttaaattgtgacccttatgagatcttagataacctgaaccaacatgagatatatgaagttgattcccatcacctacagttagtttgtccttaccactgtatgttgacttgttagtcatgttctcttggtcagatgtaagatgattgctcgctccggagtcagcgtaccaaccatcatgatcaacaacttcaggtgtagccacaaaagcacttggatctttcttattctgagaggaattgttgttgttgctgcctggtgtaaagcccatgtaggattcatcatatcggttataacaatgagccgccgagtgcccatagcgcccacatacttgacaagtaggtttagaatttcttcctccacggcctctaccaccacgatttgagttgttaccaccactggacccacggccattgcctctgccagaattgttctggttataattgctgtatccacgaccactagaactgtgatgtggttgtttgtttgccagtgcagctgaaggaccagtaccagttgtagctgctgcattttttcctgtaccagttaagaggtgaagtctttcgagcttactatcaaagctcagcagggtctcttgcatttcttgccaagtgagactgaccttggcttgagcttccaattgacacacgatggtgaggtattcagcatctaaaccactcaacacatttgacaccaaatgtgcctctggataaggatcacctgcgagagccaagttgtcagcccaagcacgtttttggcgaagataatcagccatggatgtgctgctctttcgagttgtctgaattttcgttcgcgtatcatccattttagcacgtgaatgtgctccatacaaattttcaagagctacccagagagatctagctgaggtacaacccattacttcagtagcaatgatctctgtcatggacccatataaccaacccatgagaagttggtcacacataatccactgataatagtctgggttaggttgaactccaaatcctggggtattttctccaggttccccgatggctggaataaactcagggggacacacacgtgtgccattgacaaaaccttcaaggcgatgacctctgataatggtggtaacaagatttctccacaaggtatagttatttctatctaatttaatagaaaaagggtgagtgagagtgttaccaaagggtgcactgcta

SEQ ID NO: 60952 - DNA, 1772 bp, Cannabis sativa
attttcaacttttcaagaataattgcactcttttaacacttgatagtagccatgacttacaattactaaaacaatcactttattcaaacttcaaataacaatacaacaacattttaatccaacataactagcttataaataattttccatcattcttcgaatatgtattaaaatttattattaaaaaaagtgtctttttggagagtgtagtacatatttttcatagcaaactcatccaaacaaagtaataaaaaaaaatcacccatatacaattttctaacttttcttttcatttttacagcttgctttgctttagtgattgttataaagatttaaattgttctgttagttactatgtaaattgatatgtagattttcataaaaatataaaaaaataaaaataaagaattacctcctatactatttttaaccattttttttttaaatttatggtttaggtttctccagtaatttctatgtgggttgctatttagattactcggttaggctcatttggtacgttatattaaatcgtattgtattgtattatattaaattaaattatatatcatgttttcatataataagttaaactttaatttacactaaaatattatatatttatatactcatacaactcaataccacacataattttacataaaaaatattacacgaaatacaatttaatataataatatagaataccatacggtttaccaaacaaataaaaataaaagaggaatgctaattacaactccttaatcaacttccacgttcgaaatcacatgccaaaatatttttttcaaagcggtattcgttatagttacagtatcatccctgtaaatttttgaaaaattccaaatagtttaccgtaccaaaaaataaagttcttgatataccagtttactacgcgcattcaaaaaacttcaaacgtattttcggcactgtaaactatttgaaatttttaaaaaattcacagggatgatgttgtaaccataacgaacaactccataaaaaaaatatatgtcgtgttttcgaatatgaaaattaagttgtaacatgaagttaacgaagttaatggtaacactcctcaaaatcaaaatacccaaaaaaaaagaaaagtaaagaaagagaggttattatgattattattaccttatgtgaacaagagcaccaagagccctaaagccacgaacataaagatcaacaggtctagccccaatctcacacccaccaggcaaagcaaccacaccaccaccaaaccgaccaaccaaacctccgatcacaaaaaacccacctcgtattttccttatttcctccgaacaaggctcaacccactcaaccccatcacagttcacccacatttcctcattaaaaatctcaactttagctcccactgacctcagaacagacaccattgttttagtatccgacaaattgggcacgttggtcagcttcgatgtgccccaacagcaaagggtcgctgctaaaatcggtaaagattcgttcttggaaccactgatgctgacgtggcctgaaagctctgaaggtccattaatggcgagtttctgagtttttgagatttttggggttttggggtgagagtagtttagacatgaaaggaggggttttggagtggagattatggttatggagaaagaagaagaagaaggttttggtgtgtttgagaatggtgaagaaatcaccattggagagatgaagaagtttttgccgccaaactcctttttcttttctctctctcttttttt

SEQ ID NO: 60953 - DNA, 827 bp, Cannabis sativa
ttccggttgtctcccatctggctgctcattcctattttcagggcgtgtctcattttccctaaattgttcttctcgagcattttcctgtctgctggttcgtgaaccacgaggtatgcctcgtggtcttctcactctaggttcaggttgattttgagcattggtcccctgtgccgccctagccgaggctacatcacgttctaactcagcattcgacgatgcgcctctttcagacggcgtctcaggcggtggtattctgtttcataagtaccttctcccatagactgggcacctccatgattgaactcttcatccctcgtcccaagattctgaccaattcacgttgatttctcctcgatcgtgttgtccgcgtactaggaccaacgtcgggttgggttctctgggaacgtgtggtctgcgcactggggccaccctcaggttgagttctcttggaacgggtcgtccttctggatcgctggttgatagacattctggagcccatgggctctttccaagaatgatgattagtttcctcatgtggggtgttaacattttctggattttcagccatgatggaggtggcttttcatcaaaagaaaggagggtttttctgagctttttcacagaggctcccaatgaaagcaccaaattgttaatgcagattttcgttaactaaatttgaacctaatagtaatgatttcacacagaaaaaataaaagatatagaaataaaaatatatgaacataggctttttttacgtggttttgtagttaaaattttgcgtagtccacgagtcaatcttattcagatttctgattgtttttaagggc

SEQ ID NO: 60954 - DNA, 2897 bp, Cannabis sativa
  modified_base (1446)..(1449): a, c, t, g, unknown or other
  modified_base (2840)..(2845): a, c, t, g, unknown or other
ggggaggaggttatatcttaaaatgaggaaaatgaaatttaaaataggaaaagtaaaaatttaaaatttaaggtgcgggaaatgacatttcagatccgaaacgcgtaaaattaaagcatgagaattgccgacggttttaaactgtaggccattcccttttaaggcacatttaaaaattgtcgcatataccttctgacagtttaaaaccgtcaggaatatcctattttttccgacggttttaaacactcacttaatttttttagcgacggttccaaaaaaaaaaagtgtttttaaaaccgtcgcgaatactcttttttgtagtagtgctaaaaaataaactagggaaaaaaaattcttaggcctttcagcatcaatcgtccaagccttcgtgattaatcacctccatcaatcgttctatccactgtcgctggtaataattcagtttttcaattgtattcctgcttttctccaaactataaaaaaacgtaaaaatttatattagttaatttatatatatattattatttgttatattataataaatactataattaataattaaaacttacgctttttgattttgtatataatggttggggtttgcacgtgcgacaatatcagtcatatatttcaaaacataaaaaccacattcttggtttttaggttgtcttgaaaaatttgctagtgaaattcctggccacagcccaacatacgcatttgatgcccttatatatttgtatgctctctgtttgaaaaattatattaacatttcaattcattagttaattaaataatttgttacattaatagtcattaaattattacatccccaacatttcaataattttttcaggaacattgtggccacgtataggatctaaatgaataatttttcacaattaatttatattaatttatatattactaaaattcttgttttagtttagttcatgttattaagttgtataaattgtaattaactaactagagtagtgtttagttgattggaatgttgtaggtagaattgaaatgacttttcctaaagtgaatccattcatttgtttggtttgtcatttataaataagttatgtcacataattttttacaactagcgagtaattaactagttatttgtgttatgtacttttccttccatatttatatttttttagtaaaatttattctaattatacggaaatttcgacagcataacgggtgtcaattatactatagtgaaatagaattgaatttcgatataggatgagagtacctgtatggtttagatagcttatagtgtttctgtgtttaatgcctgttgcatgtttaatttatcacgagagaagaaaatttgcatgtaattgagatttatatatatgagaagactataaattatcttagtaaacttgctattgcataccaattggtaataggaagataatcatattnnnncataatcaatagatacaattgaaatcgaagccctaactttaatcatcgttaatttcctttatttgcttcttaatttcactatttcttttaggattgttcaaaaaaattaacaaaccgcccaacccgaataaacagcccaaaccaaaccgagaataaaccgacaaaaaatacaacccaaataactttacgaaaaaattaaaccgcccaataaatatattgggcgggttgaatattattctaacccgcccaaataacccgaataaactgatttatatattttttactaaaattattcataatataatatataaattacgtacgtttaatacttgaactattttacatttaaagtttgtattttatagtgtttttttttgaaattagaatttgtagttgataattttgattatatttgaatattgaagttgaaatttagaatttacatatgagtatattttttaataaaaaaaatttaatactttaatgtttattcaattcatatttatattttaacattagtttaaactataactattttaattttgtaagacatatagtatacatttaatttttcaaatcaattatttgaacaccaaaaactaacaacaatgaaacaaaataaaaaaataaagataggtttaaacggattaacccgaccaaaccgacaaaaattattgggcgggttacacttcttttatttttttcattggacgggttacaattagatatttgcaacctgacatttatattgggttgataaaaatacactaacccgaccaaaccgactgatgtacacccctagtttctttagtgtttctaaatttaattttctcttaaattttgacataactcaaatagaagtaaattaagatttaattttaaagtacttaactacaattcttgtaggatcgacctcctcctggtgagtctataacttgttacggtacgtacacttgcgtgttgaaattaccacagcaaaaggccaaaattttgccaaaattgacgccaaaagaccttaaaaaccgtctctaaagcccagatttagtgcatttcgtccactttaatctgttaagtgccaaagtagactgccacggtgtacataagtgtacccgtgataaatttttattaatccaccaaatgatataaatatttaaaaaataatttaaaatataaaaaaattaaaataaaaaaataattaaattttaaatattttttcattttcatttttattttctttttcttttttcccctttttctttttcttttcctttttttttttctattctccttttccttcttcttcttccttaaaaaaataaaaaaaaaatacaaaattagattaaactctaactagttacaacaaaatattttacttttagtcacaacaaaannnnnnactaaaagtaaaaaaattgtgaataataataaattatcattcttatgttgtg

SEQ ID NO: 60955 - DNA, 1114 bp, Cannabis sativa
aaaaaaaaaaaaaaaattgaccgttcaatggcggttttaaccattaccggttttttcagttttcggttccaccggttcgggttccaacagtgttcgacaggtcagtttaaataatttttttaatttctaggattccattctcagccctaatgatttcttcaagagataatacctttttttataaatttaaatctaatcactacactcctcagtcatactcaccctcaatcatcaaacaaattaaaaaaaatctaaattactccctcatatataatatatagtgtgattgtataaccgtaagagcaaaaataaaaaatttaacacaatataatacatagtgtgactatgtaattgtaagaaaaagaatatgtagaagaagaaagtgagggcggctgctgtaattaggttaggctttctttaaaaaatcttttatattaaaaaaaatcaggttggataatttttttttaacaaactcgtacccagtcgaaatgcatccgcgttttactgaaatccgatccaaaatttgtaaaaccaaaatttcaagttttttgggtacgagtcggccgagttttcaagtccaaatatgcagccctaattgaagtagaggaaaagatggtaaagttgaatgtaataccaatgtttgccacatgttacacaatcaaaacaataaagtaaatgaacacagaattcacagaggctcgacccccttagttagtgggtaatgacctactctcctttaagttgtattgataccgagagataatactactcaaatactatagtgatgggatctaaagtagctctctaaaagttacaatgtaggaatcagagttagcaattcttaagtatgaatatagcagtgggtgtgtgagaaagagacgagttatcggacttagagctagggttttagtcacatagaatttagagcttaacacttaggattttagggtttgattaaggcactttatatagtagagcctagacccttcagttctcttaagaataggtcaaataagccattatttacatattaaattagtaaagggaaattttatttacaccccaaaaagttctaaaggcaccccattttgataatttttattttatataaaat

SEQ ID NO: 60956 - DNA, 635 bp, Cannabis sativa
attttcctttatttggatgcaaacctgatgttttataaaaaagcttcaaaccttgaagcatgagctagatggaaatatactcccctttgcaaaataatagaacattatcggcaaaacataagtgatttgagttctaaatctttacatctatcatgaaatttaaattctctcttttccccaactttttttaagattctcgataaatattccattctaagaacaaatagtagcagggacatggaatcatcttgtctcaaacccctcttggcatcaaagtacctatgcattgatccattaaacatcaaagagaatctgggagttgaaatacataccataatcaacttaatgatcttaattagcgggaaactagagagcatctaacatttcttaaataaagtcctactccaccgtgtcatatgccttcctcaaatcaagcttgatcatgcaattagatctagaattattcttctcataatgtcggaccaaatcttggcccgaccctaggcataggcgagctaggcgtgtgcatagggcccacctagctcaggagcccaaaaaaatttatcctctttcataattttattactgattttaaaaattgctatattttttttctaaataattacaggtgcaaa

SEQ ID NO: 60957 - DNA, 2009 bp, Cannabis sativa
  modified_base (384)..(385): a, c, t, g, unknown or other
  modified_base (588)..(588): a, c, t, g, unknown or other
  modified_base (645)..(655): a, c, t, g, unknown or other
acacacacatgggatcagtttttttcaacactaaaaatgtgtgttttatgaaacaggagaggcccctacattgtgggaatttgtggggctgaaaacagagacaaaaatttgtcacctaatttctgaacttaaattattgcaagtctaagcctcaagatatagagtcgcctatattttagcatttattttaagggtgtatttttagcatttttacaatttaactaaggttgtttttccttgaaaaatgaaattggttttaaaacaaatatactttatatagtagagttttttaaaaaattaagcttattttaaaagaaatatttaaactccatataggatttttctcttttttcttcatgcttggcatttggttggaggtaatgnnatggaatggaatagaaagaaaataattttcatttcattcctttgtttggttacattttaaagtattggaatgacattctaatggaatgctctttccaccattttagtggaatggctattccattttaaaaagaaaagaatgacaattccaatgtaacaaaaaaaaaaataatgatttttttatcaattttttttatacatttnaaattttattccattccattccattcctattcctattctcattctcattcctattcnnnnnnnnnnnttcctcccaaccaaacgcctaatttttttttttcttcagctcctaatgctcccatgagtgtcgtcgaccaaatctaggttgatggctcctgggagccatgcctctagctgtctttgagcaaggaggaggtcccctttggtgggttcaagtaggtgtcggaccttgttccttggggacagtgttgtggtccttgagctttcaggcgaggtggccgccattcttggtggctgggcatctctattgagatgctcctcgcctttggctgggggttgcaattggagtcgtcctcttgggccgcgagtcggcgatggtggtgggcttcttgtggatctccttctctcgtttttgagaatcgcatttttcaaaggcccttttcagtatgagcttggactgttgagtggtgttgttcttacattttttttcaaatcatgatgtgtgcccttgggttactattcagggatcttggctccggtgcgcaatgggaggctaagcatggaattttctcgttcgaagatggcaacgctcttttgcatttgctctgcttatttcaagctttcgtgttgtctctgtgacttagggagaaggtctttaaagttgttttatctgtttttctatttgtttggtttgtttatattagcttgctaagttttttttggtgttgtgcaccttttgttcttagtgaagttggtattaggccttttttaaggggtttatccatttagatgctcctgcatgagccatgagcttattccacctttcattatcggcgtggttggccaacatttgagtcatctcctagtgagatttgtacaagtttgtgtaaccttgaatgaagttaccctttcaaaaatatatatatatataattttgttttttgactactagaaaaaggcttattcctttcgttcctcaaattggttttttcaaggattattactaataaagttatgtgtgactgtttaaaattgtcagggatgctctactattcccgatggttttaaacattcatttagattgtgcaaaacgatcaagattttaatattaaaaaatgagttaaaatggtatccttgacaattttaaatcgttgggtatattatagccaacggtttaattaaaactgtccgccatattaattatacctgacagttttaaatcgtcggccatactatacatgacgattttaaatcggtagggataccgtgttaaacatataaaaatctttttttttttatttcattcaaacatttcagatctctctctctctctctgtctctctcatctctctttccctctcatcatcaaacccacgacggaacccaccatcaccaccatggagctctctctctctctctct

SEQ ID NO: 60958 - DNA, 1705 bp, Cannabis sativa
ttggatcacatttaaatgatgacagataatgtaagggtcgatccctgtcatctctccatggctccaggcgaagtgatcctggttcgcccttaagaaacttattagctgctcgtccaggttcttcccaatgtaaacacattttacgggatttcctaggtcgagaacaatttcttccaattcttcaattggttttaataagtttctttcatctttaacccgaaggtcaagatcctcatccttctttttgctttcttctgtcgagatcgccattaactaatgactggctttttatgttgtagctctatgtgatagcaatcgcgagctagcatctgatcacctcgcactactcccacaccttccaatgtttggaacttcaggaataagtgcttgatcgaactgactgctcctagtccaatcaatgttgggcgacccaacaatatattgtaagtcgatggcaggtcgacaactagaaattcttgcataactgtggtgaataggtgcacctcgcccaagattaatgcgagcttgattatgcactgactgacaatactgtcaccggtgaaggcgcaaagattcaccatgcaaggcttcaatttggcttttttgagccccatcttcttcaacatttctttataaaggttgtttactaagcttccattatttatcaacaccttctatatccttttattggagagctgaatagtaatcattaatggatcaacgtgaggatatctcacgttcttcttgtcttcctccgagaatatgattggaggttcctcagtttttaccttcttggaaggttctggggcaaatgtcgaccgctcattttttgtttcttcaacatatctcttctgggcattgttgctctccctagcgatatgtggccctcttgaaatataaccatgatatcctctccttcgacaggaagaggttgtaacccctggttgttcgggttgttcggcaaattgggtttattgtgtccattgccctatctcttcacatcctgtttgaagtggcctcgagcaatgagactttctatctcatctttcaactgacggcattcgttggttgtgtgcccaatgtcgttgtggaattcgtaataactattgggatctctttttctcctcgcgtgcctcacgggctcgggctttctgaaggcaaacttttgctcatgtgcgaggtaaatattctccagagtttcattaagctcagtataaatagtatacactggcacgcacttatcgtgcttattctgtttctttttatcctttaacggttcctttgaaccgtcctttctcttcgagccagaagcccctgagttatcaactctcgttggttgagacagtacttgttgaaacattgctgggttggcctcccgagcctgttttcaacaaattcatttctttttgagcttcttctttttgaacgaacacctgagccctttcgttgaactcagtgatgtttctcactctacaaccctataaatcatcccacagctcgcccgtagcggttgatggatcagtagagatccccacctgaagggttataagttgtgtactatcatctaaatttctaacccttgcagcaaccgtgctaggctccttggttgttgctttatagcgaggctgcttggctgttgctttataaggagttcattccttaattaattttaatgctgtgatcgtatttatgtgttgaaactaat

SEQ ID NO: 60959 - DNA, 815 bp, Cannabis sativa
  modified_base (43)..(53): a, c, t, g, unknown or other
ctttcatccatgttagaattttttcactaaaattagacaaaannnnnnnnnnntaacaatctcaatagttcggagggaatttttaaaggctaaaaaaattcaggggacccgatttagtacatgtcaaagttcgggtggagggggggaattactaattagcctaaaaaataatggattttagtcacaacagaattttttataaaaatacttctttttataaaataacagtaaaacactaaatggaacaattaaaattaacagtggaacaactaaaagtaatagtggaacaacagtttaaacttaacatagtacacaatataaaaaaatacacaatatttttaaaaaagatttcgcgccacagtaaaaaaaaaaaaaaaaaattagaaatttttgtagtgtaaaaatccctaaaatataacttttttaacatttttacaaaaatatatcgcatatttttttgctttacaaatatatgactttttttaaaagttaattatatggattacattttcctcatttttgtatattattaaaaaaaaaataccatatgctttgataaatttagtactttaggtttgaattaactttaagtatttttttaaatttagctttattatttaggctaatatgataattgtatttccaatttagattttttattattattattgttggtgctatttttgtctcatagatctaaaaaacattaaaatagagattaatcacaaaataaatatactttaacaaaccgaatgagaagatgaatgaatgattgaacacaattgttaattgtttatatagtttttttttttttt

SEQ ID NO: 60960 - DNA, 1537 bp, Cannabis sativa
tatcaccaatcactaaaccagaatcttcacttgagaaagaactcaatattcaatcttcaatttcttggcagacttccataaatatttaagtgtcgtaacagaattgtgtgggcgattcttacaactaccaagtggtattttgaaaattacaagagagagagagggagagagtttttttgacaaaaagttgagtgtgttagaaagtttttccttaggctctctaactatagcgaaaggtcttaccaggaaaaggaaaccctaaagcctttttcttaacaattaattaaataaataaaaagggaaacaagagagtcaatgcttagtcaccaagcatctttggcagaaagattgcttcggttctcattgtgctctttattatttccaagcctaatagactaaaataactcattcctttttatttatggcataaataatttattttttacatttaaatactagttttcataaaataattgatataattatttttcacaaaatattatttaaatacttactattaattttcgacaacaaaatatctaattaataataaaatatttattatctttttcttctttattttcacaaatttggtggaatattctcaaaattgacaaaaaataatgtgaatattaattaattaaataatcaattaagtaatctaatgtcaatattatcctaaatattgtggggaccatggacccatacaaattcaggctcttaataagatagatacgaaatttaacaaataaatttcttaacttattaattcctcatgactccactatagactcggaattacactcctaattacataaaatgctctatatatcaaatatagatacattataatatcatccatcatttttatcatatcgatcatttatcctctatagaaagtctacaattaatatggactaaaattattattttaccctttaattatattttatctttaaaacatttaattgacttaataatatttttatgaactaatataatcattgaaatgagtattctatcattaaatactttaagttagatcaaatgaaacttttatttcacttctaagatagaagttaaagtcaaaaagttacttctttgtggcattgtaagtattaaaagtgagaaaggtgagattctaaaggttcacaagcataaactgaaggcatgcaccagtgatagtggagtgttgactgaacatctccgaaatgacaaaacttaaagcaacaacaatatgtagctaaagacgataacaaagcgctttacgggaggcaacccataattagtttttatttttattcatatttatcaaattttatttttaattattttgtattttagtcgaggtatcgtgaaatacgtgaaaaattttgaaattttttttggcgctattgcgccgtgcgtatatagaaaaaaataataaaaaaataataagctaggggctatagcgcagggacaggcaccataacacccaaagttgaaaaacacccaaagttgaattttgaagaataaatgccacttaaatggcacatga

SEQ ID NO: 60961 - DNA, 912 bp, Cannabis sativa
ataatcagtgggtttgggctcgaccttcacatattagacctaaataaatataaaaattagtattttataatatgcagtgcggtgcagtttgaaccgcatattaacaattcaaaactgcaaccgcatcgcatcgcgcaatttaggaataattcaaaccgcgatcgcacagcaaagaatttcaagctgtatttttttgcggtgcgggcggtttgatgaacagccctagtatccactaaaataaagactagtagtacatgatacaaggaaactacagttgctcacattagaaaaatagtctcatgttctaagccttatttagctagatgatgagtggcataattagcctctcgtgggacatagctaattgaagcttgaggaaataaagacatgaagctattaatattagtaatgaattcctgtaaatggatcttgttagagtaacctctaattacagcatctacaagaattttacaatcagactctatttggtgaatcacaagtgaatgctcttgacactactttagagtgtgttgtagagaatgcacttccatcataagtggatggtggatgcctttccaaggggtagccaaagctgtgacgatttctttgttgtgagttcgaactatcaagccaaatcctatcttgttcctttgagtattttaggttgcgtcaacatttagcttgagttgacctagaggtggtggttgccattgatgtgaagagtttttggcttcataagtgttgtttggtatgtttactgtattgtgttactaatattggagcaataagtcttctatccattgaatggtcattgaggcatctgtgacttgttttttgtggagcatttcattcttgcaatgccatattttccaaagtagacaaacaaaaaactgaaagtctttgattgtcatt

SEQ ID NO: 60962 - DNA, 608 bp, Cannabis sativa
ttgtattccagtcgagtcgtttctttcctggtgtaatgtctgcaaagtaagcttatgaaactttagcatgtgcaaaagaataaatagacaaatgaggttaagaaatggacaaaatgaaatagataccatgtaaatggtcttccaaagatcctagggacatatatttataaacaagaagcctttgatcaccatcagcacaataaccagtaaggttaacaaggttagggtgatgaagaagacttaacatcaaaacttcaaccaggaattccctgttcccctgcaagccgttacgatcaagttgcttgattgctacaacctatacaaaacacacaaaataacagaatccgcagttagcttgcaatacaaacaccgcccaaaaatgactcaaattaaggtaaagtgagataactatgccataactggtgggctctgtaaataaattggtccaaaactcagaagatgaaaagcatgaaagaaaacatattgacaaattaagaaggtcaattagcatcttagttttttttcataaaatggtaatcgtattattgcactggactaacctggttagtgctttctaaaggccctttgtatactcgaccaaaacctcc

SEQ ID NO: 60963 - DNA, 1124 bp, Cannabis sativa
catgtactcataaaaaaaaaaaaactaaacatttcaatttttctattgtttgcacaactaataacaacacacaaataactgtataacgatctgacttaatatacatcatcttgttgtgacaacaaaaacaaaaattgtaaaacaacacactaatatctcacaaatattataataataataataataataataataataatacaaaaactttaaaacaactacaaaatacttatatactaacttaaaagtatatatgtaccctaaaaaattaatcttacatattttttacttgttgaaaaactaaataacaactaacaaaaaattagatattaatccaacttttatatgaaaattaattagacaccaaaaattatgtcaaagctcaaaataaatattgaaaaaaatacataaaattataaaataaaataagttgtacattaccttaaagatatttataagaatttatatgagttaaaaataaaaataaaattaattcgatctagtatttttttatgaaattaatacgatttgtttgtattagacaatattttaatatttgatttaatttgtaaatattattggaaaaaaaaattaaaaaaacagtaaaaacaaagtatttatttttttaaaaaataagtgagtatattcacaagttatctctctcattttttttaaataactaatataatttttctataaaaataaaataatttaattaatattattttatattacttttactttttcaacttttaataaataaaagataaacaaacaaaaaatcaaacaatatttatatataaaaaaaacttttgaaagtgccaaatagcatatcctcctctcaccagcacaaagtgagccccccacccatcaagtctctatttcccaaagaacctgatcacctcgtaaaaatgtaaataagaaaaaaaaaagaatagaaataaaaaaaatgcgaatcccaataaaaaagttaaaaaaataactttttagttaaattttgtaaatttcccatttttaattgagttttaatcatgtttggagtatttttacgcttgttatcttttatttttgtagatttaaaataaaagaagattaaaaacatatcagagaaaaaagatgggaaa

SEQ ID NO: 60964 - DNA, 1149 bp, Cannabis sativa
  modified_base (27)..(49): a, c, t, g, unknown or other
cattttagaagttcatatttagggtgnnnnnnnnnnnnnnnnnnnnnnnatctaagattctggtaaaataattcccaacaccttatgcaattgttctaggatgtctaatgtacttgattgtgagcacgagactggacatagctcacgctttaagcatcctaagtcggttcatgtccaatccgggcatggaacattggaaggcccttaaatggttattgaaatatttgaagggcacatgggattatggtctgaccgaagttgaaagggttcgtggatgcggactacgcctcaaatagagataccaggaaatcaaccacttcctatgttttcttgaaaaatcataactgtataagttggaaagcctagttaaggaatggcaatttgggccattttcgcaaaccgggtcaggcccctggcccgacagggagactttggcccaatcatttcgggtttttatcgggctctatgcccgacccagtacatattattttgggtcgggcctggcctggcccggttttagatattaaaaaaaacctaaatccctaaaaaaaaaacagtcccaatttctttagtgctctacttctctaccgtttttagagcgaataatgctttcgacagattgaatcttgctccccatttcttcctgatccatttctttagcaaggagaaagaaatattgggcaagaaacacagagatttgaatcccaacagtatctactctgtctcgagaagaagaggaggaatttgaagtaaaaaacagagctttgaagttgatttttgttttttattctcttaacctcaactacttcatcactatttttattggattttattttttgtaattttatgtcatttaattccatgcctaattatatattttattgtttttctcttttgtcatttctccgtttgcaagttcagagtgtgttacaatggtaatttttttttaatttttgaaaatttcaaaactttgccactatggaaagtgctcattgacatattggaccaacacaaaagcattattgtgttgttgagtgaaaacccagcttcaaagataatggtggagaagaccgtttcaagccccatagttggagatcctattaagtggcggtagtccatgttagtgttgtgttttgtgtcctaaataaa

SEQ ID NO: 60965 - DNA, 1226 bp, Cannabis sativa
ttgttaatagaattgaaattttatgagaataggaattttgttatggagaaaaattttaacgtcattgctcataagtcgtttagggtatataatttgttaaaaggaagacaatgggtgaatacattgatcgtttttgatggctatgtggatcgaattgttaaggagttttatgctaatatcactgatgagtatctcgataaggattcttttatgtttggtaaagtttttgtcaggggacactgatgttcatttattgtgaaggatgtggttgaagctcttaatctgcctatgggaattgagccaactgaagttaaatttgatcgttaaaaggtgttcgagtatctcaccgatgacaatgatgtggaactctccgacacaatgcacatgtctcaacttacttatcatcatgctactcttatgagattttccctatccaattgttttccttgcttaaattcgataaatgtttcaaatgaacttgctttctttttatataaagtttctacaggtgcaaaaattgatttgtctgacatgatttgggagaaaattatctcttgaaaagggcaagaaacctaggcttaatcttattttccctcacttgatttataagattttgtctaaccaagaggagttgattcttgagaatggaaccatagaaatgcctgctattggtaccactttcaaagtttcaggaaaatctgttaagaaaaaggcttggtctgcttcccttggtgctaataatgaacctgttgttgcatttgcctccacttctgctcctacagaaatgggtgaattcaacttgcatttggaaagaatagagacaagtcaagccttacttctcagaaggatgaacaacatcatgaaattcttccaatccaatgatgatgaataagtggtccattttcaatctttttgtttttatctatgtgttttgaactattttgactttgtccatgttttatttgttatctttggctcattgatagacaaaaaaagtgagtagtatttactttttagattcttggtacaactctggacccttattttatggggaatctgtttgtggtttgtgaactttttcatttaaaaaggtatttgttttatgtgttagtgtgctttcatggagggggggtgttttttatgctctattgtttttgtttctaacaattgatgtaggttttctcattgtaaaatgttttgtgaatcaaagtaccaaagggggagat

SEQ ID NO: 60966 - DNA, 1017 bp, Cannabis sativa
aatattcttttatttttaagtatattctgttaaaccaagaaatgttaaacaagaattgccgttaaataggcacttttaatatataaagatagaaaaaaaaaattactaataattcttcaaatccctctctcctatatatatactatgataaatgttatttttagttttttttaatatcataattttaaaattaataatattcgatatagtgataatcattgaaatttgaaagcgtaatactagtaatttaaataaaaataaaaattactattatactttgtaatatgaacaaagttattattaatttttttttaatttcgtctggtactacatatttttgtagagtcaataatttagaatctatgttttatatgtgccatgtttaagacaataataaaagttgtactgacagaattaaaaaaaaattataattttacaaatactgagtacttatgttgttaaaaacaaatattaaacttatgtcacttataaatttaaaactttaaatacttattttgttatttatcctaaaacaccaataagtttttgtttgcaagctgagttgtaatttaataagttagtagtggtaggcatagcctaatttttgacctaagaagtaaaaattaaaacatagaaattgctgtatatactaacaattaatatttagcacatgctttttataaatgactccatcatttcacgtactttaactagttactcttatttaatattacaataattaaatcttgtaattgattgttttggagagagagaaattcgtacaaaactataaataaaacaagtgaaattttggtattggaatgccaaacttgatgcaagaaatggcgttgcattaaactaacatgaatcaatcatcaacatcatttcatttttcctattaataatgctaaatatatttttagagtatgtttggaagtaattgtgtaataatgatgcacagtataattatattgtataataattatggggaagcttacaaaaatactgaaatttgag

SEQ ID NO: 60967 - DNA, 628 bp, Cannabis sativa
aggtgagatgaaggacgcggttaggccccacaatgctcaaactcccattttgaaaaaaataaaatatagttaataataaaatgaaaaattatactcataatattaaatatatgttgcaactcggtgataatttgattagagtaatatataagagattcagtgttcaaattctaataacctcatttttttcatttggtcctaattttatttttgcctaaaagggtcgactgtgatagtattatattgaaatatattttatgcaatatattttatgttgaactatatgtggcatttgttagatttttttaagataaaatgttattatattaaaattaagatcataatacaatagtcatcagaggaggtgggaattcctccaaccaaatgcattctttgtccactgaaagagcatattttgctaaagcatgagcaaaggcatttgttagatattgttatgtaaataatatgcatatgaatgattatataaaaatgcggaattaaattaaatatatacacgatataattaaagggtcgaaatacattcagctattgattctaaaatagttaattatacattcaactattgattctaaaaaataaaagagaaatcagtttctaaaacactaaa

SEQ ID NO: 60968 - DNA, 1883 bp, Cannabis sativa
cctagtagatacatgttctaaagttgtaaatgaaggagatgctaacattttgatattaataactaattaccactacatcaataatgggttatcgctacagaaataatttttttagttttcactaattaatgtgttggtaattggttaccaataacaaagtaatttttttttaataatttgttgataaatggctaccacatcaaataactatcatgtaaattgaattataatagtaatagaaatattaattttactagttttaaatattaatcgcaattcatcatgaaaatcttgagttggaatgcacggggtttggggaacccgagtgcgttcagacatctacgattgcttgttcaacaacaatctccccatgttttgttttttatggaaacgaaactcggtatcaacccaatcacgcgtctccgtcaatctctgcattatcctaatggcataaaatctcctcgggtgggtcttagtggtggtctcatgctcttgtggactgatgatgttgatgttaacttgctaaattttggtactacttttttcgattgctatatgatgttcaagggcagtccaagtttccatttcactggtttttacggggccccggacactaccaatcgttctgccgcttggacacttcttaaaagatttggtgatgttgctccacttcaaccttggcttgctattggagacttcaatgaaattttgtctaacaatgacaagttgggtggtggtcttagacgagaatctcaaatggaagccttcagagccattttagacaaatgttctttgcatgaggttccctatattggtgatcattttacttggattaagaaccgcacggccttggatacaattaaagagtggttggactggtgcttcatcaataatcattgggagtctcattttcacatgccaacggtcgaacatctagatttttaccactcggaccactgtgcaattattacatctttttcctctttcacaagtgctgatcatcctgttaaaagtaaaagcagattccggtttgagaagctatggcttgctgatcctgagagcagcgatatcatctccaagagttggttaaactctcttcctactaatctgattgcttctgtggttcacaaccttgatttgtgtgcttaaaatctgcaaacttggcatattaacaagtacgggaaaatgaagaaaaacatcaaaaatttgtaatctcaagtggctgatctgaacaatgctacaattcgttccagcaaacagctagacgatttacaaaatgctgaagcaattttagaggatcttttggagcaggaagaagtgtactggcaacaacgatctagagtcaattgtcttgcttccggtgatcgcaatacgaaatttttccatgccaaagcgtcctctaggaagtccaacaataaaattaagtttctctacaatgctctgggtcagaaagtgcattcgccacctgatattgctgctgttgtgcatgaatattttgctgaaattttttcagcttccaacattgaaagtgaagctcttgcctcaactcttgcgtgcatccccaccatggttggtgctgatcttaatgaatccttagtgaaacctttcacaagtgaggaagtttatgctgctctccaagctatgggaccggacaaaagtcctggaattgatgatatgtgtgccatgttctatcaaaaagattgggatattattggtgatctcgtcacaaaagctgtcttaagtgttcttaatgagggggccgactccacagctttcaatagaacaatcataactctgattcctaagatcaagaagcctcaacgcatgaaggattacaggccaattagtctatgcaacgttatctccaagcttgtcactaaggt

SEQ ID NO: 60969 - DNA, 2471 bp, Cannabis sativa
tattggcaataattggaagtttaattgcatcgaattattattacttattaaatcatcttcgtaatataactcttcaattaaaccaccaacatcctcatgaggaataacttcattatttttcttattatcccatgttgttgatggaaattggaagtttaataattgtttttgaaattcttccatattcatcgtactgttaatatatatatatatatagatttgtctatttatatacgcaggcttattattgattatatttataacatagagtaattagcaaattcctaatatacttattatttctaattagtttttaaaagaattatgttatcttttttgacaaaaaaagattattatttttgaacaattaattaaatgtaaataaataaactaactcaacctatgctcaaaaattaagagggtagttttgtggaatgagaaagaaggtagtgcaagaatgcttgatcggtggttcgagaggtaagacccagccaactactacaattttactatttaattacattaaataataacactttcaaaaaagcttgataaatgttacggacttactaaaattaaaacaaaaatataaaaacaatttctaatttcaaagtcagagaaaccccaattttcttcttctctccatcgcgctcttcgatattcatcttctcctcatcgctctcttcgatatccaacgttctcttcaatttctcgtcatcacaatcaatctcaagctctgttcagcatgcaggtatctctcctctccaacctgtacaatctttacacattctttccttaatttaaccctaaccctcattctatttataatcaaacctttgttttgtttttgttatatttttcagtactgattctttgacttaacaatcattttgtctttgttattgcaataatggcaatagcgatgtagaagtatctctacttttacattctaataatatcaaatttttatctaagctctcatttatatcaatgtaatgtaatgttgatgtacattgcaagacatttgtttgataaaatgtctgaaaggcagcattttgatgataaaaaaattttagaaagcaaagaagcagagtaagattatcaatgaaaactcccctgaagcaaccttccaaattacaagttttatttttattcgtttctatttttattttctttcaatcaatgattcaatattcattttatttagatcagataaatcaaattcagataaacaagttggcttgccgtgagttgagcttggaatagtttgaaagttctaaggatgggagctaacattgtcatgaagaatattaaaaggttgtcattgagagttttatggcaatactttcgattaaataaaccacttgtgtaaatttcttcttatagattagaaatatatattttaaattttcttcaacattatcttggagaaagtctcataggaattaggactatcaacatgacaaatttaagcacttgcgaacatctgtatttatgaaaaaaaaaataaactgaagctagaagaatagtttagtacatctttcgtctctcagctctcaaaggtttttcactgtctttgctctttttttagttcagtctacctataatttggtatatataatttactctttttcgttgacatactttttcgatggtgctatttctgtagtgtggaggttgactcttcatctggggattcagataacaacaaggttgttggctcccgaaaaaggtattaattaagacttacttttctttgcttttctttttatcccaaagtttttttaaaaacctacacttgataacaagtactatataatttcattgtgactgcattgctatacattatatgtgttcatctaggcaaaggtccgaatcaagtgggggtgcctcttgctccaactacaaggcatgccgagaaaaattgcgcagggacagactaaatgagaggtatatatgtataaatatatatttatatatgatacaaaataatatagctataactatatatatatatatatgaataaatccttccaataatactttgcatatttgctaaattttgagcttagttaattgttctccagggatttctcatgaatattatttatgtaggttcctaaaattggttgctgtgatagagaccgactactggtacatcaagagagcttattgtgatgcctagtaatttccagtgaactttattttattcttgtacacatgggattttaagattagtaatacaatggttggatggttgctgcttctagtatttattatagacaaatttaaatgtttgaacttaggatttcttttcgcataatgtggtgactcagtacactttctggactgtgtaggtacgcatgcccgtagcaggtccacactggtctttttgttcatccacggtgagccactgtttgttgacaaacattatcaggataaggcactttcagacttgatcattgttgccc

SEQ ID NO: 60970 - DNA, 1328 bp, Cannabis sativa
  modified_base (658)..(663): a, c, t, g, unknown or other
  modified_base (950)..(952): a, c, t, g, unknown or other
  modified_base (1302)..(1302): a, c, t, g, unknown or other
atgtttggcggatagtgcaaccactcatcaatacttagaagcgatatatattttttaaatttatcaagaatggaggaaaatattaatacaatatcaggcactgcaagtttaattgaaggctccagaagagcaattatattgatgcctagagaatcaaaaattattatagaaaatgccttattatcaaccaaattaaaaatgaaatttgttaagtttcaaaaatatacattgtaatggatatcatattgagacaatagataaaaataattttgagtatctttgcattacatctattgtttcaagaaaaaagtacattttagaaaatttgtctgatttgtcttcaattttgtacgttacacgtagaagtataatagaaactcatgttattgtgaacaagaagttcataaaccagaaaaaataatttataatttggcatgaacggtgaggccatcccagttcaatcatgatgtgtggaataatagagacatggttcatccattgaagaaccagaagattcaattatacaatgagttctcatgtgctgcttattcccaagaaaagttaatcattaagccatcaccagtaaaagttggaattgaatcccttagatttcttaaacgaattcagggcgatatatatgggcctattttcccaccannnnnnccattcagatattttatggtattattagatgcatcaactagatggtcactattcgcttattatctactcgtaatgtagcatttgcaagattgcttgctcaaataatctaattatgagcacaattcccagactatgcaatcaagataattcgtcatgataatgctggtgaatttacattacaagcttttaatgattattgtatgccaatagggataaaagtagaacatcctgttgctcatgtacatacataaaatggtctagtggaatcattcattaaacgcctccannnaatcgcaagaccattacttatgagaacaaaacacctaattttaacttagggacatgctacttttcatgctacgatactttttacgcattagaccaacatcatatcacaaattcttcccattacaattggcttttgatcaagatccaaatatttcccatttaagaatctttagttatacattatatgttcttattgctccaccataacaaacaacgatggaacctcaaaagaggctggaaatatatgttaggtatgaatctctatctatcattaaatatctcgaacccataattggagatatatttacggcacatttttgttggatatatattaccaggatctagatttantaccatgtatgtttcattaacatcct

SEQ ID NO: 60971 - DNA, 910 bp, Cannabis sativa
caagattgcctaactacgtgtcaagtaactttctttctaactttttttttttatagtaatttttttgacaaatagaattaagcatattattactgtaaaccccaaaaaaatgggctgacttgtaatgttttttttttttggatgatttctgaatacaaataattataattttttattacaatttctaaattaattttttaatgcgaaattatacagtggaacatttttatttttcattataatatggaaaaaaaatggaaaaaaaatattataatataatatttatgataccataaatataagttatatattgtaatagttgattaagaagttgtaataatagatataattaaatactcttctaattagattatacttgtttaagacattatacggagttttaataaattcacaataaatacttaatattgtgaaataaagagtaaattgtccaacaataaaataaaataaattgttgttctatatctttaacaatatattaaaataagtaaacaaaaaataacaaaaagaaaaaaaaaattatatgtagaaagaaaatattgattatacttttagattacattttcttttgtaaatataaatatttaatatattaagtttgaaaaatatactatgaattagttttatttaattacttttacaatatacatgatgttttatctgttgccacatcacttgttcgaaggaagataatcacagattccacttgctccatttgtaaacaagcatgggagtcaacgggacatgctctttttagttgtaagtatgccaagactgtttggcgatctttgggtttaagctttaattggtcagttgctgcatctatgaaaaatagtacacttttcctccatctacaacaaaacttaaatggaacaacttttatgtacaa

SEQ ID NO: 60972 - DNA, 3148 bp, Cannabis sativa
atgggatgtgaactagaattcaaatgcaaactgaatatcatttgatatgccaaaagaggttaagacattaccgactaggtaatccaggatacattgtgctccctccacttaaaacaatatgctggtaaagctgaaaagagaatttttatgatattcagataaagatgacaggaaacaaagattatatggcaaaagtcacagagcaaaattagtactgtattgtgaatcggataacaagttgcaacatgctctgcacatattaatcaggttaaagagaaacaaaactattaccatcattcggttgtctatatccatttcctgaatgcaacgaaataccatgtcagccattccatcaccttcgacgtcaatcaattcctgtaaaaagaaagtagccaggaaggttagaagccttgatcctgtaagatattgtgatgtcctgccttcatagtcatagatgcagcatattagtatacagtagataaaagtgaagtcaatcctccctgaaaagaatggtttaaaattgcttgcaagaaatagcgatttaattattgaaggctaacacgaagcaaaacaacttcgagtgattgtattgcacttcacccgaaataataatttataaaatccagaatgatccatagtcattacaccaatgagcctgaagagacaagagaaaagaaaatagccaaagcttacaggggtgaaaagagcctcaggagcctgaaagcgttctgtgccaactttaatgacccttccatctggtagctgataacacaagttatgcaaagattaataaaactactctgataagactactttcaagaaaacaaaatctaacagattaggttaatccaaatatcaaacttctaaccaatagtaatataagttaaagcaatcagattataaacacatggaataatgtacacagacacaaacaaaataagatgaacttaagcttctggataccccaaaatctggcaatatttagtcaagcaataactttacttggatagcaatagataccatatacttacagtgtaatcctttacaagaatggtggtttcaagtcccaactgatactccctcttgtaatcataactacattaaaatagtgtaaggtttacagaaacagaatcaacattatcagagatttaggatgtgcattaaattgtttcttcaccttatgtagcaaagtttctctttgatttctctaacagtctcaaagtctgcattcctattcattgcataccttcaagaaagtattgtagattcaaagtaagatataaatattagttaaagatccaagaacaataccaatgttattggtaattactgatataaccaattggttctcaccctcgccgagacagtaaatcaacaagatatgaggtgatgtgcctgccagctacattcattcgctttgtaagatgaggaaatgagtaaccatcaacaactggaacctaggaaatgcaagaaaatactcaatatggaggaattaaaataacaagaaaacatcttaaaatacaactgagcaaattaaaagcatcatgagaaatttaccacatgagttacaccatcaccagagtcaatcactagtccagtcaacaaacctgtgagatgtcaagacatgctcaacatgagaaaaaggacaagataattatagtttcgaaaggatttcctccccttatagtcactatgaactgtctaaaaaagaaacatgttctggcaagttattgttgatagtttgaggtagtttctgcttgtctttagtacataaaatcccacgaaaggaggggtaccaattacataattgggtaaagataaattgaacacaaaagtacaaggaaaaaaaaaacaataacaatatagacatataacctttaattatctttataagcaccttgagcatacagtgtcaaaacagcttggatttgaatgaagacaccggcaaaattgtatttctcaaacatggtctcaacctataaagttgaactcaggttatgccaaacatatacatcaaggtgttggattccattaccctacaaattactaaaaaagcaagaagagacaaaccattttctcgcggtttttagaaggattcaacggcgggtctgtcagtagaatcttacattcagttggatctatctgttgaaagaaaaattaaaaaaccactataagaaataaaaagcttcccacaataatgtcaagcagcgttagatagcttacttttagttcattatagaaagcatgatcccaaatatgaaccatgtcatcccaattttgcacaatgccattattaacagggtaagaaatatccagctgatgtcttagttcagcacaagcttctccaacaacaatatcctgaatcaatcataaacccatgaatgacaaaacaaaatctttccagaaagtaattcacaggctatgaatggataaacaatcaatgaatttacccaccttgagctcctgctcaacaagtgattcttcataccgaagcataggccttcccaccacacaaggaaagactgaagtgggaaagttctcaccagcaaagccacatttcacatactgcatttcaattcagatttcaacttaaactatatatacacacaaacgagtcaacatgaaaatggggttttccgagtttccatataaatatatatatatataccgaataaagaagatttgtatggaagtatgtatttaagttttactttaatggatttgaataagatcagggcgaaaagatggttaccccagtgccattatcgcagacgacgacatttctattatccataattgagtgtggcttctttcgtttacttcttcttagttttcctcttctgtcgggttttggtttatggaaatggcagatcctctctctctctctccctctctctctctctgcaacgatggatcgtacggccttttctatcagcagaaatgcgtaaaaatgcagtaagaattcgaagaagaagaaaagaagtacacttattaacactttgaccctcgtatttgttcagttttatattttggtcattttttattttattttaggttaattaagaattttgttccttgaacttttaaacatttaaaaaaaagtctaacatgtataaaaatttaaggacttgatttggtacatgtcagt

SEQ ID NO: 60973 - DNA, 818 bp, Cannabis sativa
attaaattgccaaaagaagagacttggtggctgtcctagatgatgacacctagcaagtatgatttcagcaaaagattaatttgattaatctttattcactttaggataaataaaggaaaataggaaaattaaggaaaaacacaaaatcaagagaacccttttctctctctctcttcttgtttgtgcaccacaaaacaaagaaggaactcagcaacttttcatctagttttctggggattcaaccattgaatcaagagtaattggagtaggtaagctctagaacttctaaccttgagtttttaaagctttgtattggttttaacttgtgatttttgaaatgaagagctattaggatttaggggttgtgtagtctgatttctaagttgattttatgttgattttaaactttggatactagttttggtttatggggatagaattgagcaatcttgagcttagaaatccaaattttgatcttcaatggcatgtttggtttttgtgtatttttctgggattttctggttgaaatatatagtgtataccctatttaggtactctggaaagtttggaggcaattggacatgttttaaagaaattggatgttttttggagaagaatggtataaaccggttaatcggtttaccataaaaccaggtttctcagttctcgtccatttcagtgccttagttgggtgttttcctgtttcctaaattaatgtaatcccttgagagtataatagaccgttgacttgtagactcaggtttcccggattagggtttcagacatgtgatttatccagttttaatatgtgattaggg

SEQ ID NO: 60974 - DNA, 920 bp, Cannabis sativa
gcggaggtgttggcgacggtggagaaaatatcgctagcggcggtaccaccgccggcgtcgaatgggaagagtcataaattgtcaaggtaccccacggttcaggcagaagagatgatgttgaagatggtgcctgcgagagatgagtttggtgaaacaaacttctcaaagccctatcacacaaggcccaatcccttaactttttgttcatacccaaacacaccaaacttggcccacctaagcaaaaccattaccctaattcattacttcaatgggcgggtccaatgggatcctgacacaacccatttaatcaatatttcttcacataaaagacccaaacaaaagcatgtgccatttaatgaaaggtcacgtggcattcctctctaccacaaatggcctaacttatttcaatttactctaaatctagcccattatgacacatgtctcaacctaatttttccaattaatggatctggcctttgggacccaagtaaggtacaatctaatatgatggcccactttcctatctcctcttcatcttcttgtcacggtagggcacctttccaagtacctcctcttaccatcaacgtccaccatggatggaaggatccagctcaaactcgaacactttcttttgggtgtcccacatgtcagcagcagctaccatgattctagccatggggaagaaacaacttcagctttctcaagttttcccttctgtcaacccattaaaatctgtaagttccatatatgtttagttcttccatgtgtgggattcgggtcgagcgctccaatctcttttctatgggaattttttcttttgttcttcattactttcagctttttgggaaaatggaaggggttctcttgggtctgcctatctcttggaaattcttctcccatatctctcattcttctcggct

SEQ ID NO: 60975 - DNA, 2261 bp, Cannabis sativa
tatttattgaatctttctcaattaaattatagaacacctaacataaaactaaatatacgtgccttgcacgtaactttcttctagtatatatatatgatatcatttaattttataatcatttaaattatttatttaactaacaaaaataatcctatccaattcaaaatatatatcaccatttatgtataagtctaaaactaaaaatatatgtatatctctctttttattttcttctaaatgtttctcttttttttttttcatagccactttctttccttttttatatcaatattaactttagaatttatacttatgttaatcaatatcaacttatgttaagttaaaataatgattgagatttatacatgtgtactttttttcaggtcatcattccatcattgaaaattttgttaaaggcgagaatgagaactattgtaggttgctaggtttgaatagcagacacaaagatttcagtagagcaccagtgttgtgactgggttttatttatctactgcctaagaaatttggtattgtatttgtttttgttaagtagtttggtattatattttaattttagattttctactagttatttgcactactgctaaaagataaagcttctataatgtacatttaaaaaaaaatgcatgattttttatttatataaaatattgtatgataatctttttttctttttaaattttttagagttttttatataaattattttttttaataaatatatattatttataaaaagaatatgcataaaataaatttaaaattatttgacactgatttattatttaattaatatatatataataatttaactgccgcacgcgaaacgcgacctgtttactagttagtaataatccaaaaaaaaaatgctaaaattaatatatatactcatatatatatttaaattttcggtgtctaacttttatatataatgactttctcgttacaaattgatcttttatattttttttctagataaaattgatcttttatatgagtatttgaaatttattgaaggaaaatttgtaccataaatactatatatttttaatttttatatacttaaatactatattttttggggggaatttaataccaaaagttgtattttaggtctctccgttactactattttattagttttgattaggtgtacacgtgtaaggctcagattaaatctccatttttttttaaatgtttagttaaaattaaatacttaactttttaatttaatatatctaacttaaatttaattttcataaaattattttaataaattaaaataaaaaaaaaattaaaaaacaaatgggaatacgaatcaatcatcccaaataaccctaaatctcgtcgtcttcttcctgttgccttcaaccaaaaaaaaaataataaaaaaaaaaaattacagccggtcaaactaaaaaaataaacccagaaaccaaccccaaattccatttccttcatcttcaaccccaaaacaagcacaaacctattgttctatttacaattttaaagcttctaatttctaatacactccttccgcaccaaacaatgagcaaacaaagagggggaaaatcaagttgttttgattgtttgtttcttatttcaacgacagcaaaggtggtcgtcttcctcaaactcggagacacctaacatggccaaagctaaatgactcctcatctcactatttatttgttgtgattacaatcaataacgcatccattacccagaattccagacttcttcctcctagatataaagggttgttcctcacctttcaaaattgcaaaagtctcacggatggctggcctgcgcgattcttcactagttacacaagcagcggcgacctcaatcattcgaactctaaatgcaaaaaaagtcattaatatggctaaagcagcaatacaatggacttgtttaccaaatcaaacaaagcccttacatgagctccctcgctagctaacaccaggagagaagatgaagggaatagaatttggggttggtttctgggtttgttttttttagtttgagtggctgtaatttttttagggcttttttcataaatgtacaacaaaaataacataattataaaaaatgtgcaaaaaaaaattattttaaaaacttatatattttgaaaacttattacatgaaatcatacattttaatcattaaataataactatgtttattaatgctcaaaataaacaattttgtaaaattaattaaacagttttataaaaata

SEQ ID NO: 60976 - DNA, 1657 bp, Cannabis sativa
tggattggatcggatgattattttccaaatccaattactaattggattggatcagatgagggaaaaaatgttggattggatcggatgcccacccctagtgtagatattgaaagatacctaaattaaaaaataattacccccaaagactatttacataaatatggtgaaagaaaatatattttacataaatatgataaaacttactaagaaaaaatactatatttaagataaaaaaaaaaaaacttaacagatataagacatgtcacttgtattactataaaaaaaaaacattaaattcccttatttttttctaaaaaaaatttagaaacaaatcaatatacagtgattgtcgaaaaagtcaatggagctgccaccggcactaaaaaagtcaccagagttggcgtcaagaccgaaaaagtcacctgaattgttgacgataccagagaagtcgtcagaattaccaaaaaaagtcactaaaaagtcgtcgaagctgtcggcgtcactagagttagaggttggaataactcacaacaattacatttatcagctagctaaaattttcgcatagtgaaacaagtttcctaaattaacaaaagaaagaaaaaacttaaacttcaattacttaaaacaacaaagcaacaattaaacacgaaaaccgattatctaatacaaccaactaagaaattaatcagacatcaaacacctaaacaataaaaaaaaaaaaattaaaaactacaaataaacatataaaacctataagaaaataaattgcaacaattaaaaagaattgagtattattaccgcaaatatcccattaaaataaatttgaaaattcaatgagcccaatcacttggtgattggtttgttattcagtcaaacatgaactaaaaattttggccaacatggtttgttatttggtcaacatggacttaaaattggaaaaaaccttagatgacttttgttattggcatttctggataggtaacaggtggatatttacatcggcctattcaatctgggggcccattcactaagcctagatgggtttaccaccagacccacgtgtagaactggacagatggtttggattcgactgctacttcttgttcttgataactcagcgagacatatattgtaatatccttaatatgtgattatgtataattatgcatattttattaaatatggaattacatgaatatttagggcataatcaataagattataattttattaagctaattatttgaaattagggattattacaagaatgaataataagtgcattttatcaattacggaaattttaataaaatatataggcattgtatatgccatttatgaaataaaaatattttcagatttgacaatcgtggaaactcgattgattggccaaagatatcacgatgctaatagtatgagatttggttaaactggaaagtttagttggatattggtgttgtcgggatgtttcgggtgattgattatgaccaaattacccctaacactagagtttaattagaagccaagtaagggtataatgtgttgggctttatgccctatatagaactctatttcaatgtaatcttttatattcaattatcaataaggaaacaaatttatttgtattacttatttaatgtgttatttagttcat

SEQ ID NO: 60977 - DNA, 2468 bp, Cannabis sativa
atggtcattggacaagagaagtaatccattttggactcataatttctacttctacgactttttcagttttaacagataagtatatcaagttttttaagtcattatgtttaatatggattggtttaccatcgtttctttcacattaactttttttattatattgtctggtaataaagttttattttttgttattttgtaggttgttttgtggaggacctacaattacagagaattttctgataagttttattttaaatataatctgtttaatattgatttttcagcagttttaaattagggtgctagtttgttgttactagccaaagggtaaagggtaatacctttggctagttattcttagaaattttgttgttttttaatttattagtattgttgagcttgtgttttaggttgtgtgttaaattctaagtttgttttttaattttattttgaagattgccattctaatataactgtattttttagttttggtgttattatgttttttcagtttcgctacttctgacaacaactattataatggaaaggtattttttaatgtgacggggagttgtttgaagacgttatagctttattgtctaaatttccgggggcagttttatcctatgttgctcgctatttgtattatgcagctcatggtttgacaaaatatgcccttcggttagacgatgagctatcctggttcgagaagatttcaccgccgattgtggtttgttgcattgttaatcatgtgtgactctgttcaccgcgtcaaaaaaaaaaaataataatcaaggggttttctactaaacctcgtggtgaaaacaccctaaattaaatacatattttgtctctaatatatatactacattgtagagcttttcacaggctttaaaacggtatatagaatgtctaaaacagacactcaagtgaaaaattaagaccaaaatacaaaaaataaccttttttggtacaacccaactagactttcgattggtaacatcctataccaaccatatgactcgttcaaaacactaggagcttgaaaattttaagttttcaaagtcccaaaacttgctccaatctaacccatatgctatcaaacctttcagaacacctatatacgacataataagcatatttcacatatcaaacacaacaatcacaccaaaactcaaaagtttccagtaaagagcaatattgagttgaaaaaaactcaaactcactcaaaactttccacaacaactatcaagacttaaaaaccatctcaaataaccgaaaaatcaagcttaaaaacaatttcaaacttactcaaacacaaacaaaacctcattctaaaattacacatgcaaaccatgctttaaccttcaaaattcaaagagaaaagaggctaaggacaaaccttgatcttcctttcaaatcacatgaatttgttgaaaaatcttggcttcccttggtgtttcttagggtcaatcatacaagagagagaagagagtatgtatgtatgtgagatttctaacttagttttattattttaatcttatcttctaaagaaatatcaacatataccttaataacatatagttatccactaataaaatcactagaagctaataacaataaatttagatggcaaaagacaactttgcctttacttgaccactaagttatatccaaatctaggggtaaaatgatcatatccacatactccacataaccccaatattcaaactatccgtaaatcttacctcgctaattacaaaatactaatccatatcgtagcactgaaaaactcccaagaggtcacccatcctaagatttaaccaggtcaagcacgcttaactttgatgttctcaagtgatgggccaccaaaaaataagatggaccttggtgatataggtagcaccaatcaatccattcaagccattttcaactgtgtagtcacatacctacatagtcttagaatcatcatacttgaccttccccagacgatgtgggattgcaacgcttacccaatatttctccttacggatcaagggactactacctatcacaaacttgagaaatccaaagctaagcatgcttgacctggagtatcttggatgagtgaccacatgcaaagttttcctaaggagcatgagagtgaggacaaagcacgttggaaacacttgtcttggtttgtagggttagttgtcactctaggaagcagccaagtgacgtaccagtgtataagagccataattccatgggggaaggcccaatagatgcttcaaacgggagcgttacaaatggtatcaaagccttgacctagccaaaagggtggtcgacgaggactttggaccccgtaagagggggataatatgacagttagttgtcccgtgatttgtaaggagaaatatcgggtaagctgtgcaatttcacattgcttggggaaggtcaagtgtgatgattttgagactatgtaggta

SEQ ID NO: 60978 - DNA, 880 bp, Cannabis sativa
gaagatcctcgtttggtccaattgtacgaattggatatgtgggttcagcttcatgatttgaagtatggatttatgtccgattgggtggtcaaacatgctggtaattatattggaaagtttgttaaatcagaccccaaaaatttcatcggcatatggcgggattatctcagagtccgagtgacaattgacatcaacaaacctcttaaacggcgtatgaagctgattaaaaaagatggtacctggatatggactacattcaagtatgaacatgttcctcttttttgctttatttgtggccttattggtcattcggaaaggttttgtccacggagatttgattttaatttcgatcaaagcattaagccttatggtgaatggatgaaagctcctacgaggaagaagaattacctcataggtgcgcagtggttacggtctggccgtgatgaggaggagcaggtggtggccggtaatggattgtccagaagaacagaggaggcgatggacattaattgcccaatcagaatccaatctgatggcaataattctggtactcaagaaggcgctaatcaagcatctgatggtggagtaaatcatggaaagacaaccatgccaattagtgcaaatcaagatattgaggagctacagttggaagatcacaatgaagattctctcattattttagataataagagaagacgtactaataaggaaacaatgaaggagattaatgatgctgatagtactatgggcggattggagaatttgaatgaagagccaaaaaacgttttagaggtgggccttggtatccaggcccaccagttattatgagcattttgtcttggaattgccatgggcttgggaacccatgggctattcaatt

SEQ ID NO: 60979 - DNA, 932 bp, Cannabis sativa
aacagttttgtagaacatgtttttaaaaaatattttcactttttcaattttaaaaactgaaaattgattaaaaaaatgttaccaaacggcaactaaacatattcaaatatcgttcttcgttcctaatatttgtgttacttcattcacaaaataaaacgatagaataggataaaaaatcataaagtaagataatgtagaaactatacattttcaacaattttattttttaatacaattaactttaagattatttttaacacgaacatatccaaaaaaaaatgtaaatatttttgtcataatgtctctagatcagattattattaagttttattctgacaaaaaataatttaagatcctatttgtataattatagaaaatacagaatctattttatcatttaataaataaaggattgtatttgccctaaaagaaactttaataaaaaattaataaatgtagttttttttatcttaattaataaatatacttattaattaagtaatagaaaaatattcataaaataattttgttttgaaaaaattgctgggattattttataactagggaactaaaccaagcttcgcgcgagttcgacccaacttttgtaatcttttaattttttaatttttttctttgtactaattgagtgatataatctgtaatataacgtgtattatattaacacttttgaaattggaaacataatttgttatttttaaaatatgtagaaaaatagtaattttgtgataaatatttttttgaataaaaatcataagatttattaattaataaattcattcaaaataatagatccgatttcaaaggaacagtcatccagctgaagcacacgacctgtagaaaacaagagtctcttgccaagcaatgagccaatttatttgtagatcgttttacaaaacacaaatcaacaaaag

SEQ ID NO: 60980 - DNA, 610 bp, Cannabis sativa
cccaatcttcctccacatgtccctgtaaaatcctgacccaaatccatcaagccccgggcttttagaagggtgaatactgaacaaggcttttttgacatctccctggttaaagggtcttatcatatggacttgttgttctaagttaagacatcttccatgattgatactttcaagatctatcttcaaagtagcattgctcttgctgcccataaaggtctcaaagtgcttcacaaagtgcttgacaacttcctcaaagctatccacaatcttattatctttaacaaaggtggtgattctattctccattcttcttttcctcatggccatatgaaagtaattagagttttcataattaaatttgatccactgaattttactttgttgcctcagccacttcgagtacctgtctttagctaaaataaaattctgctgagcaatggtgacagctgcctgctgatgagcatccgaggagttggttgcagcagcctccttactgaggcagaagttatctttcgcagtcgtgtactccataaccacatccctaatgttttccttgcaaaacactttcaactcatgcttcaatctaagcattctctgcaccaacccagcc

SEQ ID NO: 60981 - DNA, 769 bp, Cannabis sativa
gtgataacaacggagcaatagccagcagtaaggaacctcggagccacaaaagaagcaaacatatagaaagaaaatatcatattatcagagaatatggggcaagagggaatgttccatcttttggtgattaaaagggaccggaccctcattcaaaggatgggtccggagggtgaaaaaatcgtctttaaacttgtccctcttcttggggacacaaacaagttcgtaaaaatacaaaattttggccgggctaggtgaagcccagcctctggcaacataaaaaataaataagcctgaaagcatgcgataagcttgtggaatcagctgataaggcgcaaggccaacaaaaacaaggaaattaattaaatagtcttgaagagggaacatggccccggacatgaggtgggtttggctccaagctccaaaccacccatagttatggttgggcgtctcttcgtctcgagccaagcagtgaacaaccctggacgcagatggcttgatgcctgccacggtcacaatcttctcgagctgatgagcacagaccaaggtagaatggagctcatccgcctcccagccattggcgcgagaagtatagttctcttgggcaaccggtcctttcataacctcctccaaagtagccagggtggccgccccctttttagaaggtttcgtcctggagacaggagcagacatttttctgtaaaaataagaaatccagcagttaggccccaaactaaaccctaatgtttaaacatgctatacaaacaaacag

SEQ ID NO: 60982 - DNA, 1027 bp, Cannabis sativa
  modified_base (938)..(939): a, c, t, g, unknown or other
acaagaaaagaaaggggggtcagggtgatcgccggcattagggtttattagggttttagagtgaagaagaagaaggagtaaataaaaagaaaagggaaaaaagaaaataattttttttataatttatttatttttataatttttatattattttttaaaaattaatattacgtactggaccactaaaaatttgtcacgtgtacaagtgtgtacaattggacagtccatcgcggcacttaactgtactttttggacgaaggggtgaagagcaaaacggaatgggagtttaggtagtttggcgccgaaaaatcaatttttgtggttaaccgttaaaaaatttaaagttcaagtggtttagccgacaatatcccttataaattattattttcatgttgtgattaaaaggttcgtaattaagagttacaaaaattataatttattataattgtacatgtttttagtcataatacttattgagacgaaaattaaattagagacaacttatatgtaaatattttactcacaagaaacttatatttagaagtcacatttagtaaaaaagaattatgttacgactaaaaagtcgtcactaaaagtaaattctttttagtaatagataatattattggaaatattttttatttcatgtatctttgccaaattaattcttgctattttgttccccttgagaggaataatgtagcctatttgcttgtgaaagtgaatttaggggatgatcatggttatttgtggtatgttgagctacaataatggattggccctgtcattgaagggttatccttatatgaggaaattttacgtactataagatttttaaatttattttgaaaaatatggtagaattatgtttcccacattttgtgggcttaattatgtcttttactcttgtatagtatctattattattattattattnntattattattattattatgaaaaagatgaactttattcaaaaaaaaataataaaacaaatacagacaacaactccaactgctggtgaa

SEQ ID NO: 60983 - DNA, 658 bp, Cannabis sativa
aatctcctttttggattcaggtaatattctcaaagaaattaattcaactattattaccttggttccaaaaataaaatgtcctaacactgtcaaagatttcaggtcaattgtgtgttgtaatgttatttacaagattgcaacaaagcttttgagtgctagaatccgagacattcttcctgaaataatttctccttcccaaggaggatttattaaaggaagattcatagggcataatattatgatttgtcaggacttggtgagacattatagtaggaaagcaaataaaccaagttgtatgatcaagctagaccttcaaaaggcatatgatactattgagtgggaatttttggaagagatgctagaaggtttaaactttcctaaggagttcattaagctgataatgaactgtatcacaacccctaggttctctcttatgttcaatgggtccttacatgggttctttcaagctagaaggggacttaggcaaggggaccccatgtctcctctactatttgtcttgggaatggaatacttatctagacttatgaagaagataggagagaaaaaggactttctatttcatgacaggtgttcctctcttcaattgaatcatctggcttttgcagatgatgtacttctcttttgtcatggagataca

SEQ ID NO: 60984 - DNA, 743 bp, Cannabis sativa
attatcatatattcctatatcatatattcctatactatatcataacatatatatcataacatatatatatatatatatataccatatatataatatgttgccatatattcctaatacttaaacactgcctttatcgtttatcttttatctcttacaaacattatttcaatgtttacagttatttcacaaataatataatatagcgccctattgtttttgtttgtagcttataaggtggtggagtaattatatttgatccaaatcttctattttaattttcaatgttttattctatgttcattaacaattcagaaataatgaatagaaaataaattattatttttgaagtaaatatgattattgttatttttttcaaacattacaatttaaatttaaactcacaacacatatttcttttattttatttaaatatggatatatataatgtaaaatattttttttaagattgcaattcaaaatttaaaattgcacatatcttaaaatatttttctattatcatttttttaatccacatatctaaaataatctttctattattattcttttattattaaaattgaaaaattatttatattttctaaaaaaatcactattgtaataccgttaaatatatatatatagcagttactaaaaaaaaaatattttaattattattttttaaaaatatagaaaaagtgtgttgtttctaaaaaaagtaaaaaatattataaaattaaaactat

SEQ ID NO: 60985 - DNA, 643 bp, Cannabis sativa
caataataggttttataaaactagtttgaataaaacaataactaaaacacacatgcaacattggatagttggttataggatttatttaaattaattatattattaaatattatttcgaaaataaattaaattattaataaattttaaacctataaaaatttaaaaattaagtttataacaaacctaaatatttttttcaaaatttttaactaacttctcaaaaattttatgttatttttaaaagaaaataaaattaaatgtctaataaaataaaaatgacaaacaaatatcatttatctagttttataatttaatttaaataaaataacaaaaagttgatagaatatttacttagcttttcaaaattatctagattattttattaaaaaatatatatattttatttcaaatttcaaataaggtcattttataaaattatttaaataatgataaatatgaaatatctcaccttaaatttaaaataagataaaataatcaattttttttttatttttttttataaaaaaagataaccaattaagcgaaaaaaatgatgtagatattatctttttcaagttcaaaatctactaattaattaaaaaaattaattaatttcaaattgatgattagatttgaaatatga

SEQ ID NO: 60986 - DNA, 1341 bp, Cannabis sativa
tgaaattgttgctttctgcgatgccgactgggctacagacatagatgatcgacgttctacatcaggcttcaccatattttatggtgataatctagttgcttggcaatgcgaaaagtaacacaccatatcacgatcaagtactgaagctgagtttagaagtcttgccagtacagttgctgaactcatgtggatacattctttgttcactgaactgggaatcaagactcctcaaccccccgtgatatggtgtgacaaccttagcactgttcttctcacagtcaatctcgttcttcatgcaagaactaagcacattgaacttgatctctactttgtgcgtgagaaaattattcacaaactagttcaagttaaacatgtaccagcaccagaccaactagcagatggtctcacaaaggcaatctccaccaacaggttctctcagtttcgatccaagcttaccattgaagatatcaagtctcttgatgcttccaattgtaatcttgaggggccgtgctaggagtattagttagagttagttattcctgagttagttagttctgattgttagtcatagcagtctgttatgctctaccagttgtaactgatttctgttagctctaactaattctctatgcttgtaatcaatggctatataaagctattctctatcactgatcataacaagattgccctttgtttacaatcttatctttctctatcttttcctctctttctatcttctcttcgtttctggtttctctgttctgcaagttctctgttcttgagtgttcatcaatggcgaagagattcaacatggtatcagagctgttccccccattgactgctaacatggcaaacgttggagctggtggtgtcaacacacagagcaattcgaatcccaacagaccgactgttcaaactaatggagcttcaaatctcagtcgatcaagaagcaactccgatgagttcaatccagtatatttcaatcacaatatgtccattagattaaatgatcacaactttctcttgtggaaacagcaggttttggctgcaatccgtggaaatagattacaaatgttcattcaagatcgtgcgcctcctcctcagttcttgaatgacactgatcaagcctcgaacaacttcaatccagcttttcttgaatgggaggttcaagatcagcttctggtttcttggcttctctcctcaatgacagagagcctcctcacacgcatggttggatgcaacacagcgagacaaatttggagcgcccttgagaaacattttactctgcaagtttcatcaaaaattcttgagtttagaacgaaattgcagaagcttagaaaa

SEQ ID NO: 60987 - DNA, 732 bp, Cannabis sativa
catagtaaataatatgttttataaataaacatattatattatattatatttgatatatgtctcacatcaaatatatgttatcattcataattatttactacaattttttttacttttaatcacaacaaaatttgtgactaaagataaaaaaagttgtaactaattataaattattatgttgtaactaaaaagtctatagctaaaagtattagtcacaaaaattataatttattgtgattaaatatgtttttagtcgatcacaatatttgttgtgactaaaactcaattagtgatagcttgtaactaattactatgttttagtcattagtaactttatgatatgactaaaagtcacattaatagtcacaaaaaattatgttgtgactaaaaaattatcactaaaactagtagtttttttatagtaattaataatatttttttaattttattttgatttccttaaatttcctatattaattccaaccacaatctttaaattaagtactatttgcttccttatccgaatcaaattcactagtttcaggtcctgtcaatttcattttttttttctgtccctatttattttttaaaaaaattaaaatgcgtgtcagttataaattcacaagtcaatttcatgtatatattatcttcatatttctaattaaagttcataattaagatgtatatcatcatcattaatcataattaacacatcatttaatatgctaaaat

SEQ ID NO: 60988 - DNA, 938 bp, Cannabis sativa
atgataataaatatatgagatatagatttatagaggttcggtcccttatgtttaggtaatgatttactccccttttatggcgcgtttactaaactgtaattggaatcagaataatcaatgggagaaatgtatcggtttaaaatagaaaataatcagaaacaatattttattatgatgtatactaaactgtccggaaagaaaaccagaatcatattattttgtttacataactaggaaaggtaatcggaatgctttaatttgacaaaattgtcattattaaaacatgtaataattttctgtttatagatttttaaggggtatatttgtcttttttatttttaattaataaaattataattaaaataaattaagtaaagaaaggggaaggcattccctataaaaatagggggagaacctttccctttattttctccctaatttatgtgggtcccactagtttccccatttccaaaatttagtaaacaattgtatgggaatcaataccatatcattcattcacattccctttaagtaaacatgccatatcaaaacttagttgtatttacttttgagataataccaaacaaattacagactgaaaccttgtcatttctagctagactctcttcagtattacaatgagaatgtgttttgtaagtgagaagtatgaaaaaaagaatgaggacttattgctatagtgcttctgagcgtacttgcatcttgccctttatataacaatagggcttacaagctgtacatagagatatccttagaaaatagggaagttacaacgtatatttgaaatacgaagtaaataattattaatccctaaagagtagggttgttatttgttgatggagagtccctatgtttgtgggtagtttgaactgttttgaagtcatgggaatgttgaaagcgagttggaaggcttgtgagaa

SEQ ID NO: 60989 - DNA, 739 bp, Cannabis sativa
aatctttggtacgactcaatagatgtgtgcaagtatataattgtgccatttttgggaaggagactgagaacaaagagttttgccctgtatctggcgaatcacattgggtgaaaaaaaaaagtaagggaaaaatgttccttacaaagttatgcggtacttcccactcaaaccgagactaaaataattatattgctcaagacacaccgctgaggacatgtgatggcattactcacagagactgaaagaagacggtgtgcttaggcatcctgcagatgttaaagaataaaagtgctttaactggcttcatctgtcttttgccaccctaaaagtgcatgagttctaaatcgttgttattgaccttattgattcaaggtccatcatctcctggaaaatatatggatatgtttatgagaccgttaattgattaaatgaaacagttctgggagatgagtgttgaagcccgagatgcctacaacggaactgtattttcaatgcatgcggcagtgttgtggacaatcaataattttcctgcttatgctctaatgtttggttggagcacgaaagggtatatggcgcgtcccacttgcaataaagacactccttccattggcctaaacagtaagattggatatgttggccacaaacattttcttgaaattgaatgatccaagaaggagaagcaaaaaatacgagggtaagcctgagaagagagcaccacctcctgtattgacgggggatg

SEQ ID NO: 60990 - DNA, 912 bp, Cannabis sativa
  modified_base (366)..(367): a, c, t, g, unknown or other
tttttttacacattattttcaacactcttacttctaaaaatatcatagtgagtgatatgacacccttcaagattactagtacaaatatattatttgttttaattataaattgtataattttatatactttaatttttgtttagaaaataaatagcatcaatgtcattgtatgacatcaatataaattcgtagaatgacatgcattcttctctaatggtataacaccttcaaatttttccaactaagctgtcgaccttaacaagctgtggcgaactcaagatttaaagtgagggggcgtaaatttatttttataaggcaatggggcaaaaataaacttaaaaagataaaaaaaaaaataaataaatnnaaaaataaaaaaataaaaaaagaaacaatgctcttatgggagttgaacctattaacctctaccctatatataatctggtttaaattacactaaagctaatattatgtctataaatttcactttttattacaaatatttgtcgtaactaactaaattgcatatatatattttttttttctgatttttgtttttaggaggacaactgccccgccttgcctacatgtgggtccgcccctgttaacaagcattctctaaaatttaatcattagagatgctctgaggtaccttgaggtggcaagcaccacaaaaggttacatactactatcagtgcaattcaatattgaatctcacacattatcatttaataaagtatattgaaaattggtaaccaatcacaacacgccacattggtatactgaaaaatgtatattgccacgtcacaggtcagagtcttctattaaacgtggcaaataactattggctaatctgcgtggaggtgctagcacacacttaacaatgctaaataacttcaaaactaaataaat

SEQ ID NO: 60991 - DNA, 755 bp, Cannabis sativa
gctcgaattatggggccgtaaagcccacaactactctacagccctacccaaagtgatggtggtatcttcgtagtttccgaaactcaggaggtcgattctatacttccttgtgctttatattatatttgggctcctagggtttccgcaccagaggcagaggaggaggaggcagcgccatcactatcaacatcagcagccatggttctcaagtaagtctctatttctatgtggctatttggatctgatatcagactattcagcttatagtctccgaaatgtcgtaaatttaagttgatggtttacatttcataatttgatcaagtttcattttcatggttaaacttgtattgcttctatcgattttacttggtattgtggtggagaaatgaagtttggaagtgaattaaaatatggttaaacatttgggattttagggttctgatggtagtttaaattgtgatgtagagtattaaagtaagattgggggtatgatgtttattggtatttctaatgtatcttgtattagaaccagaaagtatagaaatttgttttcaaaattaatagaataaaggcagcgtcaacagtaacattctgatatatatatctatagtatattcatttaagtatatatgatgcttgagcaataacaagagaagattacttgaatagaacttttgaaatgtgacttatttcgagatcttggtttgaagttatttgttgttctacacgaggggtttgtttattgttgaatggta

SEQ ID NO: 60992 - DNA, 3414 bp, Cannabis sativa
  modified_base (27)..(33): a, c, t, g, unknown or other
  modified_base (2678)..(2680): a, c, t, g, unknown or other
aaaatagattacattgaaatggagttnnnnnnngggcataaaacccaacaattcattaacttggtcatgatatgtgtaagaacaccaatgttttctcttatgttcaatggaaccatgcatggtttctttgaagctaagagaggactaagaccgggtgatccaatgtcccctttgctttttgttctgggtatgaaatatctcagtataataatgaagaaggttgagaagaaaaaagattttggttccatgaaaggtgtgctaacatggtggtaaaccatttgagttttgcagatgatgtgttaatgttttgtagaggggacttcaaaagcatgtttttgtgatgcaagctctaaaactgttctgtgcaactttagggttgctggctaataactctaagttagtagtgtactatagtggaatgagagagcatgaagttagaaaggtgttagatatgtctggcttcacaagacaacatgaccccttcaagtacctgggtgtgcccatatgtgcccggaagattgctgccatggtcaaacatgtgtgggaaatttaagaaaagaaggataattttgtgggtgaaattggtgcacaatgtatatattaaacaacaaacatggttggagtacaaagctccgatgattgggagtttgtattggaggaagatggtggagctcaaagacaaaattagttcctagtgcagcaagatgtctttgctgccaaagaacataaaattgcaaatggtaacagttagtttgaacaggatcgggggaaggtttcttggagcaatgaagtctggtctagattgaatgtaccaaaacataacttcctgctttggttagctatggtaaatatactcaaaactcgagatagactgttcaaacatggactgattgatcacgatttttacactttttgtaatatttctgctgaatcagcagagcacttgttttccaactgtagttttgcttcagcttgcctaaggcgattgaaggaatggttgagattgaataccattgctacatcactacagagcttgatgaaatgggtgagaaaagccaaaattttcaggttaaaaaggaatatttttgcagctgggattgctgctcttgtttacatggtgtggatggctaggaatgataaaatttgggattccaaaagggtggtgatttctgaagtaatgcagcaattaaagtgggtagttaagaatagaataattcttgtgatgccgaaaaagattaaacaaagtgatagataatgggtttacatgttgtaattaatattgtatagataaagttaaaggcctctcttgcttttagtttgtagaaaaaaatgttttttttggactaatgaaattactgattcatcaaaaaaaaaatatctctattgatgtcattcaatatcagttcttatattttactttaataaagattataaaaatcgctaaccaattatacgatgctatctcatagtggtactaagagccttgataacattgagagcattactattgggcgcaagtggtgcctagcaccagctagaggttacgccttatgattagttatcgatattttccgaaagttattaccttaaagtatatgagacctgataattaattgcatcaatagcaatatgacaccgagaattctagacaccattggtgcctcttagcatttctaagcatcgtaattatgtggcacttatgtgtcaatttttttatttctagtttatttattataaaatggtggcggatctcttgtcaaagttttctctcctatgttctgtccatctaataacaataatacacatggcaacgagctcgtgtaagcataaccttgtttggctattacaagcaactaactatagacaaaaataaataactttatataaaagaaataaatgtaggatatatatatataatatttttaaaagttacatcaaattcgtaatcatgatgaatatacttacttttagtaatgttatacccgaaattgaactgccatctcagtgaagaacacgtgtcacaataaggggaataaggatcaatgcaatcgctttataaggaataactcttaattacatgagaatcagagtatatttgtagcctgtagactgtacggtcttaggcgaggaactaatatacaaacttgtacttagcatattggcaagaaaccatatgacgctgaatacaaattgcgaggcatcaaggacagtacacattggaaaacaaaagcgacgtataccaatttcaaaagtccttagtgtatgagctaaatgttacaaacagatcgactcaagactaagtaagcgaggtacttgtctcattatgggaagacctcatataacttcatcccgttagcgtcagcgaggctcacaaccctagcaagtcagaagctaacattcatatgagatctgaagaattcattgtacataagaaccgcgattaacatcagacatgcatcgttcacctcagaaggaaaaatggcccaagcttgctactgagataacttgaaccaagcttctgtcgagacaactccagaaaccataattaaagacgtgatttaaaacacgatcattatgacccagtaaaagcgggaaaatcacagctatatgattttcaaatcataaaccacatttatactacgtgacatgtaatcaaatcccatgattttagggatgannnttgcaaacatattacagtcaactttgtaattaactgtccactatgtaattataaaaagtgatagacaagatcaaaaaaggggacgagaaaactcatacaagaggggccttgagaaaaaacaatcagaaatctgaataagattgactcgtggactctgcagaattttaactgcaaaaccacgtaaaaaaccttgtgttcatatttttattcttacagcttttatttcttctgtgtggagtcataccgtgaggctcatattggttaacaaaaatatgcattaacaagtcatattatttgaatttcggtattggacacgtggaatccaggttagcatcaaagacccactagtggatctcctaaaaatggtaaagtgggacaggctcatttagacaagagtttccaagaacgtatcacaactccgtgatcgaataaccttccgttgtgacagttcgtatccaaaagcaagtccagtatcgtgaggccaaaagggtaagacatcgtgttccttgaagacgagtctaatttccctttttatttcaatgtaaaaataaggaaatacttgttcgctagatctcaatagaaaaccgcatcaaggtaaaaggaaaaaattcataaaatagacatcaagtaattaattcatagttaattgccacaattgtaggacacggttttgattaaatccaactgaatccaatctgcctagtcagcatatcttctccttcgtgggctggact

SEQ ID NO: 60993 - DNA, 1059 bp, Cannabis sativa
  modified_base (44)..(44): a, c, t, g, unknown or other
  modified_base (879)..(884): a, c, t, g, unknown or other
aatgttgaattcttattttgatcgtataaaaggttgctagaatngtgtccattttagatgagctgactactctattcaaccaatgttatctttgaccctcgcctacttggacattgtatttcattttgttgaaaaccttagcaaataattgaatatgttttatttttttggtatttttgcaatcatattttctgtacttgttattttctgaatttctgtatgaatttatttgaaccaagtaatttatttctgtttattgatatttgtagtgtcaaaataatgtttagcaatcttcaccctaatcatcaattagtatatgcctttgcaaatgaactccaaagtgcgaagatgactcttggtcagagtaccacttcacacttgctcatgatgaagttgaaattacagaaagcaactatgctaggaattggcttatcaagagagcaaagagttcaatttgttctcaacagcttatcacctgagtttaaccaatttattgtatcttttatgattaacatttggaacttgtttgacatagacaagttggacgatcaattgtgtgcttatgaaaagacattgtcacttgcaaggaggtccctctccagtactgcagataaaggcaaaagaacttctaaagatatttagaaaaattcctctgacaatcctactactttaggctcagttgagaaaattagataaagtgcttccacttccttatattatctttcacaacaaattgaaccatcaataagaacaatccaagaacagttaagcagacatattattcaatactctaattgtgaacagaagagacattttaaataaaaatatcctaggcttctcaacactaagagcaatggtaatgctttagtttttgaatcnnnnnntttagagaatgataaatccatctagattgttaattctggatctactaaccatgtctattgttcattgcagctgcttgaaaattggaattatttaaaatttggagagttgaaacttaaagttggtaatggagaaatggtatcagttagagccagaggaaaagaaaaactcaagttt

SEQ ID NO: 60994 - DNA, 602 bp, Cannabis sativa
ataaactgcccacaccaccgtactaaatattagagtacttaaagagaatatatcaattttgtcacgcggtttttttttttaaataaaaaaaaaataatatattaacttcacagtctgatcctgtttataaggtttgagatttttttaatatggtttcaattacagtactgcaccgtatccttttcaactttctaatatctaaattttagtttgagaatttgattttaaaaatttgattgtactgtcaaaatttgaaacattaactatattatttaaattttaattggagtactattcatattcatgtttaaatgtcacaatatgaaatgtttctaattcttttttaatggttaagtataatacataaatcacaccacactatacccaacactacagtacatttttctagattaattctctataagaaaaatgattattcgatccgatgactaaaacatattatcatgagtaggaagataattataggagctaaggcgatatatcaaattaccaggtccttaatctttttatttttaaaaaacaaagcaatattttatgtgacagtaagtagtctcgtgatccgtaaggggaaacaccgggta

SEQ ID NO: 60995 - DNA, 1204 bp, Cannabis sativa
atatatgaattttattggaccaaagttatgttctaaaacctaataattaatgcgtaatatattacataatatataaaatataattataagctaaatacattaattataaaagtatattattaaacttttgaaagatcttgatttggttattaatattttctttatagatataggagttattttattattttttgataagtattttataatataaattaaagaattatttttaagtattattttcttaaagggtcaaagtgtaacatttaactactaaaattatagataatacacatatgccatggcctaaggctcaggtcgtgacattctatatgtatattattatggctgttaattagttcctccaacattttaaaataagattttatctatttattggtggaggatctttttctccttccatctctaatagcaaagtgccatctaatcttgcgttacaattatataaatatatagatagatgtgaaagattatgaaacactgattcaatttatatcacatgctaaaccaaatattttaattttaatgtccaaagtttcactttcgtggacactaatagtattttacttattaagtagctatttatctagctatcattaacgtagacgttataaatttctattaaataaataataatgataaactttttttggtatgaatggttgagtaggtaatatttttactgttattagtgttagtataagaatatggcgagttacccactactaccataaaaatagacatttaacctatcacatattttatcataaattataataactaaaaatgtaaaataaaaaatagaatgctcactaaaataacttatcttcatggtgtgaaacttccattacataaattatcaattcccacgggggaacccaatgcatgtgtaaactaattaatgaatcaaaatgttaagaatattttaatatgttaaagatatggacaatttcaatgtaaagactacgtgtagtacaactgtggatcagcattgatattttccaggaaaacatacgtacagttttcttcttgttcttttgttttttaatcctccaaggaaatatatatacatatatgtgtgcttatatgtactagagagagactatatatactagttttagtactgtgaggctaatccaaatatatttatgggaataaaatccttatgaaagaattaggttca

SEQ ID NO: 60996 - DNA, 1397 bp, Cannabis sativa
gacgatcaaactccacatcagttatctcaattcccataggcagattgagagcttcagccacatccttcacagtaaaggaataccagagtcctctagcaaatactttgccaaacataaaagagtcctcatcgagaagctcatcagtgatgttagcataaaattccttcacaattctatccacatagccatcaaaaccaatcaaagtatccacccattgtctttctttcaacatgttataaaccccaaatggcttatgagcaatgacattaaaatttttctcaacagtaaacttcctattgtcataaaatttcatgtctctagcatgatcattataacaaaaataatgagaatggtgctttaagttttcaagagaaatcccagagggcctctttcttttctgaggaagaataggacttggagagacaatgggtctttttcctttgtccttctttggaattgcagcagggacagcaacaggttcaacttcaggctcttcactttcaaacccaaaatcaacagcaaagggtggttctttgggcacaaactcttcacttgaattggacgaaccctttgattcgtgatcctcctcagttccttcttcaggttcagaatctgaagaggagacctgaagaggagaccgaagggggattctgttttagatttttggcctatgaagatgaagacatcacctttttccctttggagacagttttgggaagagccacttcaggattttgaggagtggataccttggactttgttcaagaactcaacgtgggcaaagtcaccatagctttctcgacatttgaagcaccattcgaagaagaagactttgacaatgtgtgatcagatgaatgagattcatcatgatcaccaaacccaggtgttggagtagcaatttgagaagcagtgactagaggagaagtgaggttgtaggtcgattttcaagcttgggtcttcgactttctggcagatttcgtcggagtagaagacgaaccaggaactccaatcactggagcaggcggcacaggtggggtgatcggagatgcagaagcagagccacgagaggtcctcttggacggttgagcattttttgtctttccatttttctttgaaaccctagaaaagcaaacacactctcacacttgaaaaagattagacttttgagaaaaatgagagaggaatgaatagtggtgatcctgggtaagtggaaagttaaacatttatagcatttcaaatttaattacccaataataaaaaaaatgaaaaagaaaagtaacctccttaccttatacaccacgtgaaaagagaaaaaaaaaaggaaaccaaaaagatttttcaaaaattggtcaaggttaccttaaatggaaaaaagaaacaacatatccccacaaaat

SEQ ID NO: 60997 - DNA, 679 bp, Cannabis sativa
cctagagaaaaccccacaatccttccattgtctttgactctcatcaacaactatattctctaaatcaaccttttctgtctacagaatccaacaaaaacagcagtttgtaagcgaaaaatagtgacaaaaacaagaaaatgctagaaacttttgttaaacaacctgagtacaaacacaggatatgtttcctaaatatagtaaaagaagaagctcttctgtctttgatgacaagaatttttttaacccaaattagttcaatttggccatactgcaaacaataaaaatatgtttgcaaaatgcaaggaaaaagccagcaaatgttagaaagagaatttgaaatagtactgacaaaatgctcaaaaagaacaatatcaaataatgaggaaaacaaaaagaaaagacaggtgtaaaaagaaaaaaaaataaaacaaaaaaaaaaaacaacaacaagaaacagacatgatttgcatatgtttttacctatatgttattgttgaatagccatgaaaactatgtcatgtctagcaacttctagtctatttgcaatgaatgaaacgagaacagaaagggaaagacctcaggataggtggagtgaaagttcttgctatcatagagttagggtattttttttcttttgaaataatcatagagttaaggtttaaagggtttaatttatatt

SEQ ID NO: 60998 - DNA, 1218 bp, Cannabis sativa
  modified_base (26)..(30): a, c, t, g, unknown or other
  modified_base (151)..(179): a, c, t, g, unknown or other
  modified_base (881)..(888): a, c, t, g, unknown or other
  modified_base (968)..(983): a, c, t, g, unknown or other
tttccaatgtgttgacgacacaatannnnngatcaagtatgtgaaatgggtttcagatgcattcataaattatatacatatcatcatgaaataagtcatgtgaaccatgcaacattaaatgttgttgctgatctatattaataagtaaatnnnnnnnnnnnnnnnnnnnnnnnnnnnnnggcataaaacccaacatatcttgcaaggatgggttttctatccgtcatctgaaagatctacctttaataatggatcaggtccattatctcagttgggccttctattggtcctagagtgattgagttgtaactacctttagaaattacacgtattcttatccagaaatacgaataacaccttccaataaaaattatcttcctagtaacagaaatttcaaatgcaattttaagggctcaatcttataaaaacttaatttgcaaaatattgtaaaaaaaattcttaatctaatttctcttccaacattaaaagtccaatatatataatatgtcactatttcaaataacaataaattcaaaaattatttcaaaaaataaaaataaacaaaaaaaatcgctagcattatgtaacaattattattcatgataattttttttttcttagttagagcaataaaaattatttgtaaaattgtttttatttatatgtttttaaaataatgatccaaattttaaaatattttatttttaaaaaataaaatttactttcaaaatttatttcaacaatttattaattaattatattccgtttgtatttatttttatcaacatccaatttatttactatctcattattttctcttacttttttttttcactacaaaaaaactgatatttttaatgataactttttagtcacaacannnnnnnnttgtgactaaatgtgacttttatagtcacaacaaaaagttacttgtgactaaaatattatatttagttacaagttgtcannnnnnnnnnnnnnnncacaacaaatattgtgactaaaaacacacttagtcacaaaaaaattataatttttgtgactaatactttaccatagactttttagtcacaacacaataataataatttataatccgccacaatttttttatctttagtcacaaattttgttgtaactaaaagtaagattttttgtagtgtctatcactactctactttcaatctaatctccttaaacaaaaacaaaacaaaacaa

SEQ ID NO: 60999 - DNA, 697 bp, Cannabis sativa
tgcagccataaagagattcatacaaatataagctgctcacataagtcagcacagtttatggcctattttaaagcagtggatgtgatatacattccaaaaatttaaatcatgatcttaatgataatgataataattaagaaaaaattagatttgatttccttgattatttattagctctactctttcattttgccaccatatgatattcccttttagtacaccaattttacatatgttgttgttggatcacattaaagttatcgaagtagaaaaagccttctgcatactctagaatatgtcggaacaattaatacaggttgtttgaagaatcttcctattcgctgagatggttctagaaggactcatttctaggaaaagaaacaagatataatcccatgtggccatgaacaaattgaaaaatgatatttgaacaagaagtacaacttacttctcaggtgctacaataaaacctgctccaaccgaatcagtaacccaatcggccttcaataacaaagcatttgctacacatccatacaagaacttgatagtttgatgctgagagaaataagaaagaactttttaaaaaacaagtatttgaatgtaattcaaacgtaccaagtacagagatgttgtaattataggatatacaagagcaaaatacagtcttattttacattatagggagtcaccacctcgt

SEQ ID NO: 61000 - DNA, 1267 bp, Cannabis sativa
ctctttgtttataaagacttgttgttgaatgatcatgtgtaaaatttctgctgggtgtttagtagccatctatttgtttttgggatcgaattttaaggacattgagtttttcaccattacaaattacaacaaacaatgcaatttcttcacccccttttttttattctggggaaaacaagtcgtaaactgcaaaatttacagatcgaatgtgcagaagccatacgagattaggcccaaaatgctactcgatcaatataacatgttttcgagttatgacttatcgaaatgtttaacatgttttggaggatttgtaaatgagtttgaacatttttgttgttttgttttcaggctgctgcgatccggttggaaattagaggaggcgagtggaaagacgcttacatgcaaatggacggtgagccatggaaacagccattgaagcaagaattttcaacatttgtggaaataaaaagggttcctttccaatcacctatgattaatggggagtgattgtgtaaaatcatggtttatttattgttattattattattccctttgttgtaaaaatatataattatctttaggcctaagggaaagggggttgtgttaaagtcagtaaaaaaaaagaaagaagaaaagaatgtgttttactagcaatcccccctcaaaactctgagaaaaagaaaagattgtttagcccaatgaaccagatttgatgtatgattgtgtaccaaatctggtcttgattctcatgtatgcttattggtgaatggtgattatgattatgattagcagcagcattatattcattcaaatgggacatgtatttatgtatccatttatttatgggaaatttgattttttatccttacatttggttaaaaaaatttctcttttatgatatttttaaaatatttcctatttatatcaccctcatttacacaatgggacctccttatcggaccccacatcggatacaatcggacctaacagatctacgtcttctatctcgcaaactcacagtttcatttgtccatattgcacctcatcggaccttgcttaaaatcaaagatctgagattctagaacttaaattcggatcacaagcgactttttagaccggcggtatttggactcacaacggatcccaagtggctctgataacatattagaattttagataagatgaataaggttccatttcaaaactaattggtaatggaatgagtagcttattcattttatatatcacaatttattttcacatatta

SEQ ID NO: 61001 - DNA, 1669 bp, Cannabis sativa
aaaattattaagtaagtaatttgataggtgacaatttttaattggtctaaataattaaatttttattttttatttaaaaattaatttaaatatagtaataagaaaatgatagttacactcgattggcaccaagttttaaaaatataatttaaatattattacaaccttttagtgaatatctacccctaaaatcatatattgagattattttttttatagtattatttgttatagttacaaattttttaaaaaatttggaatattttatagtactaataaaatagaatttctgatattttagtttactacgtgtctaaaatttttagtactattaaaaaatatttaaaagtaactgatattatataaggatttagaatttcagcccaacttgtgtcatgtacttatgttggtaaaaaaacattaaatttatattatttacaaatttaatactttagatagttataaagtaatttaccttattttttttattagttttattttttcatattacacatactactaatgtgattatttgtgaggttgaagcatttggagtggcttggtgattagaacaaaacgccaaaagtgtagtcatcatccaacttcccaaattgcccattactcactcctttatttacctcccaaaaaaacagagagagagagagagaaagaaactataatggttccattttcaaaagcttttactctctctctctctctacatgtatgtactatactgctactgctgtcttgtcttgtgaattgtacaagtttggtttaggactctttcttttctctctctctctctctctatattgtttcataaacaaaacccttgatttgaatctcattttctcaagtacgaaacccattgaaagcaaaagttcaaagtgatctgaattcacaacagaaaataataaaactatctaaatcaacacctaaaagggggaaacaaaaaactaagtaaatatatatatatagtagtacaagtaataaagtttaaggatttttaataaagattacaattttattaaagacaacatataataaataacattgagaaattctacaatgtaggtttactgatgtattttttatttgatttggtgtttagaatatttttttaattttattttatagtcgtctattgtaatgttatagttatttaaaatatcttgtaaaattttaaaaaatttaaaaaaaattaacacactaaaaaaatggttcaaaagtctattttacacgagtataaaataaaaaaaatctcgtgtacaaaataaactatttgaaccctatttatggcttgttaaatttttcaaatctctcaaaattttacaaaatattttaatttaaacaacaacgtagatgaccataaaatgagactaaatttttttaacagatatcgaaacaaataaagaatttatcagtaaatcttgtattatacaattatctaatatttaaaaaaaaaaaaaaagatagtagtgaaaaaaacagcttcttttttggtcactttataattttgtttagtgaagaaaaaaaagatgtattaataactatcatgtaccttggattggacctaaacttaacattttaagctaaggaacttattagaaggattgtcataaaaatatatgtatgagtaaatatatgaggatcatctttacaacta

SEQ ID NO: 61002 - DNA, 4407 bp, Cannabis sativa
acacacacacacacacacacacacacacacacacacacaaagtattatcaaaatacttgcgtaaggggccaatactgctgactcatggattagggattatggacatctgaaccacgtaaaaatcacttgtctactatttactattttatttatttctaaagctctatttatttatgtttacacagattttcggaaactaaatatttagagccctagaagttaataaaatagtaaataatgaacagatgatttttacgtggtttggactttaactatccctagtccacgagttagttatgttggccttacaagccagtgtttaattaatacaatatatgtgtacaataaaaccctagctttgtattcctaatgtttctcttgaagaagaaagcttataggaattttggcagagctttggctagatcaaatttgcttcaccccttcttcctaaaaattgggagtatttataggcactcgtgtgggtaagggcattccttttatccacctaggattttgtactaaagtatgttgtaagggcaagtgctacaacatgaagatctgaccatatgttggtaagaaacttccccatcgtgtggtgcacgactacagtgaaggattccacgtagtttaggacacccgtaactcaaaggtttcaccttaaaaagttattgcctagacaagatgttagaaaaaaaaaagggtttcaaaggcatgtacgcacactataaagatctgacacaggggacaagatttgattctgtgtcaaagggtggataaccatcgcttcaggttccatatatgacactcatgaatgaactctaggatcaacaagctaaggccttctcagatcacactagtccattacctttttgaaatactttaagcatcggataactctaattcctttcgatcgcgaaaggatagtaagactcctagatttttatccttactaacattgagaacctttgatcagcctctagaacataatagtctctttcacatcttttaagcagtaaatacatattgatcatggaacgtctagagtggaatccttctatgatttccacatgttacttattcgagaacacggataacatttaccccaagctcccaggactctcgaatggtgggagcttgcagcctcgttctggatgcttgagttattattatgatatacaagcaacatcttaaaattcatatgcagtcttccatgttatataggatagttgaagggttaacatttctcgttggcgatgtacaactgtggtattgctgaaacagagctcgtagggcttacgcagtaggcgtaggtacgttccttgtggaaaatgaatggcgataagacttgaaaagatggctagtttatggcgcatcaggtttgttgccatggaatgatgagtaatgaatgccccattctctctcccaaggtgcattaaatgcaaactctacaagtccccagtcgttggatggagcagctcttgatcggtaagatctatcctatccaattcaaaatatgctaagtcgttgccactcatacaaatggaaaacttggcaaagaggctcattttttccttctcatttcaaattgcaagccttagcctatagaacctccccaaaaattcttgacctagaagaatacttgtcttctttatacacttctcgaaccaaagaccttaatttctctttttgctaacttatagtgattgtgcataggtcgcaactatctaaccttgcatttagggcgagaatctatttcaaatcgtatcaccagattttccaacaacatacaaacaaagagttctacgttgaggtgagtcgtaaccaaaccatcaagcagtccgtaagaccttaaccaagcataagcaaccagcgattcttcattacaccttctgcaagtaagtatttcttctacccaaactattattttttgctttgatttagaaatgtgctctcgagtttgtagaattttggttcagatatttaggttaggcctctttggatggtttgtgttttgtaagtctcagggtctggccagatggctagaatttttaaggatggagatttttctttccacctgagatttaagagtgtcaaacttaaccatttgtgctttgcatatgacttgttattttattttttatttttgcaagggtgatttcaaatcgtccttactccttcgaggcttagaactatttttgaacaattctgaggtaaaagaaaatattgggaagtcagttgtgtatggtgctggtatggaccctcttttctttgacaaaattattgatatgtctggatttcaaaaaattaattttcctttcaaatatcttagaatgacaatttgctcaaaaaggatatcgaaatctgattgtgagggtcttgttgagaagatgacagctaaaatcaaaattggaagttctatgaatcatttttttatgttggagtaatggttcttatcaagtttgttttattgtccattaatttttataggtcctaaattgttatcttgcctaaatttatggtgcaaaagattattcaaattttttgagcttatctttagaagggtgtggagatgtgtaatggttctggaaatattgctgacctttgcaaacccaagaaagaaagcggttcgggtttcaaagatatagccttatggcatcaatgtgctattggtaagcatgtgggctatttcttcaaaggataatctttgggtgaaatgggtcaattgaggtatgtatctcaaaaatcaaaattggtgggagtaccaaatctcttaatttggaggctagttggcattggaaaagagttgttcaagttaaggaaatgatcaatttaatcttctctcaagatcagaacttctaaaaatattaatttttcataattgatttgtgttttgagatgtctcaaagagacgtttcaagatgacattatgatgacatttgggacagattttatactccaaaacacaagttcataagctggttagctttgaaaagtagacttttgacgtatgacagactttgtaggtttggttatgtaccaagtcttcaatgttgtgtggaattgaggtagagaaacattcttatctcttctttggttgctgttacagcagccttgtggttcaaaatattttgttttggattggtagtcctactcagaaaagagatctccaaggagtctttgagtgaatttgaaaatctaaagcttcaagaggtaaaagaaggattcttttcagtgtcatcccagctatataatttactacatttggcatatcagaaaccaagttctttgaaaaaaaaaagtattatgttaggtcacttttagatgcattgttcatgtagtgtttgttctaaattaaattctttgaatatcaagaaaattagtaggaatgatagagaaggagaggaagttttgaataaattaagctttgtaagtattattaatcctttgtaattgttgttatcaatacttttctgttacaacacatgtttaattatatatgtatgatgtatatatatgaactatgaagcagaagcaacccttcaacattttatgagctgtgttttgtctgttacaattggtaggccatgtgttgttgggtatggtaaaaaaaaaaatctataaatattgatagaaatatgattatatgatttgtgggtgtcacgcggggaattcaaaattttcacaaccactaatcaaaacattattgtatatatatttttaaaaatggaattaaatttgaaatatccagaaagggtaataatagtgaccccaataaggaaaggctttagtgaagtacggcgaattttaaggatttatatagttttacatattaatatataatataaatgcataatacatataggatcccaattcctaggtgagccaaaacttaatgatgcattttatgtcccatgttccatgtgcttgcctctgatcaatttggccatgacaaaagaaaagaaaaataaaaagtacagttttatgtcttatgaatgatctttgttgatacaatgatattatctctatagatatattaatattatatagtaatttatacaaaatagaaaactgtttcatctatattatgtataaccaaaatgtacgtcaaaataaagaaataaaaaaaacaatacaaaccttcaggattaatttttatttttatgtattacgtcgataaaacataagtgcttaagttcctactttaatgtattatattttttcaatatgaaagtatattaaataaccgagaataaaatcttttataaatacaagaagagcttttgtttttgtcattatatagagatgaatagaattattatccggaaaaggcaacaatagtactactaccgagctacttacacataaataatgttgagtatattatacatacttttcttcactataaaa

SEQ ID NO: 61003 - DNA, 894 bp, Cannabis sativa
  modified_base (305)..(307): a, c, t, g, unknown or other
attgttagtttaaacaagcaatggatagtcagaataaggaactaagaagcaaagtcaagagaactatggttaaaaccattcatatggagcaatcaaaagtattctattataaggaaaagaagggaaattttgataataatctattcaatggacttaacaaaacttcctgatcctagtatcatagttttaagattttctaaacctatggcttgtggtatacttggtaatttacttactctagtacaagcaacttactttagtaagatggtggagtatttttctaatggctaactctaaaggaagtnnnttggctcctagacatagagtttatttatcaaaagagcagtttcaactattccaaaaaagataaaggccaaggaaagaattcattaagtattgacaatgagaagtctcatgtatgctttggtatgcattagaccagacacttgctgttaagtgggagttatgagtagagataagtttaatttaggaaaggaacattagaagacaatcaaataaatcttaagattaaggaggatctatatgttagtttataagggtgatgtttttgaaaccctttaggctgcattgactaagatttctagatttgcataatgctaagaagtctaaatttgggatggtgattactctggaggtggagcagtgatttttggaaaagtgtaaaaacctattaaaagtgtcaaactctaccagtgagattgaatgttaaagtggtctagaaagctactagataattatttagcctatgaaaaattctatacatttttttaccttattccagtcacagattaactactagtgttactttttgataacacaaatacagttgccaaacagtaaataatccaaaaccctaagaggagtaaacatata

SEQ ID NO: 61004 - DNA, 789 bp, Cannabis sativa
ttagtgagtctgtcaataatcacccagacagaatcttgttgtttgctattctttggtaatcccgtcacgaaatccatagcaatgtattcttatttctactcaggaacatcaagagattgcaacagccctgcatgtctttggtattcggccttaacttgctggcaggtaaggcattttgctacaaattctgctatatcatttttcataccgggccaccaatacttacttttcagatcattgtacattttgattggccctgggtgtaaagaataggttgtagtgtgcgcctctggtaagacttttgattgcaactcaactttattaggtacacacactcttgccttatattgcagaatgccctcttcattaactgagatgtcctcgactttctcattttatagtttgacccgcttcttgattaaaaactcatcttgggcttgttcttctttgatctactctaataaatttgattcgattgtgagatcaactagctttcctgttaccaattctatgtcggatctcatgatttcctgttgcaacgacgcttctaatgcccttaacatcgataagcttgcatagttacgtctgctaagtgcattcgccactacattagcctttccaggatggtacagtatctcacagtcgtaatcttttaccagttccaaccatcgcctctacctcatgttgagctctttctgtgtaaagaagtactttaggcttttgtgatccatgtatatttcacacttctttccatagaggtagtgtctctagatttttaatgcaaagacc

SEQ ID NO: 61005 - DNA, 1827 bp, Cannabis sativa
  modified_base (280)..(281): a, c, t, g, unknown or other
ggatttaatggttttttcttggttatctccgactccggcgactccccacacacgaagcagttcgttttcccgtgttttttactgttcacggtataaatattaagttgttgggcttgggcagtacagaagtaaagaaaatgggcttgggcagtaaaaaagttgtttttgtcgtgtcccagtatttttgtaaagttttggttcaaaaacagtatatatgtaaattttccaaaattattttgtattcctttttcttaaaacaaaaaaataaataaaaaataannaaataataataaaataaaaataatggcaaagaggctttttcattctcatgagttttgtgtttcttttatggagaggggagggggtggttaggagatactggctatttggctattaagagtaatacttgaatttttttaacaataataatgtaaacatgtttatagataaatttgcactaataaagattttaggaaggatgtgaagaaatattttctatttttgaattttatgatgggagaaaaaaataaaatggtaaattttaatttagataaatacacttaagttgtatttggttggaggtaattaaatagaatagaatggaattaattttttatttcacttattagtttagttacattttaaagtattagtatgctattataatagtgtcttttccaccatttcgaaatagaaataattataaagatcatttcaattcaagattaaaaaaatatatattgttcttctcactttcattcctattcttcccaactaacgaacccttactaatcaaggatgagaatgacatatagagcattgttatagggtactaaggtacttattatttattagtggttctttataatctttatcaaaattaaataagtgagtcaatatttaattacaacaatagcgatattacacctcataaaaatattagacatcatgaataccttttagcatttctcttaaatttatggtagtcattccttttcattagtttattaaaactaaaaaaaatgggaaaacatgattaaatatattaaaagtaaaggagaatataaaatgtcatcaaagataataatattaatttagactgttttttaaataaaattaaaatacaagttgtataatataacacaaaataagtatttaaataattaatcaattgggttttctaataagtaaacaaaataaaattatttggattaatcaattgtagtacacctcatctattatctatttgctcagatggtttttagtctaattttttttttatatatatatatatatgtaattgtataaattttcataaaattctaaataatttacaatgttaaaaataaaattcaaaccgttaattactattattaaaaaaaacatatgtacaacaaaatatttatattattttcaacattataaactattaaaaataattataaatgactacaacatacacaatttgccaaaaccaatagtgtgcaaaaatatttgacaaatttacacagtattatttttgataattttttttacatttttacgtttaaattttttatatatatatttttataggatagtattctataaaaataacaccaaaataataagaaaatcatatgaaaataaccaaaaaaaaaaacaacattcaaagtcaaacaacataaaaataatatacaaataagaaaaaaatcaacaacaaagtgacaaaaatacaacataaaaattacattaaaatatcaaaataccgtattttttacaattaaaatcttaaaaattgtaaaatgttaaaattccttacaactgcagttttgtaatttttttttt

SEQ ID NO: 61006 - DNA, 591 bp, Cannabis sativa
tgcaataagtggtcattcaaatcttagcaataaaattttttaaacctttgaacgaggaccgtccaaaaggccatcacttaagtgatgtttgagcattatgcaattatgtggtcttcgaacctttgtatttattggtggtattttctcagatattcattattccaataccgtagtactagaattagtttcatgttttcgtcatacagcccacaaagaatttcctttctcttacttgcttattaaagtatctagctatttttcgttgatgagcttttagctttaagtttgctacatctcttcgtttttcaagtctgtttagcgattctatcaaaagactgtggttggtctcttgatcataggataatcttctgtgggatggaggctccagttctactggtagcattgcctcatagccataagttaaagcaaaaggagtttgtctggtaatcgttcgtttagtggtcctatacgaccaaagcactttgggtaattctttaggcaaattacccttagcttcttcaagatgttttctcaaagtgtccttgagtgttttgtttactgcttccgttttcttgaggatgtgtgactact

SEQ ID NO: 61007 - DNA, 2039 bp, Cannabis sativa
cctaacaaccatgctacatagactatttaatcaactctggttttcatggtggaatgctatcgcccaatgctacaacattgtcttgcattaacattttcattttctaacacctcctctcaaattaagtgaggttgaaaccacacttagtttgccaacaagaaatttaaaccttgaatttgatagacttttggtgaggcaatatgttacttgatcatgagatggtacatatcttatgtcaagagattcaacaatcacttcgtctttaacaaaatgaacatccaattctaaatactttgtcctagcatgataaattggatttgagacaagggcacttgcccccatattgtcacaccaggtaactgggatttgttaaagaggaaagtaaaattctttgagtagagattgtattcaggtcagttcaacaaagacttgagcaagggctctacagacaagagcatcaccaaagtatacacaataaccaactattgacttcctatcatcagggcaacacgcccaatcaacatctgaatatcctgttaagacaagtctgtcaatgtacttgatgtgtagtccatgattgatggtaccttccaggtacttgagaattctcttagttgcagatcaatgaacatcacttggggctttgagaaattgactcagcttgttaataataaaactgagatcatgtttggtgtgtgtcagatattgcaaccctctaatcaagcctctgtactcagtaggattttcaagaagtgttccatctgatatagaaagcattttcccactgtcatgggtgtaggacaaggcttcaaatgtgtcgtcttgtttttttggagcagttctattatgtatttagcttgagataaataaattgaaatagttaagtgatcctaagtcttttagagaaaaaactttattcagtttctttgtgaattgccttagcttttatgagttgttgcctgctacaacaatatcatctacatagataagaacaaacatgacatccgtaacagttttgtaaaagaagaaagaagaatcaactttagaattaacaaacttttagacgattaaagtttgtttcagcttgtcaaaccaggcccttgaggcctgctttaaaccatagatttttatttaacttgcacacatagtgtagattttttgtcttcaaatcttactggctggttcaggtatacattttcattcaagacaccattcaagaaggtattgtttatgtctaattgtctcacttcccaggacttaaaaacaccaatagtaagcactattctgattgtgcaagctttgacaacacgactaaaagtttcactatagttaattccaagtctttggttgaatctcttggcaactaatcttgctttgaatcattgaaaggttccattagcattccatatgattctaaacacccatctattaccaactatattcatgttaggcaatcgaggcaccaagatccaggttttgtttttcactaagagtttattttcatcatccattgcacctctccagccaggatgattgagagcttcttgcactaaacttggttccttatactggcagacggcttgagtcttcccaacatagggttttggcttgaagatatcagtcttagctcgagttatcatagggtgactaggagccaaatgacttgcaattttctcttcactatgtgcttgagattgaacttcattatcatcatcttaatcacattcaacatcctgcacttcagagtgttcactggacacaatatattacaaagttaccaatttttacaatataattttttttcttttttcatataagaacaaatatttatgtaatatatgtatatattacattatttttttagagacaattcaatataatgacttaatgattagtatatatgttatgatgttaaaactttaataaaaaaattttgtattgttagaattttataaattgatttttaaatttttattataattcgataatggtgatagtttaaaccgtaccgcaccgcaccgtatttttgtggtgtgatt

SEQ ID NO: 61008 - DNA, 886 bp, Cannabis sativa
  modified_base (105)..(107): a, c, t, g, unknown or other
aactaagtatggaacctcaagctaaagcctaagtggtatatgttcaaataccattggactagagtaataattctgcatacaatactacaccgttttgttcttcannnttacaacacttttaaacctctgggcaaaattcaacctctaatcctattaatataactttttcttgttcaattttaattaaaaaacagtacgttgttcaaatcattagcacaagctagggttaataatatacataaatctcataaatctatggaaaagatgataactattgtcgctgcgcgtacatacttacctttctagcaactattcaagcacatctccttgaaatttcaagctctagaatcaattcaaagcgagagatgaaagaaattagaacttttctctcattatagtatcgacataaatttcaagcttcagtaatcaactcaaagcaagagataaaacttattagctaaaatacttctagaccactattgctattattgcaatgcaaaattaacaaaaaattaacgttaattaagaaaaacagtgacataaaaaaaaaacaaaaagaaatcaaaactattatgatacatagagtgagggttggagtaccttacctgccatggctaataagattactgtgatttattgtgttgttgagaaattgaagacatcgacgaaaatcagagaaagcgatggggagaagagagcaatgaagataggtttctctatttttgatgtctgatttttgtttctttgaaattagaaattgctctcagattttctgaaaatttaataaatataggaaattactagcgaagggtcttcaagtgaaagggtctttcaatttcgtacaaaacaagtcgaagcaagcagagaggttttttttttttttttt

SEQ ID NO: 61009 - DNA, 955 bp, Cannabis sativa
tttgtaacacttatttattttgtatatttattttcatgatgctttgttctattttattacttaaaaatgttgttgtttaattatttaaaatttttgactacattatatttgtaacgatagtatatgtatgaagtatgaaacttaaataaaaggtgatatttaatttctacttattttttttatatttttaagttaatattaaaatttaagtgtgtaattggatatccaattaaaaaattaatccaatctaattactaatttgattggattgaattggattttgaggtttaattggattggatcgaatgataatttttgaaatctaattattgatgagattgaattagataggaaaaaaaatttaaattggattgagtgtcacccctcttatatatccttaatatgatgatggtagagatagagaacaacagtaattacactaccaccactactatcattaaaaaaaacaaatgtatgcattagatatacaaaatgaatattgtttgtgtttttggttcgaatgaatcatacatctttttttatttatatataatatatatctttattaccgcgtcaactaaacggcagggatggaagtagatcgaaagtgttattaaactttaaattatatgtgctaatttaaactttaatgtaaaatatatatgtggaaaaaattataactaacaatcaaataaattaaattttagacaattaaacaattgacaatgagaaaatttacaaatcacgaacaataattaaaaaaaaaagggatgaatagattaaagaaaaattaaaaaacaaaaaaataataccaagacatatattgtaggggtgtacacgggtcggatttttaggttttcgagatatcgggtatacccaggtattgtaaatctacaaccgaacccggtgttcgggtttacgggtgtatcgggttcgggtcggttatgttcgggtt

SEQ ID NO: 61010 - DNA, 677 bp, Cannabis sativa
acggcaaaccaccacacaaccaccggaatcacactcagacaataatgcagcttagaccagaaggtcagttcttatattgtattttcattattttttcttccaatataattgagcaaactacaaacaatacatacttgtgttctacagagttcatttcaaattcaataactcataggtttatgatactattgaaaatttgtgtagtatactatattcgtgttttagtagattttttatttattttagcatataaaaaagatttttattcagttttttttttttatgatcccttatattataattatataaaattacttgtaaatttttaaattttttgattagtatacaatactgaaattaagttcaattaattatttaccaggaatataagaaaaaataatagcgcatacaataaaatatttaaattttatttttaatattttaaattatttaaaaaaatttaaaaatttacaaacagtcttaaataagtataatttggataattataaaaaaaaatagaactaaaaaatttgtttggagaccaaaataaatagagtatattgaaagaaccctatggtgtactgattaaaaagataataaaaaatgcagatcctatatattcttactaataattattttatgattagtttcttattgatcctttttttttttttgtt

SEQ ID NO: 61011 - DNA, 907 bp, Cannabis sativa
gaagaataagtggttgaaataaagtggcaaaattgtaactagtgaggcacacaataagtggccgaccactaggttaattttttcctcatattttattcttttttaatccatataatttaagcctaaaccctagttgatatactataaaaggaatatgatgctctcatctcatccaactattcacttcaaccaaactaaacctagttttcattcttcgacaactagtagatgagagacaccttctatagtgattttgaaacttccttcattgttcttcgtcaattcgcccatagtgatagagagccatgcccacacatagcaagtcaagtacttaatcatattgcggaagacagtggaaccaaacccgaaggagagagagatccaggctcagatcttgttattactcttcgtcagaaaggaaaaagagttagagatttgagcggaatgagtaataatattcttctgcaatcaatgtaaggttttcaaaactcttatgtgtttaatttcatcgtattagaagatttcatatttaggatgttaatgaaacgtacatggtagtaaatctagatcctggtaaaataatcccaacactaacttgctttgttatttttaatgggacaatccccaatagattgtcatccgttagacaatatattagtgttagatctcgtaagataattattttggaaatgctacatctagttgagtcatccctatagatgacaacttagactagtatttacaaaaatgaaacaatgaagaagtttataaaataagaataactttgactcttgcctaaatgggacatcatttgattcttattttaatggaaattgttctttagatttcctcttagcctttttattaagaaattgcttaagataatattgttggaatatattttacc

SEQ ID NO: 61012 - DNA, 1504 bp, Cannabis sativa
tttttttttttttactcaatacacatattttttaaaaaaatacttttatattattgttttccttataaacattaataaaatgaaaaacgtgtttatgtgtgtttatgtttcttaaagagtcactattgtgacactgtcactgtagttataaaaaaatatatatatttctattactatattttaagaaaataaaaaaaatgtgatatttttctaaaaaataaaaaatattgcagtaaaattaatatataattaacagcaaattataatacgtaatattaaaaaaaattaaaaagtatacatataatttttttttcttttttttttttttttctaaaatcaaagttttccatttttctagactcttgaactatactacatttatctcacctttgtgctaattgtttttaaaaatgagtaaaaatataattaaagacatttttgtaacaatttttctagttcgattataatttttgaaaaaaagaaatttagaggcaaatctcaagaatcatagttcatatgataaattctatttatttattgactttttaaaagatatattgttttttgatataattacttataaatataaatttttaattgttattaataattatttagaaaaatttatcaagaaaatacacgttatttttatctggcgagtataataatataacttggttttgttttttcgtttaaactttgttaatagggtttaacatcataccttcttaattttaatttatctcattaatttgctcacgcattgggagtccataaaccctagttcaaatagggtttctctgcaactcctaaggctactcaccatggaaggcattgagctagaggaggggcttaccagccccttcgacggacccatcgaccaaggagatttctgcaactccatcctcgcgcgattcagtgactccactcaagaggagcaccaaaacctctgcgcggtcataggcaccatgtcccaggagcttaaggaccagaacatgccatcctccccggtggcctacttcggtactacgtggtcgtcactgaatcgtctattatcggagcccaacccaccgagtcacgttgtggagtccttcctcacaattctctcgcttcttcttccccgagtccctgttgctgtcgtcaggaagaaagaggaattgatttcgggacctatggttcgtgttcttcagctgtcatcgtcaacaatgggctccataatcgctggattgaaatgcattacacattttttaatcatcaaagaggcttctagttggtcagacgtgtctcagttgtatggaattttgatgaacttcgtcactgattcgcgccctaaggtcaattatccttttttttttttttttttcaaatattgtgtttttcaatttaatttcaaattaaacaatgtagtttcgggttctgaatgcgtatcccaattgggtttgtaacaggtaagaaggcaagttcagttgtgtcttcgtcatgtgttggaaaaatttcgagggaa

SEQ ID NO: 61013 - DNA, 548 bp, Cannabis sativa
gaacattagcaatagagtttaatatatgtttacatttaacaactaattgtaaaaggtatattaagagaattagatgacacattatttaatttaataattattatagaatattgttaactatttacaaaataatactaagatgatacctaagtgcaatacaaaacaaaatgatagagatacatatacaacttaaaacaaatcatacacttaaacaccacaaagtgaaagatagggtaatgaactaatgatccctagatttgaagaactttaagaattttgtagaataattgttttcttcttttaaaaacacaacgaaaaaataacataaaatggaaatacatcttctgaatttacgtcatgcaaatataattaaattagtgtagattgaattgaattgaaatttaatatatgggtgcacttttaatgggtattacccatgaatgaataatattagaaaatttgagctttcatgattaatttttttatttaattagaaaaatttctcatttttattatatagactcggattggtccatcagctgaaaaaa

SEQ ID NO: 61014 - DNA, 746 bp, Cannabis sativa
accgactacgggtttggtccaagcttcgagtcctggatcttaagtcccgaggtgggtcctaggtccaggtttgggtctggggccgagtcccagatcgcaatccaagttctgacgcccaagttctggtcctagttcaggggcccaatttccatgtccgagtccaagttcgtgtttcggtttgggttcgggtctggtccgagtccaggtcctggttagggttcgagtctgagttcaggttccagcccaagttctgggtctaggtccgggtctcggtctaggtctaggtctcagtcttggtttaggtcccaagtcacaagtcccagtctgggtgcaagtccttgtatgggttcttgtttgagtatgggtttaggtttgggtccttttactgtctcatgtgtccagacctggtctgatttcaattatgtgtccgagatcgggtttggatcccggtctgggtatgagtctgggtctggatcccggtctgggtctgggtcaaggtataggtacggatccaggtccgagtcctagattcaaacactgactatgggttaggtcaaagccttaggtccaaattcggatctcagttttggatctcggtcttgttccagtcctaatcccgagtctttggctgggtccttaatttgggtttgggtctggattcggggttgtgtccctatagtcaggtccttagttttgggtccaagatcaaatcccgtgtctcaagtctagggtcaagttttgggtct

SEQ ID NO: 61015 - DNA, 809 bp, Cannabis sativa
aatgcgatcatatgttattctattttttaaccatttggtttaagatttacacataaggcgaaccatactttggaaagtttatagatcaatagatgtaccaaaagatagtgatgttacaagtatgtggatgtgatcaaagagtaacatagttttgtttggttttaatttttacaggttcttaaaaaatatatatatttatgtatatttttttttaacattggaagggaggatttgaagggaaagttatactaattcatgtataaaacaaaatagagaaccctgatagcttgccatctaaaatttaataacatacatttgttaataaaaaaatttataatgtatgtattgaaaatgataaaagttttcaagaggagatattcaaaaggcagggtaggcaacaaattcaaaattaattagttatacaataatcaattacctcagcagcaattcctcttcaacaaagccgtttggagctctttaaacttacttaaacacaggttcatcctttagcaagtggttaactctcaacttctaacgcataacaaaatgatacaatttaatattgttcttaattctttggagtgcccagtgtgtgaaatggaagctaagactcataaccatttattctttgattgtgttttgtcgagcagagtggtgaaggaaatattttcttggcttggtaatcaggcttggccgacttctgcaacaggttggaagagctggctcttgttatgggataccaatttagtgtatagagttcatgttgtttttgccgcaacaatgtatagtctttggactaatagaaaaaa

SEQ ID NO: 61016 - DNA, 732 bp, Cannabis sativa
agagagagagagagagagattatcgtgagggtgggcgactgctaatcatatgtaacccttaaatatgagatctgagtgagatataattgtcctcattgtataaacgtcggctattcccttaaaaaatgaaccccacaattttataaatattttaaactgaaaaatgttctcaaggagtgtttacaaccgatggctattcttcactatagacattcacttcatttcttattgacggttcctcaaaaaaaaaaaaaaaggtttaaggaccggcgggaatataagttgttgaaaaaatattgtcgaaaaattatataaacataattgaagttacaaaaaatacatatatttaaataattagcataaaaagaaaaagtaaaaaagtaaattaagcacaatgaatatagaaatagattggtctatttaagaaaaacgagttgatcgacctaagtaaaacatgacacgaacatgagcacagcacaaaaatatcaaacctacaagtatttgtcgggcctaccatttaaaaatattagcataatacgacacgacacaatctatattttttatgatactacatcaagactcatattttaaaaagcacgaaaaacatatagattggaccgacgcacaaatatatatacaatactaataaatgtagacattgagtgcagaaggctccctaagaaagaaagagagttaatgtattgtatggaaaatttgatgagacccaacctt

SEQ ID NO: 61017 - DNA, 602 bp, Cannabis sativa
caatctcaaagattacgagaagaagtttatctctctagtttaaactctacctcacacaatcacaatttttacttaatcaaatctggtctaattctcacaccaggttacaaagatctatatctatatatagatttacattgttgccaaatatgtctcctaaatcaccgtggcacatttacaccgccataaatgatccagctcatcaccaacaacaataatctacgttatcttgaaatacactctttagtacggacaattcggaagcattgtaacacacaagctttctggatacgtacatgacttcattgctagatgaaccttcaagactgaaaaagttgtccaggagtgcacctccaaattagagacaagctatccggaagagacattctatacacggtacaagctattctagaagaaccttccaagttctacaagaccttctgcacagggctttccaaatccacactaagcttccggtatttgctctccgaattcacatcttccaatcccggacgataaaacttgtaaccataaccaacatatatattgtaaaattttaattttataaggatttttttattatttttagtttcaaaatatat

SEQ ID NO: 61018 - DNA, 827 bp, Cannabis sativa
cgctcttccgatggtatttaccctttttttttaaaataaattatatttttatattgaaagattttttttatatttttatagaatctaaatacttaatagcagcgataataatgaagaacaatgaatgaacagaaaaaaattattggaaatagtaaaagaattaagatgaatttgaaatggtttattgaatattaaaggagataaaatctcatacaaaaggagagagaactctccatgatgccggtcacgacatgttgatattgattgagtttcagggactttcgtagaattatctcaattcttgcatgacaaactatcgctccccacgacactagaaagcctgaacaatacccaaattgcccttcaacaaacctacaaccaactcacctcacaaatgatatcctacccttggctcgtgtgtctcaccccttttctagtgtaaataaatctgatattaggcttaactaccccctccccaatttttttaaccttgttctcaaagttgaaagttggaaattgatctcgaatgacgttaaacttttcccaagtaccttcaaacaaaagaagatgtttccaacgaatcaacacatctacaacttggtcataagaagatggttgctgcctcacattaagcaacttagcaggctccataatgagctctaaatctgatgtcaaagtgggaggaagagtgaacgaagagtgagcattacagacaacaacacgaagttgtgagacatggaagacgtgatgaatgccaaaagaaagaggcaagtccaaacgataagccaccttaccaatgtgtttcacaatcgagaaatgaccataat

SEQ ID NO: 61019 - DNA, 1108 bp, Cannabis sativa
ccaaattaaatgaagaaaaagcactacatctaacaagagtatacaaatctattatgactaaatattaataattttttaaataattattttggttatgagtgactaatgtacctaattttcattgacaaggaactagaaaactccccaggtcgaatatacacttagacaagcacacttttttctttttctaccactaacagtgaagataaaataaagtttaatggttgttgtgtgttacttttttttaaaaactattttatgaaagtaattaacattttctatttcataacaattttttacataattttggttatgagtgaataacactaacactaacactaaactcctcaggacgaatatacacttaaacaagcgaacttttttcttattctatcactaacagtgtagttgaaataaggtttaatggttgttgtgtatgaatttttttaaaaaatattttaaaagtacttaacattttttatttcataacaaaataaaacaattttccctatgttaattctttaatggaatcactagttacaatagtgtaaaattttagtatatccttatgcttaatttacatatatccagtgaaaaaggaccaagttctaatttttgtatttgtatcagtagtactatatgagtccacgccaaaatcagagataaatcaactacatttacacctaaaatagaaactcctaatcattcgtttccgcaaatgcatgaacaaatataaatgaaaatcaagtttttaatatactaattgaaaactcaaacttttgtctctcctaaagtcaagcaaatattgatcaacccaactccatttatcgaatccccaaaaataaaaatccaaccaaattaacaaacaaagatttatttaatcaaattaaacaatgcaagtattttattgcaccaaaaatacataaatcaaaatacaaaatgacagactcgttctttactgtgggtaatcaaaaattaaacaatacagtacaatgcacacttcagaatcagaacacatgcacagagagatacctcaacagagaaacggtaactcactagaagataaagtcgtcgatacctgagagaaaataagactattaaaactgca

SEQ ID NO: 61020 - DNA, 813 bp, Cannabis sativa
gaaagaatgagatgtttgaggttgccacgtattgaaaacataccttctaaattgttataattactttccaaaaaaaattaaatgctataattaattactataatgtgtgaaatgtttgactaatttggaattattattggattggagtcagaaagaactgtggatttttgagctaaagaagttgatattagattagatagaagttgaattggataacttggtcatatgatgacacgttattcttctgtgttatcttaatgggatattcgaatacttttctcttaaatggttatcaagactctaattaataaattgctttaccattagtgggtttcaacttttttttagcttttgcttatggtaattagctttggaaataggaaagagatcatatgagaatgtgggggccggtgagtattaataggcaaaatggcagtgaaaaagagtgagtgagtgagacacttgacagaggcagtggcttacatttagattttgggtttatgtagttttattaaattttgtttctacagaaatcatgattaatctttcatcatgaatttacatttagatttgtttctgcagtgatttgctatcccataatttctataaattttgatatatataccactcatgttctttctttttctaatggttttgtttctttctcttaattcattctcataacatgtttactttgatttcacacttttaataataagtggttatgaagatcttactgtttgtgataataaactatatagtattgtagttctagctcatttttcatacactaatgatacatcttattgtttg

SEQ ID NO: 61021 - DNA, 939 bp, Cannabis sativa
ataaagaaaccaaacacttgattgagctttcttaaggaatggcaagtccattccaatgctcattcatgtgaaccaaacaccaccttagtgatattttattgatatatagttaaagggtatcactccatgtcacgtttcttggagccattttttaagaaaatgttacaaaatgttcgagaatttgatgaaggacatttctagtgtcaaagcgaacgttctaatttattgccctattacgactggtaatagtcgtgtaatatcaaatgtgaattttaagcactatataaagatatcttatttgtgtaacctagttttctaccaatttaagcacttgctaaaaaatataagacttgattattctcaaagttatttcctaaaaaattctcttagtgctcttcctggatgaacaactagccctaaagaactcacttcctaattggaggactatctttcttgaggttaacacttaaagtagacatgatagtcatttgagaattcactttcagatagaacctatccttctaccagacttcttctagattgacaggtaggggtgttcatcaaaccattcacactgcacaaactgcccataccgcataaaaaatacggtttgaaattttttgtagtgcggttgtgaattgtattattgctaaaccacgcgcagtgcggtgcagtttgcaattttaaatttaataattgtggttcaaactgcaccgcactatatattacaaagttactattttttttaatatgatttatattcttctttttcatataaaaataattatatcggtatattatattattttttttagggtagacactattttagaccttgtgttttgcaaaagttaccaattgaaccttctattttgttaaataacaaaatggactatctattttgttaaatggtaaaaataggaccttgagctcaatttt

SEQ ID NO: 61022 - DNA, 908 bp, Cannabis sativa
gatttatttgaattcagaatgccttttatatgtcatatagtggaatttaataattttgcattttcagtgcccgacaacatggaacgcgatgtatggctcagcagaatcataatctaatactttagtatagcgggggcggtattgttagacattgggaatgtcaggattagtccggaatttagagttttcccaaaataccctttagtgctttttaatcctttttagtatgggagtggaaaaatgatcattttgccccataagcttttgtcctttagtgaacttagtattaagtaattaatggatttattttggtttaggttggctcaaaataagataggtattatgctattttgttcatttattcaaaagattaaaaattggaaattcaagagaattgcttttctctccttctctctttcgaccacttcttaagcagctaggatttgatttattgttctgcatttccagcaagaatcttcaaggtttttggagtgcttaagctctaggtaatttcctttagcttttctttagtttcttgaagtttaagaaaatgagatatttgcatgtttgatgattgtgtggttgtggctgttgttgttgtttattattgttttctaaaacttaaatatgtttaattgagtggattacaacaagttttgatgcatgtttgttggatttaaccaagtttggaattttaaactcaaaactttggtttttatgagtgaaatgttatttagcttgttgtagctgctgtggtgagttgttgttgtgttctgaggtttagatatggacttttatgttttttaatgcttaaattagaagctgtttgaagggttagtcatgttttgagtttttgaactcaagcttgactcatcaatggtgattttcgtatttgagcatgaagcttt

SEQ ID NO: 61023 - DNA, 1636 bp, Cannabis sativa
  modified_base (1572)..(1573): a, c, t, g, unknown or other
aaataatttccaacaacttcttctcttgctctggcttcttctccggctcttgcttctctcttgaatcttgagcgattttaagggatatgcctatacattcagccataaagttagtgagagcttagttggtaggtgatttcatattggctaagttttatttcccatttgagtaaccgaccagatgctttaagcttctatagtacttgtcgcaagggttggtcagtgtacacttttattggatgagcttggaagtaaggtcttaagctttctcgaatcctaggagcaagcagtatgttagttttttaataagtgagtatcgaattttagcatcaataagtcttttactgagatagtatattgggtgttgaacgccatttacttctctaatgagagccatacttacaacaaactctatgactgccaagtacacgcccaattctttattgtctagaggttttgacaagataggaggttgagctagttgtttcgttaacttttggatggcaacctaacactcctctatccattcgaaattcttatttcccctaagtatgttgaagaaagagacacacttgtctgtggactttgacacgaatctgcttagtgctgctatgtggcacttaagctctatacttcttctatttttgtgggcgacttcatgtccaaaagggcttgaatcttctttaggtttgcttctattccccgggctttcactatgaagcgaaagaactttcctgaacctactctgaaagaacacttaaggggattgagtttcatgttgtactcttagaggatcttgaaacattcatttaggtcctttatatgctcccaatctttctagacttgacgagcatgtcgtccacatagacttcaatggtttggctgatcaggtctttaaacagtttgtttactagtctttgataagtagcctctgtgttttttagcccaaaaggcataaatttgtacaactgttaagaaacttgtatgttcttagtctggtggatgcattttgatttgattataacatgagtaggtgtccatgaagcttaggatctcatgactagctgtagcatctactatgtcgggttctctgttgatctccccttaggcaccctatcccatgccttgttgggaactttaggcataaggggtaaattgatgtcacaactttcaagtcatacagggctggccagccaatcataacattgaatgtagatggcacatcaattactatgaaatgagccatcattgttcttgttttgggactttctccaattgtcaaagacaattggatgtatcccaagggcgcaaggccttggccaaagagcccatacattagttgtgcacagagtgctagatctatcagttggagccccatatatctcataggttgatttgaaaagtatatttgaagaggctccattgtcgatcatgcacctgacaactgtcatgttccctatcggtgcaattacgaccaaagggtcattatgaggaaatttgacatttgcagcatctccctttgtgaaggagttggcaggctcttcaagtgggccttcacaattggggtggttnntgtgagggggtgctgggtttagtatgtcgtacccacttctatgtctcccaactctcacacaag

SEQ ID NO: 61024 - DNA, 1054 bp, Cannabis sativa
aacaatctcaatagttcgggggaagttctaacggccaaaaaagttcagggagcacgatttagtatatatcaaagttcggggaaaaaaattactaattagccttaacttaaatatatgattacattaattaaaatgtaattaatgaatcgtggtctattcgaaaattaataatgtaataattattatagtaatcaatatacataaagaaattaatttgtgcattagattgatagtggcacgtatgtatgaaagtacatatatcatatggttcgtactgtcacctaattatatatgtaacaaccaatttgcttcgaactaaagccaaataatcttgcactaaaatataaccaaaaaaattgatgaatggctctcgttcgatctggatcgtccaattatctttctagtctcgctccctctctcttgtgatgattaataacttttgcccataacctatataggtcgagagctagaagagcaacaacactacatgtactatctacttctctctatatatagacgataatttttaatttcattttcatgcgaccacaagacttaccacgaaagaaactagtcttagttgtgtaataatacgatctttcataagtgtcaatatgcaataattaattatgatttatccccaagccattaaggttagcttagtggtgaaggagggatgggaaaaagagagagattatgagttcgaactcaaaatcattaagcgctattaaactattatttaattataaaatattattacgctacactaaaaaaaatatgatttatccccgtggttctctaacttggctttctccctaattataataccattccaattccaattatttttataatatgtgctcatttgtatgtgaatctcaaagtgatatgggatagaaaaaatagaggttcacattttgacatctacaattaatggatatgctcttatatgaccatatcacgatgtaacaattatcaatcaaattaggtattggagtagttttatttgctgaaacataataaaggaaacttaggtttgatattttcgctccac

SEQ ID NO: 61025 - DNA, 1096 bp, Cannabis sativa
ttagttattactttcaatttcataactttacaattattgctttcaatttcaagctttaccattattgttttcaatatatttttctaatacttttcattgaacttttattttataaaacttttcattatgcgaattgcttctgataagaaagtgtttatcttggatctgataaagttgtttgaagacgtaagctgtagatcaactttatatctaaatctcatggcaccaaatgttgtttgaagacgtaagctgcagattaactttatcttagacatgataaagttgtatatcaactactatatccaacatatagtaactaatgctttagtggaataaagatattaatttagttggtttcattttggattgtaatttagtagtatttttttttctttgaagaaaacagaatgttaagacttttatttaataaacaatttatattcaaaatatttttttagtcgaatgttctgatttttttaagaaaacagtttgttagatttgttttattttaaaatcacttatatttaaaacaattttttaaagagtggaatgtactgatttttttaaaaaaatattttataaattattttcaaattttaatatttgttggttaaaatttaagattataattttaatatagatatggataatctctcataacttaatagttctttataataaaatataactaaaaagattctacataaactaatttaactccaatagcggcttgatctaagttcacgatatattttcattcaattatcttttttttttcttttttgtttgcttctgtgctctatgatactagattgaatattcaattattttcctcagcttttgctttccatttcctagcgatttctcagccatcatctttgattgtcatgcttagttatacatgtataattagtttttattatctattttccactgctatagtatatgttgaacttgatgacactacaaaaattgtagatgctgtgatgtttgcagatatcatgaaaaaaaatactttcatgtcctgctgcctaaataatacactttactgtacatatatagttttaaatatataaaataaatgtacttgactatc

SEQ ID NO: 61026 - DNA, 520 bp, Cannabis sativa
ttaggtgatgttaaaatagcaaaacttattttttttaatactacttattgtgtatgctatgatatagaatagggtttataatttattgattaatgtagatatttattttaattatttgtgattaattgactaattaattagtttttaattagaataaatattaaaaaattatgttcactgattgagaactgtcaatatggtgttacaatatagttctaatctatggaattaatttaagactaggttgagatattttgttatttttttatttatttaattaattggtactttatataaactttgaaatgtaaattagtacataaatatggataataaatcgtacgtgtttctaagcagattaaatatgttttataatctgtattaatgattgagaaatatgcttgtttggaggggaaaatatcaggacagaacaaaggcccaataaaacaaaataaaagcatcaaaaggcccaaacggaatgggtactcaaaagtctgaagtccgggtacattaaaaaggc

SEQ ID NO: 61027 - DNA, 1110 bp, Cannabis sativa
tattgcctctaagaaagatgcagaaaccacttgtggatttttgatcatcaagacttaggccagtctgcatcagaataaccttcaaggttgagtaaagtggagggtctgaagtgtaagccaagatgaggagttcctttggcatatctcaaaattcgtttgcaagcattccaatgattacagtgggagactttagatattgactcaatttgttgacaaagtacgcaatgtcaggccttgtcaatattaaatattgtaaagctcccatagtatttaggtaaatttcttgtttacaaagcttggactatcattttgagataatttgttggccagaatcattggagtgttgcattcttttgcatcttcaaagttgactttatttaggagatctatatatagcatattttgactgagtaagatagatccctaatgtgtttctgtaggcctcggaacccaataaataactaatagagccaagggacttgagggcaaattttgtgtgtaaatatgtgatcaacttggagatagcatttgaatcaacacatgttattagtaaattatcaacataaacaagaaccagtaacaaagaaccctgctggtttttataaagtaatgaagaatctgacacagaaactttaaacccccaggcaattaaagtacattttaatgtgtcaaaccaagcccttggtgcttgtttgagaccataaagggacttgtttatctgacacacatggtctggtttggtgacatcttcataccctggtggctgctgcatatacactttttcttttaattctccatttaaaaaagtattgtttacatcatttgttgaatgtcccaatcataagtaacagctaaagagaatatgattcttatagttgaagcttttatgacagggctaaaggtatatgaaaatccaaacttggagtttgttgaaaatctaccaatcttgctttaaatttgttcagtgatccatccttattttacttagtcttgaaaatccatttgttagtttaaacattcatatatatcagcagtccgaggaaccaaaacataggttttctttcgtgttaaggccatgttttcatgatccatggccttttaatttccaat

SEQ ID NO: 61028 - DNA, 1143 bp, Cannabis sativa
attgctgaaggatacgttatagataaggctttgacattttgttccatgtacttcaaaggtgtgcatacaaaattcaactgtccttagcgcaatgaagatgcttctagtctatctcgatacttaacagtttttaaatctcaatgccgtccacttggtaagcaaacaataacaactctcaatgagaagactcgcaaaagaaccgagtggtacatatgatagaattgtatcgagatcgacccttatatgacgtaagttaatcaaattattaatgcttaatgaatagcattgtattattctatttagctaaatttgtaatagttttttttttaatagagagcacctagaagtaatcgcacagagggacccgaatgctaaccataatcttttacacaaaaaagaatttccttcgtggtttcataagaaggtgtgcaagtattccgtttcataatatttacttaatctaaattatcaaatctctcaaatcttgattgttatgcgtgttttttcaaattttcaatttgtataagctcaagtcattagaacatagtgatgaactgctaactttagcatttggctttgatcttgttttgtatttatatctgacatgtatagttaatggagtttgatttgttgtacatagccgagataaagatcgcaatactcaaaacaatactggggtgtccgttgcagggacagaaggttttgactattttggggaacttgaaaaaatattgcatttgtcccttagtagggcatattcagtaatattattttgatataagtggttcaacacagatccgagaaagaaaaaaattattatcgaaaatattttttttttttgtttatttatattagagtcctaactaaatataaagattaaggtggaaaaattaatgatccaaaaaatattggtacattaaatgaattattactaaaatctttagctagacagatatgataagagatcttattagtgatcattttaattattgtgttattatttgtttttatttttttgactttctatttctattaaaaattagggttttttttttagaattttattggttcttatatttttaaaccatgtagataggggtgttcgcggtgcgggtggtgcggtttttaactattttttcaaac

SEQ ID NO: 61029 - DNA, 1749 bp, Cannabis sativa
aaatttaaaaggatacatttatcagttacttttatgagctttgacttaatatttatttaagccatcactcagcgaaatttctggcttcgtcactgacaacaactaacaacttttatctaccacaaggagaagatcaatttcaaaaaatatgattttagctgagactggcactttgagagcaaaatcaaccatacagcaacaagaaaacaaccaacaacaaattctcgaaaaagctgaattataacaattgtataattatttgttcattaattgatattgttttagttataaaactgcacaatatctacaaaagaaatattgtgaagtttctttacgttgtttttacaacatcttatttcaactttaaaataaaatcaagttattttcatgttattgtaaaatttgtgatgaattgtttatatattgtactggttgttaaataatttgaagaataatgctttatatgttaaaacaaaaacttaatttatctcttacattcacatataaaaataataagagaacacacattatgttaattttgaattaaatgagagcattaatttcagttaagaaaatagataaggtaaggaattaatatatagaacaaaagttatactatatcaattacttttgttatgaagtgggatcatagctttggaattaaattttctttattttgaagctaggaatcacttgaaggtatatatattgaataaagaaaaagaaaaaagaaaatgtagtatggtaaagtagatgaataaaaaaaatccaaaaaaaaaacaagaataatagagaaaactgttaaagttgggaattagaaaaaaaaaaaagtaaaaattcctttcgtttcgttgtaatataagagcatctctaaataagtgatagaaaattaaaaatatatattttaatagtatgttaataagtgatgtaaattcagtatataataataatttgtgccaaatttagcacaatacattttttataatataaaacttgtattataataaatattaaaattatatattaaattttaaattatgttttataattgtatattaacgtacaattctaaaaattaatataaatatattagaaagttatttttgtagtaattatagagcaatttttacaatttttttttttttggaaatggtttaacttacaaataaatcattttggttttcggaaaaatatgaatagctagctattagaatgttagactaatttgtcgtattactcttgaaaatttattattgtgccagccttatagtaaaaacaattataaattgtcaaataatttattattttcaaaaaaaaaaaaactaaacttataaatgtagtctgtattattaagtaatattaaattgatagttttagtgttaaatttataaaaaaaattatttaaattttcaaaatatagaattttattaaataaattgataattctgcttaatagtttcaatatatttctgaattaatggaaaaattaataaaaaaaaattaaaaaaaaaaacaaaaaaattttacgatatttaagtaatctatatgtaaaagtatagtgacattgatttttcttttttctttcactagagactaatacattgtaatggttttggttatctaatttgtattaatggaattgaagcttgagattgagagtatataagaagataatttccaaccaaaaagaaaagaattgaattgaataggccgggaaaactattacaaaaaaagctaagaataattaag

SEQ ID NO: 61030 - DNA, 882 bp, Cannabis sativa
tatgtggatgatatgctaataattagcaaggagaggtcaaatattcaacaaggtcaaggatttgctcaagtcagaatttgaaaagaaggacataggtgtggcaactaagatgttggggatcaacattctaagggacagaggcaaagggaaactcatgctacatcaagaagactatatcaacaagatcatagaaaagttttctatgaaagatgcaaaggttgtttcacagtcgattgccaaccaataccttatgtctaagtctatgtgccctaagaccaagttagagcaagaagagatggctaatgttccctactcgaatgcagtagggtccataatgtacttaatggttagtactagacctgaccttgcttatgcaatcagtgtgctaagcaggtgtctagtcctggaaaagaacattggaaagccataaaatggcttatgagatacttaaaaggtacatctaagttgggattggtctactagggtcatcaaacacatcaggagattgaagggttcacagatgcagattatgcgggggacagggacactagaagatctacttcagcctactttttcttaacaagggaaattgtactagttgaaaggtacaattacaaccaatagtggctttgtccactattgaatctgaatatatagctactacagaagctattaaagaggccctatggttaaaaagacttatggaggaactaaagttaatagaaaaggtgcctataatctactttgatagttagagcagcatctatttgtgcaaaacccctattttcatgataggacaaaacacattaagataaaataccactttatcagggataaagttgttgggttttatgccctaaataaaaccccatttcaatgtaa

SEQ ID NO: 61031 - DNA, 610 bp, Cannabis sativa
ttccatgaaaataattttttttttgaaaatattttatttggattccttgtgacaaattaatcaattttggtttttacagaactcaattatgataaaaattcaaaaagttatggtggtttaaaaatttcttgttcaatggtgtcgagatggtgcatcactggcaccaacatctcgaacaaggggcatgccgcgcgtgcatgacagggacatttcctgtctgaagcgcacgttgtcccctacttcggacacaaccaggctgcatccgctcgagctgaatcctgcaagtgtcgtgaaccctccccatgacattctcctgccttctcctttcgcatgcatagagcctcctcgtgggcagcaggtgcatcttgcaacaaaatccaatttttgtggattttttctacaaattttgaattttcccaatttcaaaccctaaaaataaaataatattttattttatcatttaaacctaaatatcaatatttttaaattaataatatttaatctgtttgatatattattattattttaatctcttatataaaataatatattattattattttatatatattatttaattataatattttaatcttttttatatatatta

SEQ ID NO: 61032 - DNA, 1450 bp, Cannabis sativa
actatactttagtgtgtgtgatttaagattttcagatcacatacgtggatagacatgtaataaatgtgttgtgtataatttaattatacatgacttgaccgatatgtaataacatctttcattaaaatatcctttactatgaaatagttattcatatcacaatgacgattattagttgatcaatttgaatcatgagtatacatgaactcttatttgtatttattgagttctttaattcacacgttaaagtttctcagagaagatgattcttaaaacttctatgttgggagcttaataacatgagtggttgggaacgtgttatacaataatagaatttaagctttcctagcaagtcaaatattagttctcttatagtattaattttggagtgctaacagttagatccaaatctataataagttatagaataactgttcacattgaattaatggtacacaaggaatcaagagataattagaaatgtaaaatagtaatttttgacaaaatcttattatgaactaataattggagagcgaactacttatattgattatatcaatggactacaagtaagaattttgtaaatataattctacattgtcaaagattgtaattccatatttatagtggagtaataataaacctgattattctattgatgatttttataaatcaaatatgaattggagcttcgaaatataagtccatggtcctcaagtcacctctatacaacactgtacaagggaaggtttaatttgatgaaaaaatttgagaaagaattaatttctgagaaatatatcttaagggaaaaataatgattttgtaaaaattattattctgaataattatatcaattataaattgtataattgatatttaactatttaattttatttgattaaactatattaattagttaaatataatattattcttaaataatattaaagagagaagtatattattttaattctagtgaaataagagtttaatgagaattaattaattattatttattagtaaaataaataataaattttatttgtggtgaaattgataaataaattttggatcttaaaaagagtgacataaaaagatccatgagaattttgtttgattattttattattaaaataaatcaaattaaattgataattatcttttaattattatattaaatatattattagataatgtatttaaattgaaatgataatattaagtaaaagattactattgatttttgttaatcacttatatgatatttaaatttaaatttaatttttaaatttgaattaaaaatacctaaaatcttttattttattggactaaataaaagggcttgtatataacattatattattatatatatatgatatatattagaataattaatacatgactttgaagagagatcagttttaggttaaaaatacgattgaattttcta

SEQ ID NO: 61033 - DNA, 747 bp, Cannabis sativa
agtatttattcctttatgcatatggccatttctaaaaaaactccaaaactgcttcacagaaatcatcacccacaaactcccaataatgtttgaagaaaagaactgacatccatccggccccggagctttatgactattcatggcaaacaatgtcctcttgatttcatccctgtcagggcactgaagggtctcctcctggtcctctatagataacctctcatggaacaactgcctgcaatccataccctggtcaagttgtgttccttcaaaaatacctttgaagaagtcggtaaattcgcgaccaatagagtctctatcagtgagccaaacattatttttgctcaaaatactttcaatggcgtttctcctgcctctgatcgctgccgataagaaaaagaacttcgagcatctatccccctccttgagccaagagattctggctcgttgcttccaataaagagctttcctggttaacatttcgttcaacgatcttcgaatttcacattcttggttccactcccgctcgcccacgggaagcctctggaggctctccagtttctgctccacatctttaataacccaatcaattctaccatactgagttctattccattgcataagagcaatcctagtagcacccacctttttcaaaaaccgggcaagagcccaagagtgattcaccgaatcccaggcattggcaactaccaatttacttctatcatccctcgtccagccctcttcaaactt

SEQ ID NO: 61034 - DNA, 1083 bp, Cannabis sativa
  modified_base (27)..(36): a, c, t, g, unknown or other
aattaaatgactcattccgctcagatnnnnnnnnnntgtatcctttctgtagcagagtaataccaatagctgagcccaaaactccttccttgtgtttggattcttcacaatcttacacattatgattgaggacttgcttgatatgtgtgggtatgcacaagggcggagccaggacttgaatgcaaggggggccaaattttaaaatttagtataaaataaaaaatttatatattattcaaattaaaaatattaatatacttgtaattaaagcatacgttaaagttaaattttaaatttgattaaaattttataaaattaaaatatatatatcaacgaaataattttatatttaacaaaatttaacacttaattagaggagattataaatctcaacttctactttaatgataaaagttatcaattagtgaatgattttgagctaaatatgtaaaaaaaaaaatataacaataataggtagtagaaatagtagaagaaaaaaataataattaataagcaattatcttattttattatcttctattcatataaatttaaatttatgtcaattcacttctaaaaataattcaatttctatagtatttttattaaaatttaatatatattttatttttaataaattaaacacttaatttacactatatatattattagttgtctatacactttactcttgtatatattatatatctatatatatatattaattagtatgtttctatttatatatgtatttttacttataaatatataaatatttacatatatatataaagggatattaaaattgttgggaggccatagccaccttttccttggctgtggctccgcccctaggtatgcactcaatcactaaggcttgaaattatttgtaagagaggctatagtatttcgaatagagaaagaagaagaagaaggaagaggtctcataaacctagagagaaaaatacgtttttatctttggaagcattagttcgataatgagaccatagccttccttttatactattttctaatagagttagggttgaattattaggaattaaaaattgataaaaatagagt

SEQ ID NO: 61035 - DNA, 782 bp, Cannabis sativa
attgttttgtttttctagttattctcgttaaatactaaacaaatatataggtataaatgagaataatataaacaacaataatttatatattattatatggatttaaatacaaaacgtaatataaaaaatttaggaaaaatataatttttatatataaaagatgtttatttaacgggaatattatgtatgcatacaactattatattttatatttaaaactatagatagtataaaactaaacataatctagtataataatatatatgtgagcttctttggtggacacattacttttacttaaggcattttctatttttcattctttaagaaattgtattcctttttttatctaatgttgtatattatatatagttgtaatagacagttcatttttaataaattttgaatattttacaatattgaaaataaatttcaaaataatttattgtactagcataattaaaataatataaatacgtacaattattgaatatttaaatcttatttttgatactctaaattagctataatatatattatcatataaagtataaacaaatttagttaataatttctcataaattaaaaacaaaaaatatcaatataaaaagagtaaaattaatgttttcacggtctcacctaagaatttttctatgtattgttatttttattttttttttataaaatttatatttagtaataaggaagataggaactaactttttcattttggtatgtattggattttttattatgtgtgatgcttgcatttattgataata

SEQ ID NO: 61036 - DNA, 567 bp, Cannabis sativa
gattagaattaggagaaaatgatttaacaaaaggaataaaaagattaagctaaaggagtgatatttttttttagaatcgaaaaaagtaataaaaattcagtcctagttgaaaaaatcacagaaggccaaataaaaactatgagataatcatattaaattaatcatcaaacctagaagtaatatatataagcagtacactagctagaaagcacaacaaaacactagattcaatcaagcataatgaaaataagagctaataaagaaagcaataagagctaattaaggcatatagacagacaaagttgtagttttaactataagaaattaatcagacttatctgaattagaccgaccaacatcctcgctcgcagtgctcatccacctcgtccccactgccacgatgaccttactgaaactttaacccctgaaatcacatttgaaacacatctcttttatgcatatatataaatactgacacagtacatgagatgaaggcaattattaactaagtaagctcatggtaatgtgtatgtaaatgtatagctaattaaatgccttagaataact

SEQ ID NO: 61037 - DNA, 1225 bp, Cannabis sativa
attcatttgtccaacataaaaaaaattactcatatttcgtttacttttagttttgcaaggcatttttatcgtttattgtactattgcctacttttcaaatccttatcttatctgttgccctctccaatttttttccctttttccttcatataggacagaaattaccggacaagaatatgaacgttaaaatagctttttattaagtttccaatttgtttccaaataatttttatttattttttttgtctaatcacttataaatttttaaaattttttaatttatttattaatgatgaaattcaaataattatttaggactcatataacaaaaaacagttatttatacagtaaaatatttaaattttattttaaacattataattattcaaaaaattttaaaaatttacaattatccaatatatacaattatacaagaattaaattaaaactttttttaaatgacaaaacagaaagaaaaaaaaatctaccgagagaatatcctataaacttacctaataatagttagaataaagttgttattgtgatcatgacagagaatatatactcaaaattagtaaggaacgcgataaaaaaagaatatgtataattttttttgacaaacgaaacattaatctcggtaacatttaaaatgtagttttgcactcttttaaagcgcttctataattttttggagcttctatgattaattagtcgttaataattaatttttctaaaacccggctgattaacgaatccacaaaaatagtctactcaagtagttgaactcaaactctagaatacacggcaaaaacattttgactagcttggtcgttccttcctcttgggacattaacatgcttgacttggaaaaaaagaaaaatagggaaattaagaatagctcaaagagttggtagataagtaatatactgcacacacaaatttcacatattattaaaataattcaatcaatctatctttacttcaattttatttacgatatatagcttccactttataaaagtaatttgacatgtaatgtaagtgtgtaatttatgtacatatcattacttactagttgatagacattaatcatatttgttaagcaaagattgaagattcataatatgaccaaccattacttttttttttctttggccgttttgcttcacaaccaacctttataacatggaaagctttactatttattggtttgtaggtgtgcaaa

SEQ ID NO: 61038 - DNA, 987 bp, Cannabis sativa
acttgcactaatataaatctaaaattgcatttcaattaatctcaactccttgatatccagatcaagtgttgtatgtagtattctctctgtaataggatctcacatattgcattcaatataacctttctccaccattacatctccttagtcacaaaattgttgatattgtgaaatttctctctacatgtctactcctcttgggatactggattcttcactttttggcaactacatctgtgttggtccagaagcaacactagtagttaattcattattggtacaacgccaaaaattgtacataactttccataagttgaataaatatccttcctacaactttaacattcaatctcactggcagagttagagaatcaagattgggtttttacacttctccaaaaaacactgctccacccctagagtaatcaccatctcattagtagactttctagcattaacgcaagtctagaagcttaatttggtgtagtctaagagtattaaaataccaccctaatcgactaacatatagttcctcttttgatcttaagattcacttgattgtcttccaatgttcctttcctagatgaaactgataccctactcattactcccactcaacaataggtgtctagtctaatgcatatcaaagcatacatgagacctctcactgttgatccttaagggattcctttcatgacttttatcttctctggaacagttgaaactgttccttagataaataaaatccatgcctaggagtcaaagacttcctatagatagccattaaaaaaatactccagcatcttactaaagtaagttgcttgcactagggtaagtaaattactaggtataccacaagccataggttcagataatctcaaacctttaatatactaggatcatgaagttttgttaagtccattgaatagacttattatcaaaattttctttcttgtccttgtaataaaaaacttttggttactccat

SEQ ID NO: 61039 - DNA, 828 bp, Cannabis sativa
tattatttatgtctccaacaataaattaaacaaataaaacaaaaaaaaaataataacaaatacaaaggaagaataaaaaatattgtatgtatgaagaaatatttatggatatatccaattgatatactgtgttttgaaatatatttatatcatatgtattagatttttaattgctactgtatacattaaaatattaattatatatatttaaaatatatatataaataatatggattggattggatcgactaattttatatgttaatcaacattaaatctataagtatagaatttagattttttaatctaatttaatccaatccaatcagtacaagtgcatatattcactctttgtgaattgaattgaattaaatcgtacggatttgattggattgaacattttattgacacccctaatgccaactccaacaaatttttgataataatggctgctttagcaactttttcagctataagtattcttagaagtcttattaagtctatttatggtattttttttggatttctatatttttaatgtagaaattacacaatatataagaaaattataagagtttactttttttatagcataaataaattataccatggggttatgtgttttttttttacatttatatggcctttttatgccatatttttataaaaaaaaaaaaagatagaaattccatatttgtaaaacaataataagtttcactgagaaagtcgccggtgttggaaaagtcaccaaaaaagtcatcgaaaaagtcaccagaaaagtcattgttgccgaaaaaagtcacagtcgccgaaaaagttaccgtcacc

SEQ ID NO: 61040 - DNA, 772 bp, Cannabis sativa
gtaaaatatttccaacagaccaaccatgtgatagagcaatggttaggacaatttgaattgtcacaggtttaacaactgggctgaaagttttagtaaaatcaaaccctggttgttgatgaaaacctttagtaacaagatgagctttgtacatgtgatgtgttccatctgagttatctttttccctgaaaacccatttgcagcctatgggagttcttccttcaggtaatggaataagagaataagttccatttcttgttaaggctagcatctcattctgtcatggcttgattccattgttcttgttgcaaagcttctttgacattttttggaatcttagtggtgagatatgccttaggtttatgaatccctgtctttccccttatttgcatggcatgagaattattggtgatttctttctatgcagtaggtgctggtgctggagcagtgtcaataattgaagctggtgtgattataatagtgggtgttggttcagtttaaccactaggagctgatgtgacaatagtagcaggttacaattatgttgttccagcattggtgttgtcattatgtgaagcagtagaagttgtgatattaggtgcctgctgtgaagcagcagcaagtatggttgctgatgctagagatataggttcttttataggcatagaataacttaccatagacggcacaacattattagtgacaacaggtgtagcattagtgcaagaaatgttaaatgtgcttctgactagaatttgaggaggtgtagaaaatt

SEQ ID NO: 61041 - DNA, 1169 bp, Cannabis sativa
cagaatttttagtaaattgggtaaaccgcatgatagttatgaagcagggtttggaacctgattgcctggcggagagtttgttatctgcaaaaggtggattaggtctatgccaatcagaatagaagatagagagttgaatactaatttgatagagatgaacttagttgattttgatattatactgggaacggatttcttgtccaagtactcagccataattgactacaaccagtggctcaggtcagaacaagaggttccaggggaactagggtcgaggcaattgccagagtggcactgacacccgatacacgtactcagagtgccccagttgtaaaaagcaccatctggtggagtgtaaagggtaggggtgctttcagtgtggcatgtcagggcattacaagagggattgtccccagctcaaaactgaggcaccgaagattgcaacgaaacccactccatccagggtgttcgtaataactcaggctaatgcgaaagccagcccctctgtgttaataggtcagctctcggtcaacaactcttatttctctgtgttgtttgactttggggccactcattcttatgtggcggtcagaatttttagtaaattgggttgactgaatgatagttatgaagtagggtttagaaacctactgcttggcggagagttagttatctccaaatggtggattaggtctatgccaatcagaatagaagatagagagttgagtgttgttttgatagagatgaacctagtggattttgatattatactgggaatggatttcttgtccaagtactcagccactattgaccgtaagaggaagataataatcttccaacctgaaggtgaagaaccattttgttttgtcggttcggttcaagaatctcggatctcaataatctcggtgctaacaactaggcaattgttgcgagacggaagtctaggttttttggccgtggtattagttaccactcgacctgaccctatttggccagaaacatcaagctggttcgggaatttctagatgtttttcccgacgaacttccaggtttaccaaatcagagagaaattgaatttgttattgacttggcacctggagcagaactggtttctaaggctccctatagaatggctctagcaaaactgaaagaattaaaaattcaactcc

SEQ ID NO: 61042 - DNA, 819 bp, Cannabis sativa
attgaatgtaaaattttatcttgtagcatgagctggattaaaacaaatttggattggtacgccagatggatggaaaacaatgtccaaggtctctatatttattgcttactgaaaataataagagcattaactaccttaaaagatacgattgtgttacttaagtatgatgctcttccatgatttactgaaaatggttgtttactcaaggtagccatcaaattgaaattactttctaatgaggctatatttgagaaattaaaattgaagttgacacaataccatactaaaacaacatcaatcgccactcaagcttttacagagcaattcaatagcatggaaacaggtcaaatgtgtaaaggttattagcttcaataccgctaataaaatcaaaagaacgtaatatgatgaccaagttaagagttgtttacctgatcaattagaaaccttagtgcccaaaggcctactatatcagctttggcttcttccaaagcagagtggacttcttgaagctcctgcatttggcaagaaaagtcatggtaaatcggaattagttaaatgattctacaaatattcctaagctgtggttattatgtaaaccaaccaaataatttcactattaaccattagaacaacttgaggaactctgttcctagtcaaaatcttcttgacttggcaaatacatgatcggtgcaaattatacagcacacttggcaattgtcatattaatttaaatgcatataatatattaattttcttatgatgacattatattagattacatagctaacgcaatgcttgcagatagcctcatggaaccac

SEQ ID NO: 61043 - DNA, 1098 bp, Cannabis sativa
tgtaaaaaccgaccatagccgactgatttttacccctacggatcacaaagttatgaatattcaaataacgcattcgaaactgcctagaagctcaaggcatgctgcaacacctagtttggaaacccaggatttagaaagggagggtcgcggcgtccgatgagtgggaccactgtgcctgggttccaaacccagaaaccccaacatgcaacaacacgaaaccaaacccaactcacacctaattcacctaaaacatgcttacataccaaaatcaatcaacacataatataactatttaaacagggggttatcgagacattaaacaagctcttccaacacttatatatacatttaagatcaaatttaacaactatcaaagtatgctcaaagcttgagctaaaatcaacacaataccaattcaaaagcttgaacaacaaagtcctacatacaacccaatatttcatcatgcaactccaagtaattcagtaaattaaaatcccaatcttcaatttaaaattcacacaaacatacacaaaggcaatacagacaattctaaagctttattcacctacaaatcaccaaaacacacaaccatgcacttaagaacataatttatggcaacacacatatttttaactttaaattacaaaaacaaaataaaaagaaaagaggtggaaactacctcaagctcttcaaaccattaacaccacaatcttcttcaagttccaagcacaatccaaactctaatctttgaagagaaaatgcaaaatgaaaaatggagaaaaagagagagagggtcggttttttggtaagaatatcagaggtgtatttttttcttattttgcaaaaattcctcttttattgataattaattaaatggccgaaaagaccaaaatgcccatagggccatgatatagcatatgcacaattcaagggcaattaagtcattcaatcacacaccacatttaaataatttttcagattattcaatcaattataaaatgccaaaataaaatcccaaaagtgtatttcgaccccgaacgcagttcggcccaaaatatctggttgtgactactacgccgacttgttagaaaatacctg

SEQ ID NO: 61044 - DNA, 733 bp, Cannabis sativa
ctcacaatcttcttgctcatttgcttaccattttttttttaattaagcgtttatatattacaatgcaaaactcaaacccaaaacctccaacacacatgcacttttttataaccacttgaggctcaagtaatttcatttgcctacaattaaatagtagaaattaataccataaggttatgtggcctaagacaaaattaatttttgaagtcctatataaataatttaaatattaattaagtaatagttttagtagttttggagttaggtttttctggttcatcaattagtggaatatccacaagttcttcccaatatgttcatcaggttccactagattatttttaagtattcttgtgttttctttaacttcttgatcttgttgtatctttttccttcttgagttgaatttggttgactttcttgttaaaccaagctctgataccattttagaaaataacttaaaccatgaaacatacacaaacaaaataattcaataagtatttaaaccaaggtcatttaagacctttcccaaacccaagttgactttgatcaaaaccaagggtaacaaatcaacactacatcgttttgatttcccacaacaataccttttgaagattctcgagatcaatcagatctctaatcttcttcttcctctcaaaaccctaacagagccaacctagctcgaacccttagggtttccacacaaacacacaaagtaatttagatctagatc

SEQ ID NO: 61045 - DNA, 684 bp, Cannabis sativa
ctaacatgcttcctttatgttttccaaattaaacaaattaataaacaagtaaaggcttactgaaccgtgaatcaagctcatctctggcaatgattgtacatatcttaacgatcttcaataaacaacatggtggttttgataccaaaaattgtaacgcccttctactagacacacaatagaaattttctcaaaaataatgaaaatttaaattttaacttttatcattatatatatgtatataaatattcttacaaaagttaggatcctgattcaaaatattattttcataacataatacatttttatagcatgtcacacagtgactaaaaaatttaaccccaaaatactttaagaccgaactctccaagctaaattgccgcaacatttataatcattgccaagccctggactcactggttctccgctttagcctttcctttacctacagatggtaaacaacactagtgagtcaataaactcagtaagaaaaacatagaatctacaatgtaataccgacttgtacataggctcccatacgcctatttacaagacttatcagatgctcaagaacattcttaacagaagtacgacctctataccatatgcactaaagtaatcattttgtactagttttggtagggctaaatcgtactcctaggaaccactgagtgttgtaccacatgc

SEQ ID NO: 61046 - DNA, 1308 bp, Cannabis sativa
aacaagacgaaaattacaattttaatagtagaaaagcccatttgataccgtttatatacttactagttggggtctaacatgcttcgcacgtgagctcgtaattcaaatatattttttaaaaaaattgtaacatatcaattttatgtcttgatctttattttattttttggtattttctagaagtaaataatagcttaataatagtaaattaagagtctggttgttgggaatttatacagaggctaactatgttagataccactcaaaatgttgtattgttattgatacaattaaatatcatattcaacattatttaatataaattatataataatttttttcgttagattgatttaatataataattattatagaatatcgttaacaatttttaagatgtcacctcatagtggtgttagatatcattagtgcttaatagtaatattttttaaaattatcaaacaatgaatacaagttgatttatgttggcttcgactattattagctatatattttctttaagaagaatttttttgttgttgttctaaattaaaaggtacattattcttaagtatttacacattagtctattctatttgagagtgtctacaaaaatactttctaacaatatatataaatactaataaattagtataagtacatcaaactaaattagaaatggggattgaaataaaatataaacccaaaattattatattattattgttacaattttttttttttaatttataattaaaatttgtcttaaaagtaataattgaatagtgaaagggtatttttgtaaattaatatgttaggactaaaattattgacatttttattgtagttatagaaaaacataataatcatgccccaaacatccgattaatttaatcacttattccaacatggaaataatggaagaagttaaaaagtaaaatagtctttactgacaaaaaaacacatagatgaagatgagtcacgttgtctactctgtattagaacggaagaatggtagagtaagtgagtgaatgatactactggtgcagaaaataaacaaagtacaactaaaccaacaactctctctaccgttccaattttttttatatattttccttattcttattattattattttaacatgggattgggatatcctttctataaattcttatcctccctttcgttttcatgtcaaattcatcaatgctgcttaccgatacagctctttcgaagtttcccaattggatcttgactcgtaggtggagtggagcagacgacgccctctattattgttattacaacaat

SEQ ID NO: 61047 - DNA, 849 bp, Cannabis sativa
ataacaagatcaataatgatgaaatcgggtgtggaatgtgtgctatgtcttttagtaaaactgatttttattattatatttgtgatttgtgtgaatattacgtccacaaatcatgtgaagagctaccaaagcaaatcaatcaccattttcatcctcaccaccccctctttcttcaaacatgtcttaaaagaagttgtcattcatgtggacagtggcccgaaaagtatatcatgtttagttgcagagaatgtgatttttacatggatgttgagtgcacccaaatgtcatcaaattccataataacaacatattctaatgaaggccaacattgtattcaacattctagccatccttacttactactacttgttaacccatcatatgcagatgatatgaatgttattagttgctttgcatgtcataaatcatcgtatgatgatattggagtttattattatgggtgcattaggtgtaagtatttccttccttcataaacaatgtattgaccaaccaattacctcaacaaatccaattcttccaccatcctaataatcacactcatctctcccttcatatgaaatgggagtatggtaaatgcaatatttgtggatactcaaataacccagccttatattttgaatgtcctcaatgctataataattttatgttgtgtttagaatgtggttttagaagacaaagaaccattaattatgaatatcatccacacattctttgctttttagacaaaatacatactacacatgatcgatgcaatgtctatgacaattgtttgaagcaatcactaaggaattaagtaaaactaattcctccatatttggatgtttggat

SEQ ID NO: 61048 - DNA, 1202 bp, Cannabis sativa
atactgtagtatgaaacttataaaaaaatatagtaaaaaagtaaaaaaattccgcctgacagtatttttgtaaaaaaatagcaaaaattagtataccatgtaaatttctctataatcttacttactttaggagacatagttattaaactctaataattatttctagttactattcatagaaataaataagacaattaatttttataaaattagtatcttaataaattttgaacactatttttaaatcgaatataacaccaagctagaatccacacttgaagtaagaaaattagggaggacaataaagtttttgtatgttttttattgctaacgtttaggttgaagagaaggaacaggaaaaagagttgtaactgtaaattgcctctatctttggtcttagtgttcgttattacattgtaattgccttaataaataaatgcaagttacaatggtgaatggccattgcacattttatggtgtcttaaataatgtggtgactagtagttatatacataacttttttataattttctttacattataatatgatatcttaaatactttatattaattaaaataagaaaaaaaaaataataaacaaataaatatcgaaataaagtgaaaaagtcaataaaaacttgaagaaaagtatttgaaaaaacctaaaaacctagaaaattatctctacatgtaaagcataaataatgtttgagctaaaatgaagaatgatttagctcacttgatgtagcactattttattatttttttagcaaaagaattaaagataactactttagctacactaatatgagtgctataagcagagaattatgtttgatttaattgatagtgactagttacttgaaacttattccataaatgtaaatatttgcttataatttgtgatcttacatttgcttataatttgtgatcaagtctggccttgggctaaagcatgcccgtttttagagcctacccaaattcaaggccttaaattaatgtatatttactcatttgtaaaaaaaaaaaatatatatatatatatatatatagtagaaattagacaatatatttgaaaaattttagagtttattttttttgtatagtataaataaacaatactgtggggttatgaatttttttattttttacatttatatgagtttttttatgccatatttttgtaagaaaaagatggaaat

SEQ ID NO: 61049 - DNA, 705 bp, Cannabis sativa
attaatcacttaattaaataatcaaactggaaatattaaaatacggaatttcatgacgtttttctatttctttataggctttaaaatattgcaagctgttcaagatatctgcgacttctatcagtttcaaatacaatcaaggtaagtttctattagaattatttgtattattagactatttactcaatatttgatactttttaattcattgaattatacaaagattacttgtatgattattatatttttagtttgtttatcgatattgattctatgccatatgtttattttcttcctattagctttgtaattttaaatgaagagattgcactatatgtattattattgtgttattggagatctcacaatccagtaaataaatgttagtttaataataaaaatataggcagccgaaatataggtatcccatacacgtaaatcttttttgctatctgtgaagcaaaagaaaaagattcctattttccttcatattggaaacgttgttacattttggttttcgaatagcaatatgttaaaaaaaatgaacaaaatgcaaaaaaagagatgtgcttacaatgaaatctataatttcgagacattttagagagaaaaaaaaaagaagccttctattttaagtaattacacaacaaggtattctaagcactaaacactatcaatatgaatacaaatctaaaaaattaatta

SEQ ID NO: 61050 - DNA, 819 bp, Cannabis sativa
aaaaacacagtatttttgaaaatatttccgtgtgacagtatttttgtaaaagttaaccaaaatttcagtatttttgtaaatttccctttatttaggttaaaaattatatgtttaaatatttgaaacaaaatatattgtattaattaaataattttacatagacgggatgctaaccaagctgcacatggtttggctaagcaagctttatagttggataacgattgtatatggttagaagagatcccttttactattttttttttcagttgttgtaaatgattatctttaatttataataacaggcattttctcaaaaaaagaaaaaaaaaaaaaaagataatcttacatatcaaatcctattaccaaagaattccaaaataataataatagaagtataaattttttaaagtaaccaattaagtatgaaatcacaaaaataattgtaataatatgtacataagttagttaaagaataaacttgctattttttttttataattatttttgtattacagtaatttttttttttttgttaaaaatgagaataagagataaaattctaccaaaataagaagaggacactaaaaattatatactactaaatgtaagtgtagctatgtaagatattatgttaaaaattaacatgatataataatgtaatttttctattttaaaggaataattaaaattttaacttatgcaagaaaaaaaaattaaataataaactaaatttaaatgagaattatatttattgcccataaaatataaatacatacattatattttgaaaataacaaattattaacttatttagatttt

SEQ ID NO: 61051 - DNA, 1336 bp, Cannabis sativa
atctgattgtgaaggtttgaaagaaaaataaatgataaatcttttctgtattattttgtgcatatgattgctgcaagggtgtgtctaaatttgataccgacctattgtactattttgactgacgttaagtggatgttcttgaatgttgaggctgctttacgaagctaagtctttctattgcaggacaaggacattgttggtagtatgtaattcattgttagaatcagtaagcatgattttggttgaagtggacaggaaattcattgatatgggctgatgatttgatacctcaaaagtcaattgtttattttttctatgttaaaaatattaaatttgtttttcttctatatatctgtgcacaccaagttttttgatggtgccttgtatacctgtgttctgtgcaggaaccagtagcactcctggagtattcaatgaatgctgttactgaaggtatagatgcaattgcaaccacccgtgtgctaatcagagaggaaacgagcgacttgtcaggtcatggttcacctgttgaacgagttactcggacatttaggtatttgcatgtttagtggttgtttctcttttagtggcacaattgttcttgtgtagacgtgtgaaatgaattctcttcttcttcttttgccagtgggaacgggtcaggaatggatattgtggtttcaagtgtaaaggcttacattggtgcgataaacaagatgttaggtttcaaagataggaccgttgtgaattcttctgaagagagaatacccatatctgcataaagaagtgaaggaccttaatgcaatttttgggattcattaccctttctctatttggttttggttctcttatggaagaattgctagtttgtgctttttgtgcaaatgtgttgaaatattgtaggtttaatttgtccataggtcttgatttttaacgtgtttccgtttaaaagtagtaaaaataaaataaatgtcctgttaatgtacgttgtctaaagtgcgctatttatgttgagttaaacggttgaactttgtatcttgtatttttagtttttgttagggttggtgatattcatattgttgaaatataggacttttttttcatctcatgtgattaacaaaataataaacttgattaatatgcttgttaggtgtacaactaaagtctttacagtggctataaataggaaagatcatggatatataagaatagataatatatctattaatataaggtttattgggaaggtgactaaaaataaaggaaaatttaaatggtatactaacttttgttatttttttacaaaaatactgtaaggcggtagtttttacttttttactgt

SEQ ID NO: 61052 - DNA, 512 bp, Cannabis sativa
acttcaactccccaagatgatattttacaattaaaaaatattaaaaattactaaaattaattacatatttagaaatatatataaaataattatgttattaaataaagaaatctacaagtccatattaatttatcaagacatagattgataagtacaatcatgttttaaagattttctttattttagttcattatgaaataaagaaaaactaaactcatgaccaatcttaataaacacaacttcaataacttaattctttaacaaatcacaaatataggatacttgttttgattttcaaaatggtaattcttaaaaaaaataatgaacaatgttgttataagtcacagaataaaagtaatttattctgcaatataaaaattattacaaaaaaaaaattatcaccatcatctaaaagagatttaaagattgaagaaagtattactttcaataatataaataatatacatatgtagttgtatttttttaagaacattaggagtagtttaatgtct

SEQ ID NO: 61053 - DNA, 1038 bp, Cannabis sativa
tatattagttattattttttgaagtttgaaaagaaaagatagggggtggtgacacaccccatacgcgcgcggattgggtgacacacgtgttcagacacgggatgtccgaacatgcatgcctagggtgtctgaaatcaccctctacgcgcacgtacaggctgcacgtaggctccttggatgaggtttctcggccgtgcactcctacgtgcgcgtgcagatggtatgcacttcataccatctgcaccaaatccaattttttcaattttcttcatcttttcatgttttttcatggaattaatttcaaattttttgtgtaattttatatttagatttttatttttcatatttcaaatcaaattatcagaattaaattaattaatattttttcttggcattacccctgttagtctccttttgctcccctgttttactctgtttacaatgacacttacttgccattgcttttgattccacaaaacatcatttcttgcctcccatacctggtatactaagacagctagtattgtcttcatcatgcttcttctaattgctgaaacgtttttcatcttgctggaaatttgcagtagcttctgcaagccgactgctggtgtcccgcagtttaggttcctcttcacttccatcaggcactttctgctatactcacaattaaagaataagtgctcaatagttctttttctttcccatacagtagacaggttgcatcaacattcagatcatatctactcactctttctttcgtattcaacctaccccacaacaccagccagagaataaatttatgcttagggattatcagtctatcccacacataatgacaccaaggcttcttctccgggctactgtatagtagttgataattttttgaaacactaaaattctgcaatgtgaatgtagcaaagtcagttttaagttttagctgattcttaactccaactagcttttccatgcctagctacaatctgtgggagcttcataatcccaccaatgtttgtcctttagatacacattgtgtatcca

SEQ ID NO: 61054 - DNA, 1067 bp, Cannabis sativa
agaactcattatctaccctttctaacttacagttgttgttctgtagtatacgccgtgtatcctgacatggaccttctatgttgattgtttatctcgctagtcttaattaagaataaatgtaggattatattataatataatcaatcatatgatattatatgagaatatttaaatttaagaccccatttgtgtgttagagatattttttgtaattttgacctaaaaggggtaaaatgataattttattatatattttgctaatggactatattattatgtagtatgttctttttattgtgttacaggtaaatttcgacaagttaacgcagtatggttataatcaggtattttaagctcaaacaaggttcaaggaccccaaaatttatgaattatgtggttatagaaataacatgagatatatatgtttgttgtgaaaggacataaattctttgtttgttaattgtgttgatttttagccttgagggcaaaatgaacatttgaccaataattagtaaatgatatccttgttattttagaaaaattaaaatcaaaacaccattttttgggttttgaaatcctccctcacacactctctctatctctctattcaatctttgaaagttcttgtgatttttgaggttgattgttgcaaaattaaagtgggtcttggtgtttaaagcttggcctaagtatttgaggtagttgaattaatcttgattacttttaatttgtaatttcatttatgaattttgaagcttaggttatttgaggtttgcaaaacttaggttaggtcattttcttttgatgtcaatttagtgagtttgagcatgaaatattacttggtttgttctttgagattgataacatgaattttatgattttgaatatagtgttatatgtgtttttggcatgtatatgttgataggaactttacttattatgctctttattggatttgggaagcaattttgtaataggtgtggagtttgatttgaatgggtgttgttgatcgaggttttcggcaaccaataaaataataagagtttaaagagctgtaagaaattaag

SEQ ID NO: 61055 - DNA, 999 bp, Cannabis sativa
cttaccagtttctcctcttccttcatgatgcatccctctaatcctttcttccatttttaccctcatataattattactttgcatttattaatatttgataatacatcatgttgtaactctaatttattactctcaagaactcttggctcctcttcttccttacatcaaatctcacaattaaaggtccctgattatatttttggaaggatctgggcatttaagaactctagttttggaggatttgggctaagattatgtaggatagatttggcatctccattaccacctacgaagctctacaacttcaagtactctctttcctagtttttctatttaagattgtatttggtctctaggtattcttttctttacctatatattttcctcttttttcttagtttttcctgcactttgaccatgagcaatatctctcaaaaccctagatccagcctcactcttactaaagaggaagccttgattcatgattttgatcatgtctctctaagttgcaatcttcaatccgagtgtttttgtttagtttttaaatttctcatcccaaaaacctttagcctcactggattggtaatgctatgaaggatgcttagatagctcgctttccttttactttctcagagtaccattttggattttgttttggtctgttttggttgtgagggtgattgatggagagttgttgaggaacaaccttggcattttgattgttcttgtaaaatcccaaaaatctaattttaataattggggaatattttataaaatatgggataataagtatgtcatgagtattatgggtaggattataatcttattaatccaaattacatggtcactaagaattttgatataaatgactaaatacgtgtaatttattaaataggaagatttaattagaatatgtgggtatgatatatgatattggtaaaataaaatatttttaggtccaacaaccgtggagaacctatcggtggccagaaatatcac

SEQ ID NO: 61056 - DNA, 1342 bp, Cannabis sativa
ttcaaatatacttatacaataatcccaattacaaaatttaggctgaatgtatctaacacattcagatctttttctggttattcatagctgaaaactgatgctcagagttgagcagagatggccactttcctaatgtggttgcattttgctcgagaacaaatgaattttgatatacaacagtacaaacttgcacaaagaaggagtacaagaatccaagcaaaatatatgtgaaactcaatctttatccccttgcatcaaattatgtaaatttttctcaaaatgatttggggcatccatttggtagaggcaaatctaagttttctacagtcctgaatgttctaggcactattgtatcagcataaagaattctctctaaatcatcacactcgtgctgtaaaatacaagcttgccaacctgaagcatctattttgatgggattgccataaatccatgaacactgcaaaacaacccaaaatatgagcaaaatatgaacaaaatatttttttataattacaaaaaaatgtttttatatatacagaaagtaattttattatttgaaacaatactcaaatgtaaatagtatctttacatagtcatatcaatgacaatttcatcagtacatagttgaataataaagacagcatatttctaagattataaatttcatattcctagtcttatggaagagaagaatagcaatacatttggatatgcttcccctctaacgattttttttgtgcccagtgtatctgctatttcatctccatcatttagtccaggctagctctccatcattatttaactatagttataattcataaaccaaatttaaatgtccaattctgcaaacaataaaaattaagaaacaataaaaattaagagtaaggatataaaacttgtaccaatatttttataattttcgttgactataaatgattgcttctctacagcatcttatagccatcttaaattttgttaagaaagagtgttaagaaaactaagacagctgccaagcaagcttttcaaacaaatgtatatgtcattgcaaattagtatagctaaagcaatggtagacatacctggttattgtcactaccaccttgtttgtcaactataataaggcaacactgatgaaaatagagaaatacataaaacttcccaagggaaaaaaagctctcagctccgtaaaagaaaaagagagaattaattaaataaaacatattacaatgacgaaaaatagtgttatctctattatggtgtttgacgttaacatttgaatcaatgattgcataatttagtctcgtcaaaaaaaaaaaaaaatgattgcataatttagattctc

SEQ ID NO: 61057 - DNA, 1374 bp, Cannabis sativa
aatttttgtacattcattgggttaatactctttgttttaatttttttaatcataattattggataccctaatttgaataccaatattaaaaaatttgaatttttatacttaatttttttttatttttacattatataaattgagttgttaaattgacttaaagataaattaaaacaaaaaatcgataaaaaaaataaaaaattaagtttaaattaattattttgtatagaaaaaaatatgccaaactcaaccaacgcctaagaaccctttttaggctaattccaatagagatgcctaaattgagtaaatatgaccaaatagcattataatataaaattttataaagtggagacaagaaataaatggcatgaatgccaaactaattatatatatgtatatgtacacatatatattttctgattggttattttaaaataaaaaataatttgtgaggtccaataagtaactaaatagaaggcttctattggagttgccttctgccctatattaatgaataatgacttttgatactaaaactataagtaaataaataaataaaatgtaggcctaaagcaagacacacacatacacacactatcctcctatccaatccatccaaggccgacctctctattccatttccaagaagaatgtgacaaaccaaacacccaacttgccaaattttaaataatttaaatattggtttcaaaattaaaaaattaaatatttatttatttactttgaaaaaaaaaaaacaaaattagccaacctataccagtgaaattttagaagataagttaagcatcagtgtatatatataatttattttagaaataatattattttgaattctgtattttataaaagttactaatttgatctttttatacattttgtattttctaatagtatagatatgaatttaattgattttttgtcaacataaaacttaataattataatccaatctaaagatattatgataaaaaattattaaaaattaaattcaagatcctatttttatcttttttagacatttaacaaaactctaatcaataacttttgtaaaatatatagtccaaaataatatttatttataatatattaaatgtcaatgtaccacctatttataccaacaaaataaatctacctttcatgaataaaaaaataagaaaaatctatatcaaaatttttaatgtagaacttattatttactaatttttcgttaaaaaaaaaaatcacgtagtgtagatttcatccctattctttcgatcttaaaataattctaaggatcacatgctagttaagagtcgaactcttgacccaaataaaagataaagccattaaaatttttctaatactacactacacaac

SEQ ID NO: 61058 - DNA, 823 bp, Cannabis sativa
  modified_base (291)..(292): a, c, t, g, unknown or other
tttttttttttttaagatttttttagtgtcctctattgatttatcaattgtttaatattttattttttataacttctaagaattctcaaataatatactattggaaataaaataatatacaatgtattttttacagagattcaaaaataagtgtatatataagttaaataaggcttatacattaataataacataatataaattaatagattattgatatattgggaatgtttttcacttgttatcttttatttaattgttattattattgtgagtaaaaaatttaaacanncacacacgaagcgcggtttgtttcctagtttgatatatatatatatatcattaaacaaaatataaccgcacgcgaagcgctgattgcttcctagttaagagaataaaattcaaataatcatttaattattggaatattaaaatacacaaaaacttaaagatattttgtaagcaaaggatttattaactcaaaatttcgttaacacaaatgaagtatttgataattaataaaatatacactacatactttaataaatacaaattacaaacgaaaaataaagatttttcatgtgattttgtagttaaaatctacatactccacgagtcattcttattgcttggttctttgttgatagaattacaattttcactacaagaaaagacttttttaccggcgcagctcgtcaaatgcgccggtaaaagttgtcgacgtaaaggaaaaattgaaattccatttacatttttgctttatttttgccggcgcaatattgcgccggtattactatgttttgccggcgcaataatgaatatg

SEQ ID NO: 61059 - DNA, 575 bp, Cannabis sativa
aattgaaggtaattatataattttacatatttatttgcccatataattataatgtaattgtgtcatttgaagtaattgagaatctcagttacattttctaatttttatataaaaattgatattaaataataaaaattattattttgatatgaatggctaaataaaatattagaaatttataagtaattatcacttcatctaactgtaaagttattttttttttgtaatttaattgttaagatattatttaatttattttgaatatttaatgtgaatattcagaaaagtttttataagagataagggattctctttatcaaaaccttgtttaaatgatttatgtatggtataatctatactaattaatgatatttgattttttcggattttcctatcaatataacttgtataattttttttttatagtaagaaataaatgtaaaatcatgattttggctttatatggatagtgcgttgattctgtctcagctgtcattgtatattgtagatctgtcactgcaaattaaagtttatagaaaatttttatacatttgtaaaattgtatttatggttgt

SEQ ID NO: 61060 - DNA, 1029 bp, Cannabis sativa
  modified_base (523)..(533): a, c, t, g, unknown or other
gggtgacacactgggtcgggtaaaccctatgtcaagcaacccctagagttaaattttcaattctttaagttcagctggagccattctctagggagccttagaaattggttctgctccaggtgccaagtcaataacaaaatcaaattctctccgaggtggtaaacctggaagtttgtcgggaaaaacatctagatattcctgaaccaccttgatgtcttctggccgaacagggtcaggccgagtggtatctaataccacagccaggaaccctagacatccctcttgtaaaaattgcctagctgttagcaccgagattactgggatccgagatccctgaaccaaaccgaaaaaaacaaatggttcttcaccttcaggttggaagattaccatcttcctcttacaatcaatactggctgagtacttagacaagaaatccattcccagtataatataaaaatccactaaattcatctttatcaaatcagcactcaactctctatcctctattctgatcggcatagannnnnnnnnnnttttggagataactaactctccgcgaagcagtagggttccaaaccctgtttcataactatcattcagtctatccaatttactaaaaattctggccgcacataagaatgagtggcctcagagtcaaacaacacagagaaataagagttttggaccgagagttgacatgttaccacagaggggctggcttttgcatcagctggagttatcgcgaacaccctggctggagtgggttttgctgcagtctttggtgtctcggtcctgagctggggacaatccctcttgtaatgccctgacatgccacactggaagcacccctgccctttacacttccccagatggtgcttcttacaactggggcactctgggtaagtgtatcgggtttcggtgccactctgacgattatctctaccctggttcccccagaacctcttgttctgacccgagccactggttgcagtggatgcctttcttttctattccatggccaaaccacta

SEQ ID NO: 61061 - DNA, 924 bp, Cannabis sativa
  modified_base (877)..(894): a, c, t, g, unknown or other
tttataaatcttaacaagtggtatcagagccacctttgttgaattaattgaagatatgatgatattgtttataaaatttggagattttaacaaattaaaattttgttttttcttggagttcgtaatattgcgcacgtttttgtttaatcataatagatatatatttgttcatatatacatattcattggctgatctggagtatgtatatattctttcatatatttccattgatcgtgtatatacaatgtaaagattatgttttatttttcctttggcttgagcattttgaaaagcccagcccagagaatttatgttttattcgaatgatatatatgtacattatgttttcatttttggcttcagcttcggtgggtgtgtggtttcagtcggaatacatatatattcattcgactattttcgcttcagttctttgttttttttttcttggtcattaaggctatgtttggtaggaaggagagagtaggatggatggagagtaggagggagggagaagatatttgttcttgtattaagagtatatgggaaaggatggagagtaaaataaatattaaaattattattttatcatttttaatataattatatattatttttttcaagggtaaaaaaaaaaaatttgtataattttttttgtctttttcttaaattctcccatgttaagagggattaaaaataatgtgtttggagggagaccctctccttccatccctcctctcacttcttctcttccttttgccaaacaagaggattttccaccctctctcattctctcccctctaccaaacatagtgtaagtgtcagcgtatatcatacatatatatagtattttattttttgggtgactattcaatggtnnnnnnnnnnnnnnnnnnatatggttacatttttctttaacctgtaat

SEQ ID NO: 61062 - DNA, 890 bp, Cannabis sativa
cttttcttctacttcatatatatatatataagcatatatatatatagttaacagtggtatcagagcttggtgagttaaaaaaaagagtgaagattaaaaaaagaaaaaaaagtgggagtgtgagataaaatacatatatatacgtaagaactatattttctatttcactttcacttttttgttttgcagcagcaatatggctgacaactttgttcaaccggcgattccccgctttgatggtcactatgatcattggagcatgttgatggagaattttttgagatccaaggagtactggaaagttgtctccgaaggagttactgaaccagcagtcggcacagcagtgacagatggacaaagagtggagctagaagcacagcggttgaaagatctcaaggcaaagaattatcttttccaagctattgatcgcacaatcttggagactattctttgcaaggacacttccaagcatatttgggagtctatgaagagaaaatatcaaggctctacaaaggcaaagaggcagcagcttcaatcacttcatacggagttcgaaacacttggaatgaagacgagagaatcggtgtcagattatctcactcggacaatggcaattgtgaacaagatgcggatccacggtgacaagatggaggacgtgaccgtagttgaaaaaatactacgaacgatgacgccaaaatttaattatgttgtttgttgtatagaagaagctcataatattgatgaactttcagttgatgaattgcaaggttctttattggttcatgagcacaaactcaaccagcaggagaaggacaaggaggagcaagccttaaaggcctcaacagacaataattcaaagccaagaggagatagaggacgaggtggaagca

SEQ ID NO: 61063 - DNA, 2284 bp, Cannabis sativa
  modified_base (33)..(41): a, c, t, g, unknown or other
ctacgtggcttgacacgtaacaatcacctagtnnnnnnnnntatatatatatatatacaaacataaaccccataaacccaaaacaaatatatcatgtaaattaattaatctaattacgtacgtacaccattttaataatcttcttaattaactaccaccattaattaattaattattattaatcggatctatttgtaaatcttaaataatgctcatatatacttgccaaaacttgtttattatttatatgtattacgtacgtaccaactactattaattgtgattgaagaaaattggccacgaaacattactatatattaccatatttatatccataaatataaatttaattacataatttatatttatgttatataattacataaatattataaatataacaccattaaggaaacaaggtcagaaaaaactacaattgtccttgttttaagtattatagttaatcattgtcaaaaaaaaaaaaagtattatagttaataatgtttcaaaaaaaaaaatactatatatagttatttagattctattataaactatttttaccatttcttttttctttttttttttttttaaaaaaagatctttctaagagtgtttagataaaagataaaacatacttttttttttaatttgtaccttcttttacttttgagaagctattttaatacttaaattaatttatataattcttaatttactcaaaagatatttttttttttaataatatctatatactttaaaaagtattttttattattttattttcatataatatttatttaaacgataacaattaataaatatttaagtttatacttatgcatacttttagctataaataaaaataaaaatttaaccaaacaacactatatatatatatagaactagctaagactattactattaataattaatctataattatatataacataataatctcaatacaaaagtattgttaaaaaaatcttaataggaaagtattaactgctcttccttccctggatacacctctatataattaaatttaaaaaaataataaaaaagtctattatttaagatcaaaagatataattaacctaagatttagcatcatatatatataataaaaatttcttaaaaaaaattaaaggaaattaattatatatatctatggctttatttctttttctaataatctgagtttttggttagttggccaactgtatttgactagtaataaagatgcgagagaagaccaaatcccataataattaaaaagtaattaataaaaataattatatataaaatatatatatatgtataaattatttaaggtgaaatttggagcggtctaacacattactttccacttactcatttcccaatcaaaaaaatatacataaaataacatacatatactcattttttggattgttatgtgtataaatatatatactgattaattaattaataataatatataaaaaaaaagggtgttatataatgattgccactcgttccacttgggtgatccgaatcttagcaagaggattcccttttttttttaagaaaaaaaaaatcttcacccttaaaattagggttttaacttttccaataattaattcctctaaaacattattattattattattattattattatatatctttgctttgatgacactaatcatttcctctcaaaataattggatatataatatctccataattgtattatgtatatatacatcaatgatatgagtgaggtgtcatttctcttatggaataaggttgtcacaccatcaaacaatattattcacttaacgacaaaatatatatacatatagatatatctatatgtaatatatgtatctcattttttttttttttgataaaaaatatagaacgatatatgacaaaaataactccacctcattaagaaaatatttgagaaataagaaaaataaataattaaaatgagcaatgaattaattataggtgcttttgataatacttttttaatcagttcttttaaattttttaattagaaaaataaaaatattttccaaaaacatattctatagaacaattttcacttttttaattgagaattaaaattttaaaaataaaaaaagttaatttcaaaagtttttcaattttttttaattaatattttagactttaacctcaacttgaatctcaagactcagaccccaatccaagactccgaacccgaccccagctccaaatctggactgtagccccgaccccagacccagtcccg

SEQ ID NO: 61064 - DNA, 1150 bp, Cannabis sativa
tttgaatttaaaaaagaacaaacattatttagaagtaactgatattacatatttttgtctagacccaatgatctagaatgtaggccttatatgtgcattgtttaagataataacagagtctatactgacaaaattagagaaaaaaaaataaagttttacaaacattagattcttaggccgttaaaaataaacattgaagttaggccactacttacaaacttaaaactttgaatacttataccgctatttacccacaataaaaattgaataatcacaataaatttaatgcacagacacaaaaataattgaacatgttaggaacgtcgctaaataaaaaacttactaatcattgcgtacttgacactttaatatatcttgtactttataataggactgcatattttgatcgggtttgacccggacctggccaacctgcccaaacccgacccggtgaacccataaaattaaaagaaactcgttcttttcaggcaagtcggtccaacccgtaaagtttataatggtgtaatttttaccatatataagatgtatgagctactcctctcattatgcactttcatcttaaactttaacatgatatgaaattcaaaaaacaaaaactctaacaagtatctgatccaaaaaatacaatgttgatcgaaaaaataaagccaaaaagacaccaaaaatccaaaaaaacaataaaaaaaagagagccaaaagagtcattcgtgattcgtgcggggatagtgaaccaaaaagagtcgcttgtaatcaagttgtctaagattggtaggcaaaatatagtcatcatcttgatgggaagatgttagagagtctcacattgctaatgtagataacaccatattttgtataagattcatgggttactctttcattgccaattaattttgagatagaatcccccatgcaccttcatcctaaattctaaaataaaaaaaagtcgatcgcaagaaaatagaaccaaaaagagcttccaaaaatctaaaaattaatccaaaaagtagagccacttgtgatttgaagatagcgagccaaaaagagtgacttgtgattgagctaaccaagattggtgggcaaaaaatagccaccatcttgacaggagatgttattgttggaatatattttacca

SEQ ID NO: 61065 - DNA, 1657 bp, Cannabis sativa
tggttttcttgacggattgaggtttctaaggcgaaaacgctcacgcgggcccatgaaccttagtttgggcacacttgggtgtgtgagtctcagcgccaaatggttggttggcgttttcgagtcctctagaaatgtcatggggcccttaagaaggatgtctttatttatttgacatttatgagtcttagtcaaagtcacaaggttgacttttttttatttttcgaaaatcgggtataacaggattagatcggttttgaattaaaatttaaaattttctcaaaaaacctattcaatccaactactcacattcaatccaatccaatggtaacttgatgttgaatttatttggtttggattagttcagtataattagatcataaatcggatcacaattgttattaaaggttagcaagaaaaaattttaaagttaggataaaaatatttaattacaattataattatagagaatgaacaataatttttaaaacgggactaaaatttatatttactctttcactgaaacacaactacatttactatatattataaatttgaaaactgtgttacaaataaaaaatttctttctacgtttcttttttatctgaccacatattaaagtttcatcattaataaatacaaaaataagttaaaacgccattcttttcttctttcaaaacgcccataatctgactagctactacatattttggaatctaagtagtaattactatgaaactgattcacaataatttcgagtttctctatcaaatatttttgcttttaatttggttttaaatggtgcaacttcaaaatagaaggttacaattaacaattaacctctcatcaatggtgtgtttctaataaaacgtttttcacttaaaacttaacataacatatatatatacacgcaaaagcatgtgtaaattgtatttatggtcttataataataattacatataagtttttaagcgtttatttgatacattttaccaagaaatttcgttatacatatcatatttttatttaatattagattaaatatttacttaaagtaaaatttatatatttatcaagacatacaagttaatactaaatatttatttaatataatactatacaatataatatcacttcaataaataagaacataaaatctttaaaaatatatatattatatctagtacaattaattatataataaaaacaaattttgataattatcttaggaaaaaaaaaaaacaaaatagatcgatgaactacttaaacaacttatctataaatatataattatatatatttatatagagtagatatatataaatacacttattctcatcaataattttttttttccatgcttttaagatggataaaaagttttattgtttggaagaaattcatcttccttcctatttaggtgtcctttaatttttcatcatagtggaacctacaaacaaaatatatgataatatatatttaaatgaatttcatgacattaataatctattgtatatactttacaaaacaatatttagaatgatgactgaaagatgtatatttattttgaaaacaaattcaacattgttaataattttatgataaaataaaaacacatctttaaccaaaatttaataaaacacaaaaaaaaaaaacaaaa

SEQ ID NO: 61066 - DNA, 857 bp, Cannabis sativa
aataaaataaaaaaataaaatttataaaatacacttttgttttttgtttttaaaataagaaaaaaaaaagtagttatccaacacattattttttaaaaataaaattttatgaaggtaaattttatttttacttttgtaattaaaaaataataaaaaaaaaatattattaaacaccaaaatttacaatataaaatttaatgtgacgctcaaaatccaatagcattgattttttatatcactgggggagggttatcacgttatttttcaatttagtgaatcaaccaccaaattgttagtcttagaaaattatgccattaattagtcaagtatttttgaaataattcgtatatgagtaatatttacatttattatattatttatttatctcaattgtttatgaattattgtattgcgttttcttgacagatgatattgcctacaatattcgtctacgtatcaatgatatcgtttatcggtagatacaatgaacaaaataacgacttacaccagttcataaggaaataacatgatgacgaagcgacaactgccaacactgttttttttacgaagtacgtatataattggtgcaatatgttgatatgatgaagacttttatcaagatgagttagttgtgtccttggttggttaggaatgttgttatatcagctgaaggttgttatgacagctggtatagttagttagagtttgttagaaattagttacttaacagttggcttagtctctcaattcatctctgtatataagttcattctctttgtactctgtattccttcattcattgatcaatacacagagttctgttttctctatctctttctcttgcttgtttggtaaaa

SEQ ID NO: 61067 - DNA, 2821 bp, Cannabis sativa
  modified_base (32)..(50): a, c, t, g, unknown or other
tagaaaggtcatatttagggtgttaataaacnnnnnnnnnnnnnnnnnnnagatcgtggtaaaataatttccaacatgaatttcttaggaaattacaaagcttgcatcatttccttaagaaaatcctaatccaatgtatcataggcctttcgcaggtcaagtttgatcatgcaattgggcttagctacctttcctccatagttccttattaaatccttgcaaatcatgaaattgtgtgctatatacctacccttaataaagcctccttgattaagtgaaactaaatcagggaggatgttcttaagcctagaacgtattaattttgtagcaatcttatatagcacattacaacatgagataagcctaaaatcactcaccaaattaggactcttgacctttggaatgagggtgaatgctgttgaattgatttcctttagaagattacctgtctggagaaaagatctaatagcatcactcacattctgtcctatcaaatcttaattatcttggaaaaagaatctcccatacccatcatgaccaggtctctttattctaggaatattaaacactgcttgcttgatttcttcactggtgtattcagctagcaatacttaagcttgttccttggacaaaacaggtccttctgcaatgacagccagcttgattttttttccattgttgcaattttgatccaagtatctgattgtaatattccatgaatgcctctgttacctcctttggtttgtcaactctatcaacactagtattaacaacaaataatactattttgtgctctcctatctcttaaactagaaagatagaaggccgtattcccatccccatctttaatacaatttactttggattttttctacaggaaagagacatatattttatgaatatcttgaaaattcactagggcatcctactccttctactccaaaaccagatcactaggattcttttgcacagcttcctgacattcctccaggttagatttagccttcaaatccaaggtctgaatatatgagaacccgtgcaggataattcctttgaaaccatgctttaaagccttcatctttgtcactacttgatacatactagtcccatggatattaaccttccatgcctcttctatagcctgcttgaaagaagggtgattagacaacatcctaaaatacttgaacggcttcctaccacttgggataataggcaacactgtcaataaaagcagacgtgtgatcaaatagcccttcactaaggaacaaggcttcagcattcatgaatttacccatccatctctgatttgccatgacccgatctattttcgagtaaactctatcttcccttttttgattattgttccaggtgaaaaaactaccactttgctttacatcttcaagctgacactccaaaacacagtccttaaacttgaatggcaataaagctctcttttctcaattctctcccccttctcctgtatgtcattaaagtcccctaggactagccatggttcatgcaccttaagatctattagttctttccatagtaaacttcttccatcttcactattaaagccatagacaaaagaaacatagaaactatctctattatctaaagttgtaacctaaagatgaatcaactggcttgagcaaaatagaatattcatagtgaaactccctgaattccaagccacaattatccttcccccttagcccatgcaatttttgcaatgaagcatcaattagaaaacatcctaacatacaaggctccaagctttggagccttcactctcgtctcgaggagaccaaccagccctaccttgtgcttctcaatgaatttcttgaattcctactgcttttgttcgttgttgattccccggacgttccaacttagtatcttatccattgtgaagaggatgatctccccctcctcttgtgtctccaattttgggccattactcttgattaagttctctttgctcttgaatatgacctgctatttcctatagcacattaaaagcattcgaggtttgaaggtcagatattgctatctgatttttttgtttctagccatctgaaacaagcttgaaaccttcaccatcagcctcttttcctttgtcctccttaggctgctaaattttcttctcctttacaacccattcttgtttctttccttcttttttcatgcaatcttccactttgtgacccatacctttgaaatgcttacaaattatgggtttccactcataattcaccgcaaccaaaacatcattcctatattcattctcaaaatgaatcatatcaggaaaaccctgattcatggaaaccttaattaacaccctcaggtatgccagcttatctctgccctttgtaacctcatcaatcataagacgcttccctagctgacctattatcttgaaaagagacctttaacctaaatacttcaattccaaatcctcaagctaaatccagattggaactattcgaatatcctcctttttgaggttgaaatttggatcccatgctttcataataactggacgcttattaaagaatatgtgcccccagctaacacttcatccctggtctcactactattgaatgtgattataaaaatgccataagaaatcatacctattttatcaactttgtccttccaaatccttcgagcaatgccttcaaggaccgagaaaggtggattagcacctaagacatagcagacaatggctgatttccaataagcaacttcctcttctatatcctccaaggttattttgaccttcttctctctactatgattagcaaaggaggattccagg

SEQ ID NO: 61068 - DNA, 596 bp, Cannabis sativa
aaaaaaaaaaaaaactaaaagacaatattcataaataggtttaacaactttaaaataaatttcaatgaaaaatggtcaagatcgcacacagatgcaccccatgctgcccgagctcaacttatcactgaatacctattattgtgataaattcaacgcgcaagtatacgtatcgttttaataagtatgactcaggtaagtgagatcgttcccatgagaactataaataagtaccaaacaattaaattcttgtttctgtttggaaatcagatgaaaggattttaaaactaaataatctaaacaaaaactaaataacaaaacaaacaaatgaaacaattaattacgatgaaattaacaataatgaaaatttaggatgattaattttgattgcatctactttatatggtttaatataatataattcttaaattccaattttcatgtgatagtggatttactaaagaaacttatattcgggctaggacatataaaccttagcctatatgtaaattttctgctctcgtgataaatttaaacacataggaggcattaggcataaaaatcctaaatgctacataaaccatgtaggtactctcgtc

SEQ ID NO: 61069 - DNA, 1349 bp, Cannabis sativa
ggcataaaacccaacagtgtcgtcaaccaatttgtacaaatgctgagagatttaataatgacattgggtttattgttcgcaaccaaggttcatttcagtacaaggagtagagaatggtccctgaggaagttagagcacaattgcgacattatcttctggtaagatatttgatattagaggatgctaaaatcaattcacataaactattgtgttaaaattttaaaattcaattatacaaaaaatatcataaattagataagaagtaaatatttgaatataaagcgtactttgtatcgctaatcatgttttagcaactagttataatctattttttttttcttttaatacacaaaagttttaaaagaatttaactaaaattagttatttattaataattgtgtattctacttctttgtgaattttaaattgtttaaagaagcatatacattttacaagagattaatcagagtttgttttctatgaaaaaaagtagtttgcttgctttgtaaagaatatgaacatactaaagatatatactatagtgtgtgtctaccatatttacattatatttttataatatttctccattaaaagtacggttgaaagtaaagtattttactaaccaaatatcaatctttataattttacttggcgattttcttaccctatgctaggaacaaatcaactgactccattgaagtattattctatttatatatataaatataatatttaaattgaaaataaatattattttatatttataggaaacatatgatattgacttgcttgatgaaacgaccgtaaagtgcattgatgaacaaatgagaaaagcttggaggggtcacaagtataagttacattcatatttcaaagaaattggaggagaagaggatattgagagggccaagagaaaacgacatccagatctaaaggatgaccatctaaaagattgggagatattgtgtgattgttggtgcacctcaaaatttaaggtatctatattgaaattattgaccttgaatctttcttctttatgtgtttagagtttttcttgtttttcttcttcaatatatttcatgtaaataaaatgatatcattttctgctcaaatatggtaggcataggttatgggattgagtgattttattagttggaaagtttgttctattttttagttttaaaagttttgtagaagctcaaaatttatcattaaacaacttatttcataatgcttcaactgtaatcaacatgttcatattctaacatattattgtcttttctagtttattgttgcatctcattgttttattaatttattttaggaaagagcactaaaaaatactaata

SEQ ID NO: 61070 - DNA, 750 bp, Cannabis sativa
tatatttgaaattaataaacaatataaatgtttatttttgcttgtagtagtataaatgtttatttaaagtaatattaacctaaaatagaaaaaatcccaagttagaataccatataaattttccaactctaacccatcgccgatacacaatagtaagcccatagatttaatttttgtcactttatttcatttaataaaacaaataggtcttttctaattttaccatttattttatttaattatttaaataccaaatttaatttaataatcataaataatggttaaataaaatacaatttaaatgtatttattaattagactcacaaagtgtttaaattaacaaataaatccttatttttttattttaatctcaaatttgcctaatccttgtaaaaattctcaaataagactatgtcttattttaagtcttattttagaatcttaattggcttattaaatcaattgattgagtctacaaggtaatattatcccagataatgcaagggatcataggcctatgtaactaagctctttataagtaaatgtaaaatttattaagtaaatgtaaaatttattaagtaaatttcctagcttattaattcttcttaactccactatagattcagaattgctttctttattacatagaatgctctatataccaactatagatacataatgaattatctgttgtttcaatctaaataatcaattatcctctatgaacggtttacatcaagtagggacaaa

SEQ ID NO: 61071 - DNA, 981 bp, Cannabis sativa
cctccccgagttgattaagtgttggttttatttttcctttatttcatccttccccctacctataagacaattatgctttctttaatttaaggggagactttttgtggcccagccccaggccttttactatttacattttagacaacttagatgactaagtttattttgcttcttgctttcttatattcgtcctattttttgcccgtatgttatgtcttaataccccctaactgacatgaaaagaaattttttggtcacttagcttaaaatttgcatgggatattgcatatatttgttcggcacaggttactttatagaatataaactttctcccaactattgatagtatttgcagagatggtcggcagtccaggccctaggtactgtggatccatcctttctttttagcttgtaggtcttagagcctatttcatcctcaatttcgtatggtccttcccaatttggcaagtacccccactcctggctcttgggtggctgggaagacccttcgtaggactaggtcgccaatggtgaattttctatctttaacattggtgttgaagtatttcaccacctttttttggtaagttgccatccatatctgagactcatctcagagctcgtctaattgatccagcgcttcttgtaataaggcttggtttgttgctgaatcgtacgtggcccttctgtgggatgagagcaagttttccactagaaccatggcttcacatccgtacaccattgagaatggggagtgtctggttgtggttcttgaagtggtctgataggcccataatactcgtggcagttcatcaggccaattgctcttgcaggtgagcagctttttctttagggtgaccattagtattttgttgttggcctctccctgtccatttgtttgtggccttgcaaccatggagaaacttttgatgactccgtgttaggtgcagaagtttgtgaattcatcgcagtcaaactgct

SEQ ID NO: 61072 - DNA, 652 bp, Cannabis sativa
tgaccattcttatttgagtttggttgttgtgatggggttgccaaacccagtagtcaagtggcccccctctcttttcttgttggacaacattgttatttctgaagcttcctaccctacttaattggcctcagtcggacattatgatggtcatcccgtccaatttgatgtctaggcaggacttgatcatccactaggagtggacaattattattgttgttggcaaggcccatattggagtggtgactccagacacgttccacattcctttgacattcgtgttagagttttatgtcctaaataaaattgattatatgtgatcttattattcaccaataaaagaaataaaaatctttattgacttgatcaaatactttattcacatgcttatttttcatgattatatgtttactacttaaattctattaaacttagaacatatagttattcataattatagtgacgtcgtaacaatagaaataagtatgattatatgcttgcttcaaattcttaaagtcccatgatttatcagtgcactaaatttatattgacataataatcatcaatgaggtttacttatacttttgataagtggtatatcttttccagtgatcaagtaaagtaaacttgtcatttgatgtatagagtttacatc

SEQ ID NO: 61073 - DNA, 1473 bp, Cannabis sativa
aaatatattataattttatacaacctattaatacaagtcaatactaaacatagtattgtattaaataatactaatacaatatgcaacataatataatataatataatataatataacataccaacaaaatttgtaatttaatatatagtagaatctctatttaaaaatattcttaagaccaaactaattatattataatttagagattataattagatagagatattagtaacaaaacaaaaaggaaaaaaagaatcaaaacaccaaaaaaataacagtaacaataaaaaattcttaaacctattatttatatatgtacatattatattatattatattataatatagcacatatataacaaaatcatatggagtatatttacaatattgtagattatacatatattatatgtaatccactaaaaaaaatataacttagtgataactttttagtcacaacaaaaaaattatttgtgattaaacatagtatttagacacaaattgtcattaatttaattttagctacaataagtattgtgactaaaaacacatccagacacaacaaattataatttttgtgactaatacttttagccacggatttcttttagttccaacataggaataataatatataattagtcacaaattttattgtgactaaaaataagattttttgtagtgctccaaaaaatacttcattctacataacaaataaatgattatatatatagatataaatatttaattaacttgtataattatgtatactgaaataatttaaaatatatatatataactaattacaatttaaatgatatatataactagtccaaattaaaaaattttccttttaataaataaattaaagattattcctaaataaattatttttaaacaaagatcttacttttatatctataatgtatgtaataagtgtatatatattatataccttgaggtactgcatagccatgttgacgtagaagcctaaattcaagagcagtgacatataaattattataattagggttattgatcatattaatatatttttctttcaaaatagtatttatttcatcctcaaaacgataagatactccaagtctttgcaatgtgtcaatgagttcaagttgaattaaagaattttccatctcaattaacatctttttcacatctatctccaattctttgactcgacctgtataagattcttcctgcatatatatataaataaataaataattaagttcaacacattaacaactaaacatcatggagtccaagaaaattttaatttatacataagaaaaaacaaaaactactctttagtgaaaaaatagatttttcatgactacaattgtcatcacttttaaagaaattatattgtcactcaaaagtattaattatatacaaatagttattgttattgttttatttttttgaaatggcattaatttagttatatattat

SEQ ID NO: 61074 - DNA, 871 bp, Cannabis sativa
ctcctcggggttttctagttccacacgtggttccccaggtggaattagtgcactagtttcagtatcaggagcaggtggttgccttgagggatgggttgtggagtttgttggaggcctccacttggcatctaagataaaggtgtagtcccatcaccgattccagtgactagtgtgccccaagtctgcttgccagtcgttagggatctttttccaacacttgaggaatgtgttgcaaccaccttgtaattgattccatgaattgtggttttcaatgaaagtaccgaaatattgatgtagaaatttggacacatatatctggccacaactgtcgctagattagaaagagtgtattatttagctaagtataaatcattgaggcacaataatttatagtagtttactctctgtatcgcgacagtaatggagctacgtctactttgcattttatttttcaggagatggattacaaaataatagcttagtttggaagctcttatttctatagagataaactagagagagatgctatgatattatgagtacttatctgaacttaaaaagtgaaatagtggagatgtacttttgcagggaaggaggtcctataaaatattccaaaaaaatatggaaaaaattaatttagaatatttttgaccataaatgatcatctagcgatgaaattaactctggagttcagtcacaaatttctaaagcttgagttgcgcccgtgagaccctttccaggtaagttgtagcttaaatttgtaactctctggagggtgaaatttggagttgataacttcagaattacaattggagtgtgagacttgaatttatataactttgaaattgcttcaagatgcaatttgaatcac

SEQ ID NO: 61075 - DNA, 799 bp, Cannabis sativa
cttatggtatgtaaatgattacttctggattttatcacttttaagatatctgataattgattgacactatatttttgttcttattcttattgttttttaatgtacaattaacagcttccaaaatggatgaacacacggaagcaaaagcaatcatttgctgaggtgttttaaatgattgtactataggctgtagctgtggtgaagatgattgggtgagctgtgaaaagcttgaatgtaagaaagatttgtgaatcatttcctgataatgtggcttcttgcaatcacagtgaagaatcagagatgcatatgtttaaaagagtgcccctttgtccaccccaacgatttggtgacagttttgctagctataaatcaatttgctttggaaacagggattttgacttggcctgtgtttcgagaaaagtgttcgaagatgtgttggagttcactagaattcgggataaaccaggtggccacagatgctcttgatggatccttcgctctttaaatggaagcgctggcaattcgtgaagcttgaggcacaactctcgttcactaatgtcccttgtattgtatgtttctttgtttacttgattgattctaaattatttattgcaaaaggcttttatacacttggttcaagagcagattagctcaagaagatcgaggcacaaacagattaggaataagtgagaggttatgagggttgtaaaagagtgtcttgtgtgtttgatcaagaactctcatgtgagatatgatgtaaagaaaacttttgattctgtgtacctcaaattactatcac

SEQ ID NO: 61076 - DNA, 1688 bp, Cannabis sativa
caatgcttcataaagcactctaactgtacattaccataaacagatagtttcaatgtttcattaagcactctaatcacatattctcaaagcttcataaagctcccctaccactcgttgttcacgagctatgtatgtcactatcgttgcccgataaagtgaacaataagtaagaaacctatccgtagtttcaacgagtaattactcataacggtaatcaccgtatcttttactcgatcataatcgagtctcaaacgatagtaatcgttccatatcgttacctcgatcataatcgagtcataaacaataataatcgttccttatcattacctcgatgataatcgagttataaaaaacacataataggatctcaattataattgagactattacaactataatcgttaaccataaatggtgaaaaacatttttcttacctcagtccagagattaagcgtgcatgtcggcctaagtggaaaaacaaagcttgatgatctcgggtcctatgtcacgaaaacaaaaaccaataaatacctcaaactgaaactccaaaaactaaccctaattttcgtaaccgaacatatgttactccccactactttaaaataactcaaacgtcattaaaatatcctattctaagctcagggaaacaacccaaataaaactagttttgaagcctaaaacaaggatttcccctactggcaaaactggttgaccagtttcactatgcccgtgaaaccggttaaccaattttccctgctgcagaaatgggaaacactggtttgttgctccaaaaccaaaccaattcttcaccaaacctgctcaaaccttccagaacaattccatatcataaaaacaatgtatcccaagcaccaatttacaataattcatccctttactcaaaattgcatactcaaatgaaatcaaactcaataatcttcacttaaaccaattcaaatcaaacattcactatatctaaccatttccagctcaaacaaattttaaatcaagcccaataacacactctaaactcaatttacacttcagccccgaaatcacacaaaccctaaccaaaaactcaacttaaaccttacaaaaatcaaaggaaagaagtgaggaacttacctcaagtatgaacaactcttatccttggttggttcagcttagacatgattgaattagaaggatatacctagtttttctgctgggtttctatggccttcgagagagagaaagagagagaacaatatatgtgtattattttcttacttttaggtttttatcttcaatttccaaattataaattaaaactaataaatttaatatagaataaattcctacttcagcctagataatccaatataagacaaaaaccaaaccccaaaagactatttcgctccttacgaaattacctaaactaaagcagaacttaagggcattttggtcattttccaactaccaggacctaactggcttcacaacattaaaatctagttcgaaataattcaatataattcatcttatattttcgtgatatttttgaccactccgtcgagttttccacagtcgttgagcccgaaaacattttatttccaaaattagtatctacgatactctcatattccagtaaaatctctgtaattaataaattacactttctttaagtatttactaaattcacaccaattaac

SEQ ID NO: 61077 - DNA, 1431 bp, Cannabis sativa
ggttgggttaagaagaaaggaagaagatgaaggtgatgatgggtgaagagagggaataaggttagagagagagatagatgagagatgggcagctgagagaaaattagggttagaagttagatttattttttagggttaggtttttttttttaaacgggataaagcccataactgaattttcttaatgtatttttgcttcggttatgcaccgacgctaatagtgtatataatcactttttacatcggttgtagattgacgctaatagtgtaacatatcctctaatatatgaattatcctcttggactaaccatttatctaaggatggaaaattgtactgaacttctgctttgtatccatggctcgctggagacttttccaaaacttagaagtgaacttcagatccctatctgaaacaatggacttcagaatcccatgaagtcacactatttcttttacgtaaagctctgcatattgatcttctaagtaagatgttttactagagaaaatattgctgacttggtaaatcgatccacaactacccatatggagtcaaacatacccatggttctaggcaatctaaccacgaaatctatagtgacatcttcccacttccactcgagaagtgtcaaacgatataacaatcctgtaggtctttgatgttcaaccttaatgtgctgacatgtcaaggatctggtcacaaattccacttgatcattcttcataacacaccactagtagtagggttttaaatattagtacatcttggtgataccagggtgtaatgaatagggagtggtgtgagcttcatctagaatatcctttctaagttccataatattcgggacataaactcgggttttataaagtaatattctgttaccctacactatgaaatctctagcttggctagctaaggcttcttctcggatcttcagcacatctggatccaccaatgatatggaatctatagcttctatgatcacatagaagtgaaacgatggtttccttagagcttggctgaacgagtttaaatggtggagtactaattttagtaattatattagtttacaagtacctaagtattttaaggattaaatacattgaagggtaaaatggtaaatttcaaccaacatgatctaaattattcatagagaatcattgattatttagagtgaaataattgatagtttatagcatatctatacttagtatagagcattctatgtaatcaagagtggaatttcaaatttatagtggagtcaggaggagttaacaagataaagaatttacttggtaaactacaaaactacttgttgggagcttggttatattagccaatggtccccacactacatgagataacattatcttatggactcaattaattaattttattaatcgattagaagtctgaatcagaccatgtctta

SEQ ID NO: 61078 - DNA, 3072 bp, Cannabis sativa
  modified_base (1200)..(1223): a, c, t, g, unknown or other
tttttttttttctatcaacgccattcttatgtctctcttccaggactgataatttgcaccattgagaacggtggagacatggatgagacctgggtgatcggctgagcaaagaaagaaatgactggaaatgtcttcgtgagccagtcaatcaagaagagaacgtcgagtgggttgagatgagttgttaggtgggggaataggagatggatgaactggttcggtgttgtcttcctcattgtgagatcgagatctggaacttggaacacgtcgtggagccatggaattgttggctactagtgcagaagtcgcatctggattagaatccgatgggttgtgctcaattgcaggtggaggaacaccatcctgggagcgtgtggagggcctcgccattgaagagttggcaagattttctgttgataccatatgagaaacaaggaatttagaaagagagagaagaagagaaagctctgttattattattactctgttatagaactcgatacaaagagctggtttatatagcagtagacaaatgactaactgaaccaactgaatcaagaagcctaatagttagttataacagactataactaacttaactaaactttaactaacaccctaatcttgatacggctagactatttatggttacgtagtgccttttgagtttgtcgttctgtcattcttttgtagtatcgtatcgtgcaaaacccatttttttcgtgccattatactaatttcatatcaaaaaattaaacccgcatttacaagactaaattataatattattatcattataattaaaatctcaataattaacattactactttaaaatcttataatgtaccaaatactcagtgcaattgctttttcttacagtgtaggtacatctatttttttccacaacacaacgctacctaacagacccatcattatagttagtgttgagtcttatagcattttcttttctgaaaatgactctctgatcatatcacattataatatggaaaaacattcatttgcattgtttctttttagcaaattcatttatattgttcatatatactttttacattgtgtgaattatttttgcgtgttttatatctgcattttcattgggtttacaggtgtgaagaaaacacgtgtcttttgtattaaagaaagcaagagcgtctgaaaattataataataataataannnnnnnnnnnnnnnnnnnnnnnntaataataataataataaatcaatcaaagggcctgttaaaaatgatacaccacatgcaacattttccattaaaacgggccttaaacaaagagagagacccatttaaagggactttgtatacaaatattgacacaattttcctatttaatagcactttttccccttatatctttttgtttgtgttattatttcaaaacaaaattgtttttgtttggtttgacttatattagctccttctcccgtccatgttggtagatgcatatggctcactacatttaaaatcatcatgatgtgaatgtgagtagggttcacaacaaaataaaactataaaacctttcgcaacaaaattatcatgatgagaatgtgattggtagacggtattgtttctcaatgtaataattttaatgatgctagttttatttattgctctaacacagttaatatggtagctcatgttttatcaactactgaaaatactatttggtaactgggttttccaatttatattcgacattttattataaaggaagttatttgatcaatgaatctcttgtcctcagttctgggtgttcctttgtattttttattgttagaaatatgtatataaatttgaagatatagtgagacacactagaatgaaatataaagctttggttgaaaatcacatggcatgagtggtcagaatgaggttggaggatctttcccactactgtgtaggagaagggatgaggccctaagctgtaccaaaaaatactttgctttgctcaaagtgtgtgagtgtgagacaccatattacaccaccctaccatgtgaaacttttcagaattttcttctttttctttttctactttcaactatcctttatctttttacacactacaactattcagaactgccaaacagacatgctttgtctctcccttcacaggccaccaatgtaattattattaatattattattattattgttatttatatacatatatataaaataatggtccccttacacacatgttggctcatcattatccttgctcctctcacacattctcactactaatctaaaaaagtaattaaaattggttagctaagctataagtgtgcctaaaataaaaatctaatttttgggtttagttgaagatgttggcatttttgtaaacaactctcaaactaacattaaatatagtggccttattatattagatagatctcttactaacatctctatcccatactttgttgttaattaaggtatcaataaaagaaaattttgaaaaagtggatcttttgtattatataattaaattaagcttgatcttttaggactatccttttcattttccctctttgagattctaatggcaaaaagaatggacagtaaattactactataactatagtaagtagctagtgaccacctttttttgtccatataaattactttcctttaaatgctttgaaaagttttgacaagttaaaccatagagaaaggaataatggttttattatagtaattaccgtaaacagtgttgagacatgaggatagttattaattgtattaaaagattattgtacaccataatgttttgattattttatatcttactaaaagggaaggtaaattttaatacagtatttacattctctaaaattatatttgaaatgattttatattcttacttcatagcattatcatcatttgtccctctctttccaatttccttttttttttaatatatatatatcattcattattattaccactctatagtctgtattagtgtattataatcaaaggcccgcccaaggttatcataagatttggtcaggtcaactattccattttttt

SEQ ID NO: 61079 - DNA, 601 bp, Cannabis sativa
atggttgaggagtcaaaattcaaaaatagtaagaatgtgataaaacgattccccttaaaaaaattgccaaggatcacgagccatgagaaagcaaagacaaagcatcatttgatcctaataatccacccaaaaagaagagaaagaagaagaagcttagtagaaaaatttggtctcaaatgtttgaagttgggcaacaagtgattttttccaactctttaacgaaggatactcatggacgactagattcaatgtgtgatatatctttcttgatggtaagagtatatcttgatgtgctggtggaactacttgatgcacttttaagaagaaaattcttggtgaaaggccaaggagtaaagtttgggggtggtgaggtcaatcgagcgaatacctccatcactttgaaagaagcttgaagaaggacttcaggttgtcttggccttattgtatcacatttgggcaacccgagagcagaagaacaagattatatttagttatatatattatattataattttggagtgtgccaccccttgtaaaaaaacaaaaaaaaaagagaagagtgtgattaaaattaggtttagggtgtgccaccccttgaaaa

SEQ ID NO: 61080 - DNA, 1547 bp, Cannabis sativa
ttttcactttttttttttaattataaaaaaaatttaaaaaaaaatatgtgtctgaggaaataattgattttaaaaaaggaaacaaatgtgttttttttttttttttctgagtatatatatatatatatatatataattattcaatatatataatataaagtaattcgcgttggacttatttatagtatccatttttttattattttttaaaataaaaaaaatgtttgacttcaagtaggagccaccatatagtatataataataaaaataaattatatacatgaaaaaatataggatatagaaactttgggggggccatggcctctatagaggtccatatacatccacccgtggttgtgtgaagttgagttccttcaattttagttgtatgtagaagaataggctttgatcgtcatttaaccttaacggtaggtatctttctttcacttggtatttcaattgcatgtcagtattttcttaggtgcattccaacacttcaacttgtgtattaattttttcatacaatcaattgagataaattgcccactagtgtcataatttgcataatttatccatcatcaaactgtccgttgcaaaaaatgaggaatggaattgtgtatttttcctaagagtataaaagttaaattattttaagtcatcttgtggaaaactgtgatgaaactataatgcaactattatatatgttgcgagccaactaacataaaaactgaaaaaattaatactctgtatgcaatacaaaagaaacttacttcgactttgctctgttcaagtcatgtattgcaaattttgagccctgtaattaatatcattgttgttgctcaactattattcaactgaaatgcaactgagtttttgtaaatgggcatctttaaaaaacttttttgtctatttttttttttaccatttgacaacaatatcaattgttcataaatagcaatatttagaaaaataactactaggcatctgtaaaccaatgcaatatattcatataactaactagattatataactttctttaaagagatttgtcttgatctgtcaatatgaatcacatacaattatgataaatactattgtaacgttatcaatttgtaatcaatgatatgccaagtttcagagggttagcaaaaccgtaatgaaactgtaatgcagctcttcagaaaccttaacaaacgagaacaattttttgatgtatgtgtctgtagatgtatgtcaattttctatactattcgtgatttgatatgatcaaaatcacattgtaaatttgtatgaaacaacgccaatgcaacgagatcaacattatttgtttcagtatttttgtattttttttttttcgaaacatacctgatttggattgattgggaactctagatcgatttataagagacttgcattttatatctaaaaaatgaatattaggacgattagttttctataattttaatcataattcagggttgaattttaattttaaagtaattttagttttctataagagaaaattagatttgatttggttgaaggca

SEQ ID NO: 61081 - DNA, 791 bp, Cannabis sativa
atggacactcagcataagacacagagcaattaatgtgggagttaatgaactgagagaagaaacacatagaaaacttagttgaaaaggctgtaaattgaggaagaaaatcaccacaaaaccaatttgggtggaccagaacccccatttttggtgtaggaaagaaggtatgcatgccacttgagtaaattaatgaacattgttgagtgttgactgtgtctatttgcttcttgtaaaataacttattattatttttcttattgtgactatttttgactgcgtctttgctttctctaaaataatcaccttcacaccatgattattttgctactcacagtcgaaaattctagccaactcatggctttaatgtttggcttcactgtttggccttcctttcttcaactttttcttgaaagttgaaaataagataatcacatttatcttctcactgttatgatttggggaattctaatcagtgtagtccctctggctccaccaccatttgacatcaccgagattctcttctattcagtgtcgtccctccgactaccttcttcttcaaccaaaatttaggttttattcttcttattcttcgctgctttattgaaagttgtaacttttttttttttgatttttttaaatattagtaattatgtatgagatttttttgaataagatagcttaattttattgtttcaaaatcattacaatctcaaatccgtcattacaatcaataatttactatatttctattttttacaaagtatctttgaaccaattcctaaccaaaattg

SEQ ID NO: 61082 - DNA, 1070 bp, Cannabis sativa
attaactacccatccaacggttacagtacatcacggattgaaatccgtgtccgtacagtaacgggacgaaatccggtccctatatatatatattttttctaaatgatacattaaatatctccaaactctaattgagtgttaacttttaaaaaaaaaaattagtgtattgttatattctaacacattttgagaagtaaaattctaataagtgtgtcaaatttgatataagatatattattgtatcaaatttaactcataacaaagagaaatgttaaagagtacccatattgtctaacattcttataaaatataatatcgctggtagtacaatttaatatcagatcccacttatttaattttataataattataaaaaattactaacattttttgaacatataaaaaattactaacgaattataagatttcatgtcatggagggtactagacactttggtgctccataacaatactctataataaattttacttttttgtttactatagtatcattaattattataatttattgaattttacataacttaacttctttatttattatattactattatttaaacaactgaaaaataaaaaatattaatttttgtgtactttcaataaaataataaatgacaatcaataatatttttttttgtatttatattatattttgtgtattgaaatataattataaataataaattaaatataacacaaacttattttttttttattaaatttagtacaaatttacatttttaaaatagtcttatagattataatgatatttctcacaactgaattatgttctctctcccgtgatagagagaagaggtcatatgtgtcctgaacttttctttttcatttttccaaaaataatttttagttttcaacaatatttatatacttttatcttaaaaaaaaaaacaatatttgaatacttttgtacttagagcatttccaaggagacaccaaatttagtgttacactatcaccaaatttagtgtcaaaaattatttctactccaaccacaacaccaaaaattacactaaaaaaatattcctta

SEQ ID NO: 61083 - DNA, 1024 bp, Cannabis sativa
gtgggaggtatgggttttaggtccctggttcattttaatcaggccatgttagcaaagcaggcttggagaattttccacaatcctaattctttacttagtcttacccttaaggctaggtatttcccacacacttcttttcttgatgctgttccaggtcatagcccttctttctcttggagaagtatcatgtggggtagagatcttcttaagagagggcttctttggaaggtaggcaatgggaaaactattaatacaattgatgatcgttggttgcctaattttgctcttaagaactctgatttgatagccactcttccttctccttctttgtcatattttatttctccttcaggtgcttgggacttgaataaactgagatgttattttcctgatttcatcattgatcatattttggatatacctatagcgggtcatatgtgttctgatgttctaatctgggggaaggataattctgggattttcaatgttaaatctgcatatcatcttgctattagctctcgagatatcccctcttcttcatctcctttgggaaataaatgtttttggtctaaactctggttctctcctattcctgataaggttaagcattgtgtttggcgtattcttcttaattctatccctgttgcttccaatctttatcataggcacattatccttgcacccttgtgtcccctctgtcatgtagcaccagaaacggtaacacatgctttccttgaatgttctagagttaaaactgcctggaaaaattcttccttttctactttttatgcagagcacaagtctttgaacacatatgcctatatttcgaaggcatttgagacttttgataagcaaatgctatgtattttcttttgttttctctggatggtgtggtcacaacggaacaattatttgcaccatcatagatgcttgtctccaatgttcatatttgatcatgcagttgcttatttgcaggattttgagtctgccaatcttaaagctggtgttatacgtaatgtgcagc

SEQ ID NO: 61084 - DNA, 788 bp, Cannabis sativa
actgattctaatggaagctttttttcttttttgtgggtgtatttgtgttaatcaccacctgtgttttttgatcaggtgagtgtgcacagataaatcttattaggtataaccagtttggctagaaaaggtttttcttttttctttttaatcactcaataatttgtcaataaaaatctattttttatgaattgtatacatgaactaaacttaattagcaaaaaaaaaaaaaaccaattattgttttttattctctcacagatttgaagctcaatttcatttagccagccataatgtaacattttgtttgtgttagttatagaggaaggacgaagatttacttgcacaacagaaagtaccaaatgattagagggaggagatgtctcagttcaatgctgacacgggatgatatcgagtccttacatacacattagtcttcctcataaaaggaaggttaccctggtagggttattaggtgagtcgttgctttacgaaacgtgcttaaaacttctgatacatgatcacactcttcctagctctaaatctgtagggtgagaacaaaaactttctggtatgtaagaaaaagatggctatttcccttgagttgatgtgttgcttttgtccagcaccattcaagcagtttcttaaagctgttacaaatatgaagtttgatgaagagcaaaactatgtcaagctgatatcatattttgatagcctgatagagccaatagtaccattgagacccattagaatagatggtgctcttaaggtaatcaaaatatatttaatct

SEQ ID NO: 61085 - DNA, 543 bp, Cannabis sativa
ggactacaacccccccccccctttcactttttacagccgccacggcaaggctattggtggtcgcgacgacgactttgtataggacatgggcaactttgccttttctcaattttgggctgaaattctctattttaatgaaaaggaatcgcgaattttagagaggatagatagaatggaaccctaaaaatataataagaataagaaggctcttggagcgaacgtgggcgatccatgacaatcctccatctagtttccttctcctctcttgatctcttatgtttttatttttgtctactttaattttggatttgattatgagttaaactcccaatttagacatttgatggatattgtctaagattatttcatgagttaacattagttaattgttctttcttccttgattgtatgatttattaatctttgtgtttattacatgtctaagcttgatcactttatgcatgatttatgattctaatgtgaaatatgaaaagtgaatgttaagaatgctctaaatgaagaaatatagattttgatgtgaaa

SEQ ID NO: 61086 - DNA, 661 bp, Cannabis sativa
caagggtgaatgcatcacaatgtgatgattcagaaagtgaaatgactcttttaaaaaggacccctgccttatctcctgcacatccaaaactgagagaaaacatatcagaagattctgttatagtgacaggaaatcttccattccagtgttgtgccatttgattcttaaaagtggacaaccatacttttctgttagtaagaactttggcaaataaaacatggtcttgagtcgcaggagggtctatacatcccatattagacaagtcaaacacggattcctcttcctcagtcaacttcaatggctctttcatcttatgtgtataaggatccatggcggaagaagtaaaaacaggcagtgaagatcgaaaaaccagagtggaaggaaacggttatagtggacggtttagaggaaaacagagtaaaacaccagaaaaatcaaagtgaaaattcttaactgtaataaactgccacagagcacaaaaggtgggcagacgctcttttatgaaacatgtcttatacatctgattttggtcagtttactgaccttatttatattgtaattaatttattatattatatatcattatgaaaaatagttacttttaatgataattttttagtcacaataaaaaattacttaactaaaacatagtatttaaata

SEQ ID NO: 61087 - DNA, 561 bp, Cannabis sativa
aaaaaaaatcactgtacagcactgagagagatcacatgactaaaaaaatcttgagaaaaatacaattaatataaatttttataagtaagaatatagaaattaaacctggatatttgtgagtgaaattatcccaaatacttggtcctctaccatcttcattggcagccccttcatactataatcaaccaaaaatcacaaacaaagaaaaattaattaacccatatttataatatttaattacatataacataatgatttatatgtatgtatatataaatttatacctgataagaagatgaagctgttccaaagatgaaaccaggtgggaaacttgttctattgagatgtaaagaagcatattgagttggtattattactttaccattactttcagataccaatgacccaattaaaagaagaagaagaagaagaaaccctaaattcagtagagataagtctttttgattagtataagccattagttatttgatattttgttaaaaaatttataaacttattgtatttgaaacctcactcattatgtgtctttatatatagcca

SEQ ID NO: 61088 - DNA, 1156 bp, Cannabis sativa
tttagtgacacgcacaaaatgactacaaattcagtgttagtgtcccataatgcatgtcactaaaaatatgaggtgtcactaaagagtaactcctataatttatattatatttttttaaaaaaaatattagcttacagtgacacgccaaatacgattgggtaaacataccccaacacacttggcgcgtcactatatcatgtattaaaaaaatcttttagtttatcaaaaaaaagtgactaagtaccttcatttaaaaaagaaaaaaagacacaaattggtggctttttttattttttttactttttgatgtttaatattattatgtttttgctctacaaattacattttttacttgttctcttcatattctaatttttgaatattttgaaaattttattctcatcatcgtgagtcatgggagacgatagatcaatttttttttagctgaatgatggtgaagtttctgttccaaaatattactttactccatttaataataataataataataataataataatatagtgaaaaaaattaaatacatccaactctatgataactaagcaaattacaaccatcaaatgcaaaatcaatggctaagaaaatgcccgagcaaaaaggatgcccataccctatatatatatatctttctctctcttcacttaatataaaaaaaccctaatatactctttttttgctaattccctaatatactctttaaacagccgctctctcactctctattgtgtgcgattcagccgccctctccctctctatttttcaagttgcgattcagaccaaaggccaaatgttggccatttctctcgtgcaaagacgaaccagtcactcctcaggcgaagccgtgcgatcacaggcgaacccgtcactcctcacgaacccatctctcctcaggcgaagccgtgcgatcacagggcctaatggcctccaacgatctttcttttcaatcggtattattttaatttgtttctctctctttaaatgtgaaaactgtttgaatcaatcctggatctaggtgtttgaatctcgtcggtggatcgtcggagtctcggcgtttcgagatggtggtcgacgacgatgttttgtttgtggtgcacggcggttttgggtcacgagggagagacaaagagatatatg

SEQ ID NO: 61089 - DNA, 682 bp, Cannabis sativa
gaaaacggttatggaagacataagctttgtacatgcaattatatttttctaataaaattgattctttaaactcaactataattttacaacattaattatagtaagaaaatgtgtataattaagctcactagaaaaatatgttctttaattaaattaatactacttctaaaaatactatgatttttacaatttgaatcgataaaatacgactggtagaatgcattaaaaatcatataatataataaacaccataacaattaatagcctaacttacataagaaaagcatgactgaacttatataaaagttactattaaatttaaagtgtaaattagaataagataaatttaatataacaaatagagaaacaaagaacaaagagaataaatatattagaaaaataaaaattacatggacttacacttgagtcttgccaagaaaattagtctagaaaaggcattgcctttatgccaaaattaataaattaaagggataattgcggcaaaagtcccccaaaacttaaggttgatgcagattagtcctcaaccttaaaaattagcggtaaaagtacctaaggtcgacaaaattgtgagtctgctagtccctctttctaacagatctgtttactaattaaaacttccacgtgtcgacaacttattggtctaaatcatattttttaattt

SEQ ID NO: 61090 - DNA, 974 bp, Cannabis sativa
aaaaacagaaaactgattaaaaaaatgaaccaaacgccacctaaattttctctcaattatgtatctcttctagagttttgttctaaaatatttctatcatataaatatgcctattttattatatttcgttcattttttacccactttattgatgtaactatgcgttatagacatagttataatatggtctattaactaatttaaatttgtcagaattgaactattaatattaaataaaataattagtaattttgccccttgaacttttgataatactaattctgccctataaatatacgtcttgttaagaattctcccctaaacttttatatttatagaaatttagtccttctgttagattctatccttttatttcctttaaatactgacgtatctttgttaattagcaactttttccctagactttggcaattatcaaatcgtatcccctcaaaataaaaatgagaaatatttaatattttttagtaaatcttaaaaaattactttagatcttagaaaaaaattattttgaatgattaagaaaatttaaaaaaaaaaataacattttaaactaattaagcgatataaaacatcctttattttatattaaaaaatacattcatatattaataattatattaaaaatttaatttttgtaaaaactaaattttacggaacaagcttgagtctgcttttaatttttctccaaaatttagatttgtttaagtaaacataatatttttctagtttgatctaactaaaaagtgcttcagagcacttatttatacagaagagaagagaagaagctaacaaactgaggttaattaaaaatataaatagaggactaatcaaactacctatcctaacaaccaaactaatgtcagataactaacataacaaccaagaatatgagctacatcactttgttataattctgttactccctcccgcctctctcaaggtggactatatat

SEQ ID NO: 61091 - DNA, 1805 bp, Cannabis sativa
attaattctttattttatccttaaataaaaatattctaatatgtacatgatcaaattattttggcacataatcaaaatgttcaaatcttcatgattttatagtcttaacaactatttatgatttatgtcagtggctcataaaaattagaaaagcagaagttttcctacttgtgtaaaaagtggtaactcttatttttacactttcagtttctatagctacaacagagtgatcattttcagtaatgaatttagtaaaaactacactccgcaacaagatggaagataaatttttaagtaattgtttgctagtgtatattagaagagaaattgctgaaaaatttagtatagattcaattgtagatgaatttcgtgacatgcaagagagatgttttgtattttaatgttaattatgaatttaataatatattttaattttaaaaaaaaatcttaaaaaactttttattatagtctagatgaattcctgactctgcccttgcccactattattagtgggacactgtagactcccatcaaaataggatgagttttaggatttggttggagcattttgtggcaaaaattatactatatacaggtttttagtgtgccattggagatggccttagtgacgcgtagtgaagggagactaaatgattttagagtcactcaacgtgggtcactgatcttgttttaatagtactctaaaagtctattttgtaatagtgtctgtccaagagatttatctcaatacttaattctccacacaccctaatcttagttataatttcctatttatagataaaaaggtcaccacatgagcaactttaattaaactaaagtgaccaatacaaaaaagacaactcagtccaccctcaaaacaatttgaataaaacttaactaaaaaaggtaaacctggcatttaagccctctctttctattgtaaacaaatatagtcaaggacttatcataaattaatatgatgaataaccctagcttactcggagccaaaagaaaaaaaaaatatatgatgatagagaaatgggatagctttgatctctaaaaatgtgtagttcttaaagtagttgtaatgaaatttaccatatttggagcttttttgaaaaggaatgggaactttattcataaaatggattcaactattacaatatatataaaagatcacttgaaatatcatccatactgaaactgcgatctagatacaaacaaaaatcataaacaacacaatgaataactttatttacagaacgtttaacaaaagatgttttgatgaaatttaaagaaaactagaagaaacttacaatcttgaaccatttaattaatgaccatatttggggttagatgactcaaaattcacattagatttcaaaaagatgtgacttatatgtttatagattctagggaaatggatattctgataattgcaattatcatttcattattaatgatgtattaaaaaagaaagatgaaaattattggcaaaagaagaaatctctaaaaataaaaattaacttttggccaaaaaaaaaaaaaaaaaactagtaactaaaaggaaaaaatatcgcgaagggaaggtttcattaaaaatcacttttatatcacaactaatattttcctaattataattagtcacaattattttttaactacaaccttttgatctttaatttttattgtcactaataattatttacttacaacaattccttgtcactaattttctttaattagctacaacccacttaattttacttactaatttttgtttagtcatatttatagataccaaa

SEQ ID NO: 61092 - DNA, 755 bp, Cannabis sativa
aaaaaaacaagaagtaaattggagacgcaaatggaaataaatatgcttcgttatacacactataactaatccaaaaaataatccatatactttgaatattaaatcatagacagttattcatgtaatacttttgtatttatcagtttcgtgtgtaattttctctttgttttatacgaatatatataattgttaatatgcattaaaaaaataaaaagagttctcacatcaaataatacaaggattaaatattatgattggagggttaccaatctcttttcttctctcctctttttatattacttatcttcccaccaaacaaatgattatacttctaacagatttaggtgttcattgggttaattaagttaattacatgatttgtatcttgatttgcttttgttctgttagttcagttagattatgataggttagtttgatgagtcttgttaccttgattagttcagctaactctagtcagttagtataaataagtgcatttgcacactgtaattaattcaattccattatcaataaacctttttctattatcttctctttgtttttaattcctcaatatggcatcacgggtggaaaagatatgctttctcttagatcctgttagtacaggtagttaaaaggtagttaaagtctgtacgttataaagttagttagtgagctgtgagtttaggtaagagttgtcactcttgcacagctcattcataacagaattctgttatctctgtattgcttgttct

SEQ ID NO: 61093 - DNA, 1066 bp, Cannabis sativa
  modified_base (265)..(270): a, c, t, g, unknown or other
ttaagctggaaatttttcaatttcacatcaacttaaattagaaaaaaatttagagcatattttattttattttaataattatttcccacctaatgtcaaatttcatttatttatttaaatgtagatattttgaaaattagattaaagttgaaattaatttattaataaattttagatcaacttaaatcaagtaattttcattaatgattaattaaaaataaatagactaaaatttattgttttaattagaaaataagtaattagnnnnnnaattatctagatagatattttttaagtagactttttggtatttttatagatatatttaattaaataaaaaattaatatttataactagtttatttattacgttataggatcagttctattttaatttatatctgagacatctaaccccgatgatttttttgatgatgatgataactccagtgactttttcagtaatttttttggtaatttttttagcgacttttccgataacaataatttttttaactttttcagcattgataatttttccgatagacttttccagcgatattttttaataaaattttcttcagatttattttatggtcgtttgtttaatttcttacattttaaattttaattattttttacttttatattttatttattatttatttataccatataagtaaattctaaatgcttttcctaaatcccctataatatatgtaaatatttaaacatatgggttttcaagtaagttgggaagctcacgtttatttgaaactattatgatgatacacatatattatatagctgcctattatgaaccactatagttgcgtttttgtgatacatcaatatctgtatattcccatgggatatatatctatataagtacaccattacgataagatacatgccaattaatgtcatgagactacttttacatcatttttattttgtcatatgtgattaaatttacttcaactacagcgatcgatgtattgatatttatcctaatcttcattcttcctcgaatatctatctttctaattcaatcattagatattat

SEQ ID NO: 61094 - DNA, 1276 bp, Cannabis sativa
tgctcccacttcatctgttggcgtccttaacaacatgcccacgcgcaaatgcctggctgcagaaattttcaagtaagataaataacatagttatgaacgaaaatttcacctacgtatattaatctaaaatttcagttcaataacacccttgactcaccttatttttttattcatttcatgaaaccataaatagcacttaactaacaattaaaacaatttatgcatgccaatcacaaccatcaatccactaatccaaaatattccataagcttgcaatacttactatgctcgactaatataaatcaatgcacaactaaaaatcaaaagatttttctaggcttgtaatgttaggcttaggtacggatagatgaaatggtcatttaggcttgcctataccataagattcacactcaaatcactcaataatttctttcacaaacaatcctgataccctttttttctaattccatgagaaaaaaaaaattaagaacattgcaacaacttttttttcttcaaattttttttctttgaatttaacacttagtattaaaaaaaattctttttcaagttgttgccaataaataatttttttttcacattctttcaattccactcttattcccacacaaatataacaagcttcccatcaaaattcctccaaactaaagatccacttatggtgtaagtagggtcaaatttttgatattaatgggtttattttgtttaggctcaaaatttgtaaaaataaaaaatcaacttaaagctcaaaaaggataactaagataaaaattataaggatggcttcaaaggcacaatcgatccaaagaatgtctaaatcactatcctagttatgcatcatttattatttcgcctcaagtagcaagaaagaatgttctagaattttccaaataactttctacatttcacaattagcatacataaaccaattcaattgctagaaatttacctatatgattctatgttctttttcagcaccaaatttaaattaagcaagaatgtaatctcaccaagcacacgcattatttaaaaaataaataaaattttcaaaaccatgctatctacactttcacattgactcacatttggcaaattgactcataacaaaataagaacagcaaaaaataaaactaacatgaaactaaatatttttaagttcatctctccaatcttatttgacatattgtccctaatgttgttggaatttatgttttaccaggatctagatttactaacaagtatgtttttaccatcctaa

SEQ ID NO: 61095 - DNA, 1487 bp, Cannabis sativa
gaggaagctttcacaagcataaagaaacatctaccaacccctcagtcttggctaaaccagtaactggatagactttacttatctacttggctatctcagagaatgcgattagtgcagcataagtgcgagaagacaggaagcactagcaaccagtttactatgttagtaaaaggttactgggggcagaatcgagatatccaccttttgaaaaacttgccctatgcctaatacatgcatctcaaaaattaaggccctacttcaaggcacatccgataaaggtattaacttatcaacccctgagacaaggtttttcaaaactagatgcttgtggaagattgataaaatggtctattgagctggggcagttcgacataacttatcacccaaggacatccttcaagggccaagctttagcagatttcctgatagaagggataattctagatgaaaatccacttatcgagcgagacgcagacacttggaagttgtacgtcgatggagcatctagtgaaacatggctcgcgtccagggatgatactagtcttgccagaaatccttaagtttcactatgccttaagattataatttgacacttcaaaaaacgaggctgaatatgaatccttggtagctagtttgaaattagctgaagtgttaaaagtcaagaatttgttgtgttatagtgactcgcagttaattgtgaatcaagttctaggggaatacacgacaaagggtttaaaaatggcaaaatacttggagaaggtttggaagaacgtagagaagtttgattattttaaaatcgaacaaattccaagagaacaaaactctaatgctgacgccttggcaaaactggcctcacagaacgaacttgatgcattgaatttggtactagtggaagtgttagacgaacaaagtatatgtgaaaaggaagaagttgaaatgattgacagctcgcctacatggatgacacccatagttaactattttctcaatggaaaacttccaaaagacaaaaacgaggcacaaaaacttttatatacaatactttgctacaccatagtagaaggaaaattgtacaggtgaggttattcaatgccactcatactgtttgtgctccccacagaagcaagcgagataatcaaagaaatccatgaaggcttttatggagaccatgcaggttggcaaagcttgtcaaagaaaataatttgacaagaatattactggccaactatacataaagatacacatgagtttgtcaaataaatgtgataagtgtcaaagattttcacatatatctcgcgtaccactaacagaactaaggatgatgacctcgccatacccatttgcaatatgggggattgatttgattggggcacttcccacagggtgaggaggagtaaagtacgcaatagtggctgtcgacttcttttacaaagtggacagaggttgaacctttggtttccataacctgcaagaaagttctcgacttt

SEQ ID NO: 61096 - DNA, 1326 bp, Cannabis sativa
gtgatctttctgggcatgaaaatttgattttctggtttgatatgagcttgaagatgaaggcccgatggcccgatgcatggcccgatgtaggcccgatgcatggcccgatggagcctgatgcttgtgtaaaaaaaatagaatttgatatggcccgatgggtccgatggtgggcccgatggggcccgatgcctatgtaaaaaaaattttgatatggcccgatgggcccgatagttggctcaatggggcccgatggcttgatagtgtagtgaaataaaagagagaagaagagagagagagaggggggtgatgtaaatgggggtattttagggatattataaaatgtgtcatattccacaaatatcaaatattatgagtttaggaaaaaaaattaagcatatgtaagcataaaaaatcaaattttccattcgagatacacctttcaagaagtatattaaatcccccagataacgaagagacgtttgatcaggtcacatcagatcaaatatgacaactagacacacatcaaccatccaaacagcttcttggccaaataagttcacgtgcgaccaagaagatctcgcgcagacttatggggcaaatgttatcaaaatttctacattatgatgtggcatctatctaggtgacatgtacgtgtaacatatttcataaccttggcaaataattctactcctagtaggccataccgactattatgatgctcaaaatcatacatagatggcaggatgtccgaccaaataatggatagacatccgaccagcttcactaagcaggtaggtcgcatgcaccggttaaagaatgcgagttaaatttttttaagatatatcttgtatgtctctaagcttgcgaatcacacagtacaatccttatattcatgggatagattcgtgtcttctaaaaataaaggcaatcaacctaagtttcctatttttttcactgtagttgtggaaataaactagtttctcattttatttcttattgatttagggaaactaatttcatgtgattaattcctataaataatggattcatctcactattcagggacacaaaaaatatttagagagagaacactcaatagaaaaaccccaatctaagagtaaattgattagaggttattgtaagagatttagagagagaataagttattcttgctcacaagttaatacaacaaaatagaagtagactattaccaactataagcggtcgaacctttataaatctagtattttcttgggcattttacataaatgtatacatttttttaaataattacaaaaaatgtgcaaaaaaatacaattttaaaaa

SEQ ID NO: 61097 - DNA, 2084 bp, Cannabis sativa
ttggggtacgtgcctttagatcacaagttattattgttacactaattttactttatttagttatatttttaatttttattattatatgtatttttaaaaatttattatttatcaagatttttataaattaaataaaaaagagcttcagaaataaaaaaaatagtaagtaatagataagtaatttttacgtagttcgagcgttaataatctctagtttacgagttaattgtattggctccttggcaaattggatacttgcatttctaaactccaagatcattacaagctatccaaagtttgccggcgggatccaggtcatggaatcgtgaggcggaaattaggaaggatcttaatgaggcgctaagaagaaaatcaatttatgggcaacaaagatctcgtatttcttggatccatgatggggataaatgttccaagtttttctttcttaccgcaacgatccgaaatagaaggagctcagtggatagtattttgaataaggccggaatttagataaccgatagagatgaaattggcaatgaattcactgactacatgaaggatatatttagtaacccggccatggggcctttggaaagcttagaccatttgatctctaatcatctctctccttcggaacaagcagagatggaagttatccctagccaggaagagataatacaaacgttgttcgctatgggtagcttgaaggctccgggccctgatggtatgtctatcctcttcttcaagcactactagaaggttgtggggaaagatttttgtgatgcggtggatgacttcttccgatcggggaatttacacaggggatttaatgttacgaatgtgaccctcatccctaaattggcgaaccctaagaaagtgtcccaatttaggtcgatttccctgtgcaatgttgtttataaggttatctccaaaattattgcaaacagaattaaacctgtgctcccaagattgatctgccctacccaagctgcttttgttccagggaggagcattcaggataataatattttaatctaggaaattatccactccattaagaggaagaagggaaaagaaggtttttttgcgattaaaattgacttggtaaaagcatatgacaagttaagctagtcttttattgatcattttcttttaagttttagagctcctaagaagttccgtctgtggattcgacaatgcctaactacgatttctttcaacctgcttctaaatggcagaaagattagtagctttgtcccggaatgtggcttacgacaaggagatccactatctccttacattttcatctgggcagctgatattctttcaagactcctacaagatgccctaattaaaggggatattaaaggtatcagtttgagcagaggtggacctagattgtcccatcttttctttgcggatgatctaattttggtaggaagggggaatttggacgaagctaaaggattatggcagtgtttggaaaaattatgtgattggtttgggcaaagaattaataaactcaaaacttccatcttcttcagcggtaatacgagcaatggcatgaaaagggcgatcaagcaggctttaggactgaattgtgcaatgggtaatgttaactatctgggtctcccactatttagaaatcgccaaaaagatgctgacttcaattttatactggataatctgataaagaaattacatgggtggaaattgaaatcgttatctaaggcaggacgtgctactttgatcaaatctgttgggctagcattgcctgtttatgctatgcagacgaccaaattctctaaaaaacttgcctctaaaattgacggaatgataagagatttttggtggggatatgagcaaggaaatcgagggatctgccttaaggcctgggatcatctgtgtcttccgaaatctttgggtggcctaggatttagaaaatctttagagatgaaccaaacccttttggccaaatggggttgggatcttctaaatgaggaacagtccttatgttgtcaggtgctgagtgctaaataccttcggggcagaaagttctgtgaatgtacaattaagaattctga

SEQ ID NO: 61098 - DNA, 1565 bp, Cannabis sativa
caactgcaactgaaataccaagtgaaagaagaataccatccattgaggataaaggacgatccaagcctattcttctacatacaattaaaattagaagaaccttcactaggtaagtatattcattgtgtgaacatggtcagcaacacaacaaccaacaacacctccttctttgcaaggagcaactcattagttgcataacagttgtattaatggtgtatgtcatatctaaaatattaatagaaatataaaacattatcaacatcatatttaacacatcaatgtgaaattataaaaaatttcttattaaattgactattctgttaaatctttaaaagtttcttattactacaatatatagcgtaatttttaaagcccaggataagtgttatcatggggaatcgaactctgaagaataaccaaatgagaaaccttattcaaagcattccaggcaactacactacacactcggtggaacaattaatcagtcatttaaaaaataaaaaataattagtacttttgttaaaaaaaacttataatccttaaagatatttaaaaatagaataaataggattattacctcctaaagaaactagtaataagaaaagatagggcaatgttagagtaaaataataaagaaactaaaaagaaatcttcagactcttatcaacatgcttcttccctttcttaacttcatggagggaaatattttcaacaatattaacctttgatttgttcttaacaggcttacaatcattttttaggagattgagcaaagtcttaatcattatcttcaacaacgggtcatttgccttttgatttgttagcaagagatgtaatacctatttttgaacgttttttcagcaatggtaatgggaaagataaagatcgagtaatggccattaacagaaccgaaaaaagaagaaaaagattagaaaaacgtggttaggtgatggagaaaggtacttaaggaagatggacaaaatcaatttttttggattaaaaatggttttgatcgtgggaaaattttcaaatagaaagctacgatgaaaactgaaatggaactctactattttttggatttttattttatttgtattttaatctctcataattttgttgctaataataaaaaaaaaatatagaaagtgtgcatgtacgaaaatttactatgtactggaaaactacaacaactattgatccatgaaaagacttaatttagctacaaattaaatcttacaaaattgaaagttaatttttagttatcagtaaaaaggtaataaatcttattttcctaattttagataatttaatatgatctctaacatattcttaatatacaatctttggttgtcctacatgttaagggtcctagtgctaatgacagttagttgagtttgttatttctgttacaggggtttagatttggttgtaacaacttttcttttgccttctttattttgcacgtggtgcctttccctgtatataagaagtttatcttcttctttctcattcaatggaaaattgctctgttttctctcttcattctttctctctcgttcaatctc

SEQ ID NO: 61099 - DNA, 733 bp, Cannabis sativa
cccatacatgaaaatgatgcttattaaaatgaatctaaatgtggtagatggacctacaattgtgtgctatgacaaaaattgattataataacttcatttgtttggtatatggagctaatattgattgatttataattatttaataaagggttggaattattatatatattatataatttaatttcaaaacataacaaaagtgcatgtgggtatgccaccccatgagttactgaccctgatgaactcattcactatgaaaatctacctaatttttagatagatataagttaattaattcatggctatataattatgtaaataaaaaatctaactagattaattacactttttatattcaataagactgtctcgaactttcattgtttgttagtagatatttcttttttagtgtctaatttctttagagtgcaaatttctcatgtttataaatttacgaatactgctccccacatgttagttaaatatgttctttcggtaaacattgattgtttatggttagaattaccaccacctctaatatctattatattataagtactctctgattaatataatagcatattataaaaaatatatatatttttgtagttttttttttatttttaaattacattattagatcaaaatttatttaataatgaatgaaatcaaatcacatattaaaattagaaatagaatttataaactagaaagtaaacattattattattat

SEQ ID NO: 61100 - DNA, 812 bp, Cannabis sativa
  modified_base (220)..(236): a, c, t, g, unknown or other
atttaattaactaaacttaaatgggcttcttatatgcatctaagtccaaaagcaaacatataggctcacataggtcaaataattttgatgggcttcatcatgtttctacgtttatcacagataaaagaaattataaaatttacctattacagattatttctaagatatattaacaattaaactatgattaaaattagatcattggatttgtcaacaagtnnnnnnnnnnnnnnnnnatcaaataaataataggtttatttaaaaattgaataaataaataaataaaacaaaacaaataagtaatagatatctagaaagtaggttaagatatttttattttaaaataaaatatgtaaaatatatcttaaccaaaatttatattttggttgttagaaaatatttgaaaaagaattcaaaatctaacaaatctcctaaatatctaaaattcaaaatgaaaccaaatatctgactaattttcaaaattttaagtttatttaaattgtttaaattagttaaatatctaataagataatataatataatatctttatttgagaattgagatatttttggtattatatttctaatcttataatttaataaaataaatttaacaagataaacaaaattgaaaataagatattttgatggttaagatattatgaactttacttcataaatacataaataaaatatcctatgttttaaaattttatggtttccaaaccctaaatttctattcaaaccaaatttaacaaatttgaaaaatttcatcttattttaacaaaaatataaattttaattaaaataaa

SEQ ID NO: 61101 - DNA, 1082 bp, Cannabis sativa
gcctatattacacaaatttagcttctagatgtcaagtggctacccctgcttgcctagtaaagcagaggccactgttgaagactagtgggagaccacgcccaaaaagggtcgtgggtgctagcgctttttgtactctaatgttgggtagatagaaccgctactttggagtagagttttgtaagttggttattggtagtatttgtgaaggtgctctccatttcagtatcttgctaggagaacgagctccatgttcttgttgtaccttcccagcttataggccctcttactagttatttgtgtaacttgataagggccttcctagttaggcccaaacactactactgttgagtctttagtgttgaggaacaatcttcgaagcaccatgtctcctatgaataattttttgttcttaacgtgtttgttgaagtgccttgctactttttgccagtaggcctacaaatttaggttggctaattctcttctttcttctacttcgttaagggactctgccagcagggtgttgtttgtttgttggtcacaggttattcttctgtgagacagtggcactagctttacaagcaacatcgcctcgtaaccgtaagctagagcaaatggagtttgctcagtggtcgtcttctcggtagtcttatgcgaccataggacctctaggagcagcttaggtcagttgccttttgcttcctcaaggcgcttctttaaggtgtccttgagggttttgttgacaacttctacctacccatttgcttgaggatgggccatggcagcgtagctcttgatgatgtcatgtctgttgtagttttcagtgaacatgtcactgtcgaactgtttgtcgttgttaggaacaatcttctggggaaggccgaactggcatatgatgttcttgacaacaaagtcaaggaccttcttagaggtgattgtcgctaggggttcaacttctgtccatttggtgaagtagtctactacgacgacaacaaactgtacctctctttttgcctttgggagttgaccaactaggtctatcccccacactgcaaagggctaaggagactgcatcatcatgagct

SEQ ID NO: 61102 - DNA, 990 bp, Cannabis sativa
  modified_base (26)..(53): a, c, t, g, unknown or other
ctctttctctcttcatcttcttcttnnnnnnnnnnnnnnnnnnnnnnnnnnnntatattattttataacatgtatttgtttataatatgactttttttaagaaaaaaaaacaataaaaaaaggaaaaattatatcaacaaaagttatttaaatgagagtcatactttataaaaaggatcattgaaattgaaatattgtatatattagggtaagattattgtaaaacttatttactagtagaaaagttctttaatctaattttaaatcatatggtcattataatatatgaaatgtatacttttaagatagagctatttatatacaattaaaacttcatatatattataataatatttaattatatatttatttaaaaaaaaataatattaataatcaaatatttaataatttttagtttgaattattattgttattttttttttaaaaaaaagttattttaaattatttctatataagtatttattttaaaaaaaataattttacttactaatttagctatcaatttttttatactaatagttaactataacatatagtttgctgtgagctaactataacaaaattgtgatgctgatgatttaattttgttctgcaaaagaaatgctaagtctgtcaatatggtatatgcaacctttcaaaaaatttgtgatgcttccggtctttcagcaaataaatcaaaattccatatttattttgggggtgtcaaagaggggagtaaagtgaatattctagagaatgttcaaatgaatgagggttcttttctcctaaaatacttaggggttgatctgagaccaaccaaatggaaagcctcagattgtagcattattcttgataagctgaacaaaaggctaaattgctaggcaagcagaaacctttgttttgttgggaaagctcagctcattcactcagtccttctggggattcgtaattactggatgattttatttattcttcctcaaaagattacag

SEQ ID NO: 61103 - DNA, 1059 bp, Cannabis sativa
tatttccttaattagaaatattctaatagcgattccaatctcttaggatgtagtcttgatgctttcaaattttttgcatagtgtgttactcaaaatatttggaatgccaatgaaacatttgacataattttacattgcataacagaacaatctaaatccctctaacttttattcatagttaatatgagtgtgaggcattcatactttatctttgagatgggatattgaagttaatatatgcccaagttgttgttggaataggtattcctctttgagatgcatgttgagatgatgcagagaagaaaggggttcattaaattttctagcttgaaattgcctttatactttatatactttggtaagattatgaatcttgaggaatgcaaggctaaatgcttgagcacatgctcttgtaaaatttatacaaacttggatatcagtggagaaagtagagtggctgcttcgtctgatttagagatctgcttaatattcaaaaatttcaatcttgcgaacaattgtgcatttgctatccggctattagtacaattattttattgtaactcttttagtgtaaatatagcatgcttgagcacatgctacattttttgaaccatcattaaaactttatacattatttttcaatattataacattattattattacttacaatcagtttcactaacaatagtcatttaatttatagattaaagtagtgaagacaccattttaatttaaatatatattcccattaacaatctacaaattaataccattttcctaattcctttaccactaataataaatagtctaatataaaaattaacagaggtgcatcgcacgtcaaattctgctagtatttatataggtatgaaagaaaaaaatagtatttatttctatatagcacaatcaattagcttaattggatgctagaatttggttagtcctgccagttggtcgtttattatggtcagtagtcaatcagtttggagtctccaaattattatatacatgatatattataatattaataagtagaactttgaaataataataataa

SEQ ID NO: 61104 - DNA, 3074 bp, Cannabis sativa
tttttttttgagaaaaagcgtagttatatataataaagatgatgatgtcgttttttgagcttgtctatttcaaaaattttataattattattattattattattttgctaaaatacagacttcattcaacaaaaaagaaatcagaactggaaagtagtggggggaaacgaaacatctttctgcccttccaaaacagaaaacatcattatgtcgtttttgtatgaatcagtcgctgaccattcaccctcttatcatttgtcgttttttgagtattgcttccctctttcagaatatattgtcgttttttgataattataaaaataaataattaaacataaaaataagaagaattattaaatccttaaaaacttaaatatatttaaacatagattattaaaatggaacaaagaattactattattaaaactaaataagaaaatacttgaaaattgtagattgggcgtttggtatggtgttcaaaaatttgatttaactagaataataaaactgagaatatatatatttatttaaaaactttggttatacattattactattaattaattcaattatattgtttggttgaacaaaataatctaataaattatcgtaaaaaaattatataaaaatattagtatattaaatccaagattaagggtaatacttagattaatccacattttttaaaagaatttaagatttacagattaattttgttttcatagtaataataatcctgtccttaaaatagaaaaatcacataaatgtaaaaaattacaatttctattaaaacattacttcataccaaagagtccatcagattgtaactaattatatagacctgacatataagctgaaaaaaataaaagaaagaaagaaagaaacaaaacagaacttaattcatgtgaaatgattctcgtcttgtatatataggaaataattagtataaaattaagcaaaacagctagctaggcagaggaggcgggtatcgaatacaatgtttcaatttatatctgatttttgttcagaatcatgtccactatactaatcaaagagattattagaccaaatctcattatttattgagaaaataaacctgtcctcatatcataatgatgaaaaaaaattcacaaaataatatacatataatattaatttcatgtattatttgcttattatgaaaaggtacgttgtacatgttaattattgttcacactcatataatatatgcttatttcgatcatgatgatcatatcccctctaaaaaaaatatacatcaaagttccttaagagggagattattaattaagacattattaattcataagcaaaccaaaaaaaaaaaaaaaatacatatagaataaatattatatgatataataataattagtatttaattagaggcctctagcaagcatttggtggtaattatcaatggaatcgagcctctgaatcaagagttgttgcctaaactttttgatgaaagcatctgcactttcattgatatccatcgacgccttactctctagcttataattactactgcttgtcgtttctttcttctctgcaccattaaacgacgtcgtattattattagtggtatagcctcttaccttctctgatgatctaatctcatttggattaattgggccataataatggcgaaccggaggcatgtaattaccgttgctgttcttcataattaattaatcgcttaattaatttcttttgatgatgatgatgagaatgattttcttctctcgaaccaaaactataagaaattatgtttagtgtttttttggatgatgggttcgtaatgctttcgacttatatttataaggccaaaaaaatatagtttttatttaatttatattattttatacgtgtacgtgtacgtgagctgtctcctatatccaattgaaaaatcactttttctaggtaagtaaataaaaaaataaaaaaaatatagggactagcttaagctatatagtatatctaataatgtttgaaagtttgtacagtcaaactgaggttacttatcagattccttttttcttagacaattctagtagttctaatcgcctttttggttttaacccttttacgtaaactcttcattcatataaaaaaaaagaactttataatttgaatgcttgtggcaagtcaaaaacaatgaaacaagaattttaagttaagctgaacaaaatggttttaataattaaataaatgttatattttgtatgattttatcaaaaatatataaatgaaaaatttcgtcattgtctcacattatttatatgttagtaatttgcggtatttatattacacttataaataactaagcttaattaattataagattttagtaattttataaatgtcatttttttgattttatataaaaaaaaaaacaattataagttaaaccctttaattaaatatattcacatttacatataagtataataaatagttgtgtaagattatgatttatgtaatattgcataatagtttagatataataattaaggtgggcacagcttgtgtgaatggatcgagttttgacttttcaaaattaattaaataagactaattagtaatgatttagaagaagtaatcataggttataacatgcttatatatatctgtaacgttgaaatgagtcttgcggcttaagccatgcaaggattaggggaccgaaaggtgcctaattaattgaagcaatttttgccgactactcaagaaaccaactaacttctcatcattttctaaggaaaaaataatagttgtaaaagaggttttcttttttcttttgtttcttttagagagagatctagagaaagaataataatatatattataattaaatacatatataaggcatctatacctaattattattaataaactgcctaatatgaatgaaggaaaaggagccaaatacatcgtatatggtaatggaatgtaaataaaaatatttattatgagttgaattaaggttgggttgaatatatagaaagagcattgttattagccactagtggtgcttagcacatttgcgacatgtcgcgttg

SEQ ID NO: 61105 - DNA, 1007 bp, Cannabis sativa
tttggatatctcaaaatctttatcatcaagttcgaaataagagtttgaatcttcaataatcggttacgaacgttttgattttcttttttccagagaatgaacaacttattttcttttggaagctataaaagatgtagggcagggctatagggaattttttaaaatttttcttaccgattgctaatttactaacaaaaacaagagaaaaaaagaagaaaaaactaaaataaaaatagaaaatacaaagacaaaaaaataaaaaacaaaaactagaaacatgtgtgatttcttaaccacaaaatataaaaaaaaaaaaaagaaaaaagaaaaaatgaagaagaagttgaacagggagagacaataaaaatagaattaaaaacaaagaaattttttttaatataagtacaaatatttaaaacaaacctgtaaaagaatgttttctcatttttcataattaaaaaaatattgtcaaaagttacatgaacaatcaaatcataacttttacaatctttaaatataatgaaaatggttacaatagaaactggggtgacaaatatcaataaaaaggaacaaaattttattttaataaaaactcagtatacaataaaaaaaattaagcagtaaaaaaaatcattatatacgtgtaacaataaaaatgtaataaaaataggaaatgcagtacacagtgtaaattccgcatcttattgggagcctgaaatacatgggcccatggtctctgcagtatttaggataatgtttaacagtaggttacaacaattaattatttaattcataaatattcacattattattttatcaattttaagtatttatttaatttataaatattcacattattttagtaaggatctaattttgagaataatgtgaatacttatagattaaataaaaaatagagaataaagattttattattaattcgacattttgttgtcataaatttataataagtatttattgttataaatattaataattatgtggat

SEQ ID NO: 61106 - DNA, 760 bp, Cannabis sativa
ttgatagattttatttaagtctattatataaaaggagaagtataaagcggtgacgtgatgctctaaaatcatctcaaatgcttcgatctaaaaaaaaatcctactccttaactaatatatatatctaaactattatttatttttttcttctcaccttttttattttctctcaaaaagaattcctattccttaactaatatatgtatctaaaatactatttcttttctctgctcactttttctattttctctcttcgttattatcatctagaataactttctctcatactcacaaacaattatataattaacaggtatatgttgaataatctcataatcaattatcatatttacaataatttctctctcccaccaagtcctggcatagtctatcacaaaaaaagtattcgataaataattgaatcaattgtacgtcacttatcttagttttatataacgtaagagtttttaatttttgtcattttttttttcatccagaaaaatagttgtatctttaatttttcttttgtgtgatatatttgtttaatataaaattgtatcaatatataatcttagattttatataattttatagttttaattttaactaaattgtatcttcccttctaaattctaagaattttttttttttcggaaaagaatatacttctttaatttgaattatttatttttttataaatattttattttaattctatgattttagatgaaaatttttgtcaaaaccctcatcagaaaag

SEQ ID NO: 61107 - DNA, 638 bp, Cannabis sativa
aggctaacattgtagtagtgagttgaagcagaaacaataacatcattcacagtagaggttcttttttgttccaaacggtatggtttcgagctttccacaccacccaccaatgtgcaataatgcatcaacccaggtgccaaaagaagctgaatgatgtggatgagaaaattcttgagtttaaggtaaaataataataaaaaatacttgtaataatgtattttgatgaataaagtaaagatgtggatgagagtattcttgagtttttgatgaaatatgcaagttaataatttagagaagattttcttttgaggaattatactttttagttattttttttttttttgagaaaaaatatatcaaagattgtgttttgaggaaaatatatatatatatagtcaatataaagatacattatgcttctaattgcaaatttattaatgtccttaccaatgttaccataatatcttgatcaattttgagtctttttacccgaacaaatgaaaagtcaaacaaacaattgaacaggagttgtgtagttattattagtgattatatacagtagttcattaccgaattgccactctgatatctctaatttggttttgtttctaaacaaaaataaatgcataactctccca

SEQ ID NO: 61108 - DNA, 1583 bp, Cannabis sativa
  modified_base (538)..(547): a, c, t, g, unknown or other
ttttatttttaatataaataataaatcacccatgaatttctcataaaccaagaattcggttatataggcacactttatatagaatagatatatgatatatatatatgacagataatagctaggtagtgtatcatttgcaaaggctttctcatcttatatattatgtttaattaatttcttttaaaagaatttatgattgggattgctccgttaatttttctcgtagtttctatgtgtgctgctatacggattttaattacgatttaaattgtttcgttagttaattgctatagaagtttacgtgtagaataattaatcccgtaaaaatacaaaaaaaaattattttaaaatgtcaaaataaaaaacaaaactctctttttatatatgacatcatttcagttttacaaatgttataaataatttgctttacaaaaattagtatttaaagtgtcagttatacttatcattacattatatgtttttatatagtatatttatggggtaatttcatgtttaaatcgtaaatttgaaaaaaaannnnnnnnnnaaataatatatgaagtaattttcttttttatttttctttctcagtttgcaattgaaaaagttttaagttttttttttttttttttgggtttatatcttattgttaaaatttgagttttataaaatttcaaattaacttatgaacaccacatggttttttaatttgtgaaccattgatagaaatctgctcaaaaatttaataagttaatttttttttttttttaaatttgtgagctattgatagaaattttcccattcttctcttatttttttgaacacaaaattagttttatgtaattaaccttttgtgtgtattgatgagaaaaataattatacaaagtttagtttaagttattgaaattttataatatagatttttaaaatttaagtatgtactagttttgtaatttttttcacaatgccaaattttttactctgatactatgttgagtatagaaaagtaaaaaaaatattttattgaattgaattaagagcacagctctttatatacagtatagagtgaagagttagttagaaaagatacttaattaacatgacagctaagcaactaactaaccaacttttaactaactacttaattaacatttggtacaaatattttctataaggttctaaattgaagatacaattctcttcttttgttcataagtttatcctagctcattagttgcttttcttatttggatatcttttttatgattaaattaacaattatataaatttagaaaagcctctagtatttttttcattttaatgctagaactttgtagaaaatttatatcatttggcaaattggctttgcaataaataatatatcgtgtcatactaaactcaaatagattttagagattttgtttttttttttttatctaaaggagtaattagtatttaaaatgatttgttgtaatgatattgtgaaattttaaattctgtaagagcagctccaaagagactgcaaaatcattatatggtgtatgtatttgatccaaggaggctgcatatcatgcagcattttg

SEQ ID NO: 61109 - DNA, 1358 bp, Cannabis sativa
tttttttttttttttcctttaattcttttgtctgactcttacgtgtattcctctattttcttttataaaaattatctacctccttatcatgtcttactctttgtcttgttattgttatattatttttttaaaaaaaaatatttatctactatcttaatttataaagaaaattttagctaatgtctctaaattttataagaaatgtctctaaataaatttattttatgaaacaattttaatatatttttttaaattacttacacggaaattaatagtatcttaaatattatggaatcaattaaataagaaaaatttgtctttaggtaacactatgttatcttttgttcaaaaaaaaaaaagttgtcttttgtttaagatgcttttacacattttttttagcaatatttttattaccttaaaaaattattagcttattaataaaattagtatatatataataattttcaaaatgtaatcaattttatttatgtttagaatattatttggtaacttcttctaatgtaactttaattctatgtgtttaaaatactatttggttattttatactttttaactacattaattttttttttaaaatataccatttggtaactttaatgcaaaaacaaccaaaaattgagactaacgtattctgttggtttgtatattagtttttcttcaagtttaaaattggtttccttttcttaacaaatattttttctaaaacaaaagcctaaatgacttttgatgatagtagttataagatattttttagtaactcacaatattgattgctaactaaattttatttgagctacaaggttaatcttttttttctattaattagaaaagaaattaaaatattacatttataactttttatttttttttcttttttagaaccatatcataatggttcaataaaattatttttcttttagaatactatgaaattttttagaaatgatactttttttttttttagaaaatagccttttaaaacaccatttcaaaacaaaatgctgagggaccgaaaaactataataatttattaatcaattgacatatctaattttattgatttaaaattttgttaatcaaattgaaaaaaaaaaaaactaataatttatttaatacttcggtcattttctatggtgatagcaaaaacatatatgttttgggtttatcaaattgatatcatcttaaaaaatagacaacaataatataattgtaactgaaataattacaagtgaagctagaaattttttataatttttttttttttaaaaaaaatgaagagatatttaaatgtcatttcattaagagaaaagttaaaaaaaattaaatgaagtcatga

SEQ ID NO: 61110 - DNA, 2388 bp, Cannabis sativa
ttatcatacataatatttaccgagtgttttagaaactaaactgaagtacttgaaaaataataaaatacagaaatttactagatggagatttttatgtggttcagtctattagcctctaagggcgtgttcaatgtgtttttaattttttccaggaaaccctaactttatactcttagtttctcttaaagaagaagacttagagcaatattgggagagctacaactatttaagttatgatcccccttcatatggaaatagaagggtattcattggctaaaaagacgagtatggacatgtccatgacccacctcggatttttgctaaaagcccactaatgagataaattatatacaaaagagagttgactattgggtcccatagaaagaattatgctcgtgtgtactgcagctcaataattgtacgtcatggacacgtgtctcccaaatgtttaatctttaaaagtaaagggcatgtgtcacgtaaaggtttcaccttgaaaattagaggtctgatataactgtctggcaaaataggtggaagaggtgcgtgcattaccatgcctagacacaggggacaagacctaatcttgtatttgaaaaagtataattgtcaccgggcaatctaaattactctgaaggtagacgtttgtgacactgtttggcagttgatatctgtaataggccctttgaatacccacctgggtatcagttggcagacttcgagcttagacccctccaggtcctagagagacaattatgtcttccacattcgggaatctaggttaaggcaaggtggacttttgtttatcctttgatcttgacttcatcctcattccatgaagcttctccgtgataggaacgcagtagggaattttaattagtgagattatgaggttaatcttttccttcatatgccatgtgtcacatgctcagaaacaaatacaacatttacccttaaacttgggatttttcaagattcaagagattagtgtctatttcatctcttggagatgggtttccaacacgtggtgattattaggattgtggatgtatcctgtgagctatcaaactcaattcccaaatcacatgatcatcacaaaataacaaaataccaatcacttaatgcaccaatgatcaacactcacctgaactcgtagcaaattatcaccaccgccgtcactgttggcatttatccgactgtctgaaacacatatatcacaaaaccaaaaaaaaaaaaaatacaaaaagaatgcaaggtacctaacaaaacaagtgtaagattaattaatacctcaataaaaactcaaaaccaccgtcaatcgaaccaaaaaatcactgcaaagtccaccaccggtttcaaaaaaccctcataattttttatctttgaaacctaaaaaaaaatttatctttgaaacctaaaaatagtttttataatgtaaaaactgttgagaatcgtcattttagtcagggtccaacgagagtttcactcatcgctttaagagagatatagggaaaatgaattgtttgtttcagcgaagatggttttataaaacatatcttttcgattatcttgaaataactgaagatgtatgtgtccacgtggatacctatatctttgattatttcattataaccgaagatatagctctttcatcaatagttcagcgaaaatgggcctaaatctatgtgtatcttctatttttattttttttttccataaaaacagtaaagatatatgatatatttgtagtagtggcatcaattttaaattgtctagagttttagatacctatagttgagaactgacgctatcgaaatcatacaatatgtcgatggcattggcatatttagttttaagaattgacggaaaaagtataaacatcaattaaaatggatggctttacctttttttagggccgatcttgacattaactagaccctagacagcgaaaaaatttattgggtcctatatttcaaaaattactaataaaatatgtgtattattaaaataatttttattttttcggctcatgagctgggtgggctttgagctggtgtgctcaaatctagccctggccattttagtttttattattagtgtgggtacttggaattgttaaattaacttttgcattgcaactatgaccacataactaaaatgtttaagatttcgcaaaatgttagaaggaaaatatctatatatatctataaaggagacgtataaagtggtgacgtgacagtctaaagttgtttcatttatcttcatctattctctccttaatttttttcataaatttatttttattagatttaaaacttctccatatatattttctctaattttcttttttcttataatttaaatatttaaataataataaataaataa

SEQ ID NO: 61111 - DNA, 1458 bp, Cannabis sativa
aaaaggacttttaaggttgcaatgtattggcttaggtaataggtagatgaaaagttatttaggctatattatactataagcacactataaaccatcaaccacccacaatatattacatatctcgaattgtgcccaaaaatttcaatgattgagaattttacaactcttagttgcaacatcaatttatttattcatcacttttttttcttttcttttttttcttctatttcttttaatcatcattttttgagaacgtaaataacattagtgaggttgaaaaatatttttacaatcaatcacccactttgaataataatttcatccacacacaattcatcaccctcgaacttatttctaagcttatggtataattcaagggacaaggatagaaaattttaagtggattcaaagttagtctcataaagtgagtgaaaatgattgaacgggctaagctcaaataggaaaactagggataggaaagataaaggtaagcttcaaaggcccaaacgatccgaaaaaaattgcctcatcattttctaaacaagcattgtcaaggatttctcttcaaaaaaataattcatgcaagttctatactattcaatcaatcttaccacaaaccaaagtaaaataattatgatacaatctaactattgataatttacttcaatacaaaatttttgcaagcatccaaattaattcaaagagtaaaaaaaaattcagcacatggtttaaaatttcaatctattccacaaagaacaacaacagaaaaattgacataagcttaattaacaactaaaacaaataaaactaaataatgaaaaataaaattaagcccttcccccaaacataaaattaaacattgtccccaatgtgaagcaaaaagagaactcaccttaggtccaggccacatcaacaagtggttgacgcccataataagcctcatgcaagacaacttgaaagttgtttttgaaaattccctcaagcttggcatgcaatgagtttgaactaaaagtcgcaccaacaacaaaagtctttcgatgatgagcttggggagaaaccgttgttagctcgtagagaatacattatggagaatgtggtattagtggaaaattagattccattgcttgatcataatatagtgatattgacgacctcaactcaacaactacatgtgattcttcacccaataatgacacctctttctcgctttcctcaaataacctctcaattggttgttcagttttctcatgaccgtccaaatctttgactgtgacttgatcttcagtaagttcataattgaggatggatgattcttcatttacaaaattgagatcatcattttttgagcaagcgtccattgtacccaaatttttagccacttcaaaggattctttctcttcaattataagctcaatctcttctatatattcatcaaatggtgcttctactatattcaaa

SEQ ID NO: 61112 - DNA, 743 bp, Cannabis sativa
ttgtgaaaaatattctctcgtggaacttactagtaatgattaaaaaaagcccaataagcccacttaagaaaccctacaatatatattttttcttagtttagccctagagcatgcaccccagcctatctctctctttctctctctctctcccaacagcccctgcaacctctccggccaccagcgcccatgataacgacgatacagagaagactcaatggcagtggaaatgatggtgacagcgatagcgacattcatctctttgagacaaactaaatagtacgtaaaaatggtcccccacttatatcaacatgcattgacttttccatatatataatatgtagtttttacattacaccacaacataatttgtggtttatacattcctaaatttataacagtccaaaacaacgtcaccatttcaaaagctcatgacgtcaaagaaatatttaactatataagtccaattatttatgtataaactataaatatatagctaattaactagttataatggtcgcctcctatcgatacgagttaataaagccctagtatatatataaataactataggaaactgttcaacttttgtaattttttcaaattaacttttttttttattattgtgtgatatggtagaaaatataaaattttaatgtgtgtacaagaaaccaagaagaggttttgaagttcgaaatataatttaccacaagaagcaatacttgagattgtttgcaagttagaaa

SEQ ID NO: 61113 - DNA, 950 bp, Cannabis sativa
  modified_base (256)..(262): a, c, t, g, unknown or other
cgcggtgcgggtgcggtttgaaaaattttaaaaaccgcatgtgcgggttggtttgaaaaaatagtcaaaaatcgcaccacccgcaccgcgaacacccctaaaaattactaaattatatgaaaaactgttgtgcggtttttataatgataaaaaaaaacgttaattaggatttttttctttgaattttgacaagtactaaatcacgctcctaatttttttgccgttaaaaatttaccctgaactattgagattgttnnnnnnnaagacttttgtctaattttatttaattagactatttcagtaattgtttatagtaatatttagatgagatcctggattttaaatgtaaaaaaaaaaactaatttttatgcataaaattaaattttagaatttttttactttatatatttattttttacttgttttattgtaaagaattaagaaaaaaaaaatataattttatctttgaaatgaaaaaaaattaattagaattttcgcttcttgaattttgtcatgtactaaattatacttctaaatttttcaagttaaaatttctcacacactattgagattattaaatttaaacttatgaggctattaaaaatttctcacaaactattaagattgttgaatttagagacttgtgtcaaacttcttgctatgattcttatagtccatgcactttttatactcaaattaaataaaattattttaataatttgttttttttttttactgtagtttttcttgctttatttatatatttctcaaactgttataaatcatctcttaataatttgtgttttgtttttttatttgtttgtcatatttgtaagtatgcattgtacaaattataattacatgttaaattagttatatttttttgttgtcattttcttttttctttcataattatttaagttttgtaattgcttttttttttttttttt

SEQ ID NO: 61114 - DNA, 1002 bp, Cannabis sativa
  modified_base (38)..(61): a, c, t, g, unknown or other
aatgttatttcttatttttattaataagtaaatctgannnnnnnnnnnnnnnnnnnnnnnngggcataaaacccaacacaaactcgtagaggcatggttgatcaagtgaatccacagcggtggatcctgcactgcagaaccctgggagcacgagggtttcgccaactacaaatcctgaacaaccatcgatcgtgggtcacagtgtgacgattccagtgagtggaattgcgcctggtatgcaagagactgggaataccagttcagcagccaaccagggcattccaaacgcagtcattccacctgtaacaaacgttcgaacaactatcggagatgataatgaaatccaaaacctttgtgctgctcttggagtcatgcaaggtcataccaacaccttgcatcatgatcaggaggaactccacaccgcggtaaatcttgtgtttgaagaccagaggcgcatgttcgccgaatggagggacaaggagatggaaacggtaaaggctcagcaagcagccattgacggctaaactctgtaggccaccgtgttgatacggaaagcttattaggctgagggcaacaacctgcaaccttcattcccctgggcgagaaagacgaagctccagcgttgaacaactctcagactataaacggtccgctgtccaatccccggtcacaggttccacctgtaggccaagcggtaggcaggtagaccttgtctagtaattcgacaggagaagtgatacctaatactaccactcaggttaatggtggtggccagttgacgatcagcatgacgcacccgtcgtacagtccagaacccgcgctcaaaatccccctcaaggagatgctgatgtgacttagatcggccaacaggccgaataggctagtctagccgtgctggcacagttggaagaactaaaaaaatatgttccaaggcctagccagtcagaggaacaatgatctcgagttggactgaggacgtggatattggaaattattttacca

SEQ ID NO: 61115 - DNA, 736 bp, Cannabis sativa
aattttctcataaaacaactttttaaaaagaaaaagtcatatttcttcaaactaataccttaaaacccataaaaatgaaaatttcaccaatattaatgggtcatgatccagcccacgaatttttcagaacaggttggcaagctaaattaggcgaaaacctctctagctaacatatgatacaatttcacaacaagacgagatgaaaaaaaaaattgggaaatttgacttaacatgcatacattaggtaaaaaataaaaatttaaactaaagttaactcatattggtagaataggtatacttcccaaaataccaggccttcctacacccaaacctattcctcctcttccctttctctttctctcttctctaacttcacaaacccatattttccatcattctccctaattaaatcacactaaattcttgcgtaaactaaaaaatttgagttactcctatctactccaagctcacatttgaggtgcattggtggttagattttttttttatttgaggaagcacgggcatgacgaacttaatgggtaagtgattttcttgattttgtttgttgttgacaattatagggaaatttgaaaaagtatgcataaaatactttaatattttatgtctaaactaatacttttcaacattgaaaaaatatgaccacttttttaaaactccaaaaatacccctctcaaaaccctttatctctccttccctcaaactctctctgcctctt

SEQ ID NO: 61116 - DNA, 717 bp, Cannabis sativa
gagagcgaggtgtctagagcattagttttatttgcttgcgcggagtacaatcgattatatctaactaaggaaccgtgtagaaattcggccctttcaggacatgagtatgtaatggaagtgttgcatggtcacgagagtaggtgttatgatttattcagaatggataaggacgtcttcatattattttgtggtgttctaaaagaaaaaaatttattgaggaactcccgttatctttctgttgaggagcaagtttctatgttcttatttgtcgttggacataatgagcgacatcgtgtagttgctgaacgatttcaacactccacctcaactatatctgaatactttaggaaagtcttgagggcagtatgtcgtttatccaaagagttaattactccaccttcgtttgatgtagttcctccagaaattcgattcaatccaaaatactatccatttttgaaggtagaaaaacttatactatctcttttattattattttaatatttaataaataaagaataaaagccaataatttcttttttatttttagaattgtgtcggagctatagatgggacccatatctctgctcatgttcccattgatgaacaaataccatatcgaggccggaaggtggatacaactcaaaatgtcatgtgtatatgttcatttgacatgaagttcacatatgttgttgctggatgggaaggatcgactaatga

SEQ ID NO: 61117 - DNA, 1226 bp, Cannabis sativa
ttaactcaaaaatttaatttaggatggtttttgagaaaccatttgattagcaaaggtgacacattaattagaaaattactgtagctcgcctaaatatcagggtgctgtaattttggtatcagagtcgctaggtttgtctaccaaagatcgtcaagacatgtacaatcatcgtcagagaaaagctcgactcacggttcagtaagcctttacttgtttagtaatgtatgtgattagaaaagcataatattttataattatttatttggatgcattgccttaaaatccataaatgcggtatatagaatatatttgatccctatccgactggcctgacgtaagggttcgcgggctaagtcctagtgtatggacgtccaacgaaatgaaaaggttaagatgatgaggtcgagactggaggcggtcagggaagtcaaaatcatttgaaccctcgtggatgcggcaggggttatggaaggttgcaaaggggtggttatgagaatccatcaccagctccttaaaactaagaacaaaaggttggcaggaatgcaagtccgaattaattatcaagaaatagaagattcagagggtccttctacaatgccaccaccgcagatatcgactgctcaaatttagtggtgccagcagaacaatttgttgttggtaactgtataaaatctttatacgaggttttccaagctgacacttctagtttttcgggaaagctcagatgttgtgaaagtcgaactgcggctcatagtgtttgaggggatcttgaactttatgggtgtcaccaggaatgttcgggtgacctacagtacgttttagttttaggaggatgctcttgtgtggtgagagttggtatttctcaccggagacgtcactactacgacctggaaagagattcgggatctgttcaatgctaagtattataacgaggcagctagagagtatgttggtaactaactacacaacgaagtatgatcgttaagccaagttggttacgagtgtagtatccatgaatttcagtaaggaagagaaatacttggcagatttaaatgccaagattaaatataatagggtaatcactacaaatgatacaacgatttatgttgagatagttgaaaggctctacgagttaaaagtgcagtgaaatttcatcaggagccttgagagactctaagtgtttatggaaccactactcttcctacttcaggatatggtacgatgga

SEQ ID NO: 61118 - DNA, 1139 bp, Cannabis sativa
  modified_base (730)..(735): a, c, t, g, unknown or other
tgtttcatacactgagtaccactgggtgatataccacgcacactaagtacttctccgtacttgtgctggtatcattgaaatgcactctcaaataactttcactataccaatgcactctataccttaactgtaaaagtgttggtagtacaactaacacattaagcatgcatatacacataacatatacatacactccgatattgatatcacacattatattcagttctaaccttctttccagattcaagtgtgctggccgacctgaacggaaagtctcgtgctagattaatgccttaatcacattataaaaccgggtaagttacatgatcaaaaccctaatcaggggaaacccgaacccataaccctaggttctgctatactttctaggggttacacaaactctgggaatagggaagcacccaaccacggcactgaaatagacgaaaattaagaaaacgaagcattcggggaccctgccaaaaccgagtagcttgttttacacgtacgtggaccagatcacgccaaatttttcatttcttgctcaatcatccaccaaatgcaaccaaaccttccagagtaccgaattagggtacatacaatatattccagccagtatttcacagaaaaactcaatgttaacaaatattccattagagatcaaagctttgaactcaaagctcaaacttgcataactccaacacggcacactaaaaccagctgcaagaacttnnnnnnaactcaaatgaaccctaaaattcgaactacaactcaacctaaccccaacagccactaattctcaaaaccataaacccaaaccaagtaaaaacttaaaaaactaaggaagggtgttactagggcttaccttagcttgattctcccaagatttccttgctgaaaccaccacaaatcagcagcaatcttccttgttcttgctggtttcgaagacagagaggaaggaaagagaggtttccttcaattttaggttttctctttattccttaattgattcaaatgaaaagagattaatcaatctcttgctgaacataatctagatagatgtcactaagctaggctgccacctcaaccttcacttaacaaaatgactaatttaccctttaggttataacttaggtatttct

SEQ ID NO: 61119 - DNA, 660 bp, Cannabis sativa
  modified_base (49)..(83): a, c, t, g, unknown or other
  modified_base (176)..(193): a, c, t, g, unknown or other
cttttgaacatataataatgattagattccactgtgctgacaacactannnnnnnnnnnnnnnnnnnnnnnnnnnnnnnnnnnagaatttatacattaaatataaacatcaaattaatcatgtgaatcattcaacataaaatgacttctgatatttattaattagtaaatctaatnnnnnnnnnnnnnnnnnnatttagggcacaaaacctaacaccttacacgtgtcatgttcctggaaatacggataataggcctaaaaagttcagagggcatgatcttgtacatgttaaagttcaaagcaaagatcctaaatagcataaatgatatatttggcaatgtatagtgataaaaaaaaaattgagttattttcctacaaaatttaaaacataatcatttagttacttaatacacaattaatggctattttactccaagccctaaaggtaaataagtacaataaaccaaaacaaagtttaaaaatgtgtggaaaaattatgtctaaatatgtagaaacaaataaataaaactcaagatatatactacttcaagtctgatagatcgatgtgatctatgactctactccagttctgaaacaccacagtaatctttctagaataggtacaatacagtcgagacgagattctctgttgagtcctca

SEQ ID NO: 61120 - DNA, 1820 bp, Cannabis sativa
gtataaattaaagtttaacatagtgttatataaaaataagatatataatctaatttaatataatacaatacaatacgacattctaaacgaacccaaaaaatattattttagcactaattttttttccttctaactacaatacttaaatttacactaaaaaaaatattccttattatattgttatattattaaactatttgatattaaaaactaaagaaatataatttatagtaatgagtttttttagattaattttgtgtcttatttttttaagattttacgtcctattggaaaagcagattcacttagtataaattatgattgtgtataaattatcttatcttcaaaatcctctctacaaaaatactctatattcacttagtatgagttaacgacgtgtcgttttattaaaacttgataaagaacgacaagtctagtttattagatagaataaatcgcaatctgatatggcagactttagattcttctattcgattttttttttttttttattcttcctgaaaaaatattatatttatgcaatttttttttttttgagaggcataaacacaaaaagacaaaaacgacagccattgttacaactccatgaactccacaatctccaagcccacaattccatctccatcgcattcttctcacccttcttcgctcttccctctaatctcatcatgcaaaaccatcagagacttgacccaagtccatgcccaattcatcaaaaccagcaaaatccacgacccacttgctgccgccgaaatcctcagattctgcgcgaaccatcgtgatctggagtacgcgcgccaagtatttgatcaaatgcgaaaacccaattgcttttcttggaatactattatcagagcttttgcagattgctccgccgacgaggaacaaccaaaggaggctcttttgttgtttcgtcaaatggtttttgctggttttgtggagcctaatcagtttactttcccttctgtgttgaaggcttgtgctagaacaggggattttgaaatgggtaagcaaattcatggtttggttatcaagtatggattggataatgatgtgtttgttcttagtaatcttgttaggatgtatgtgatgtgtggggctatggttgatgctaattatttgtttcagaagagtttgattgattttgggaatgtgtctaaagtgggtagagataagagaaggcaagagggtaatgtagttttgtggaatgtaatggttgatgggtatgtaagaattggtgattttagagctgcacgagagttgtttgatgaaatgcctcacaaaagtgtggtttcttggaatggtttgatatctgggtatgcacaaaatggactctttaaggaagctatagaattgtttagagaaatgcaattgggagatgtttcaccaaattatgtaactttagttagtgttttgcctgcaatttctcgccttggggcacttgaattgggaaaatgggtacacttgtatgctgaaaagaacaagattgagatcaatgatgtgcttggttctgctttggttgatatgtattccaagtgtgggagtattgagaaggcccttcaagtttttgagaagttgcctaaagagaatgcaatcacttggaatgccattatcggcggacttgctatgcatggtcgagcgaaggatgctctttacttcttctctcggatgcaaaaagccggtgttatgcccaccgatgtaacatatattggtcttctgaatgcttgtagtcatgggggcttggtggaggaaggcaggtcattttttaatcatatggttagtgttgttggcttagaacc

SEQ ID NO: 61121 - DNA, 668 bp, Cannabis sativa
ttaagattttttgtagtgatatgtattaaaaattattacacatttctacaatacttaattaatttgtctagaataacttactttaaattttttagataattgtaaaatatattagaattttctaaacatgtaaaaaaatataatttttagaaaactttagtctaaatttttttagatatgcaagcttaagaaatatgtagaaatgtatcgatgaaatccttataaaactagaaagatctagagcaaacaattctagcctcaaatacaactataaatacccatcaaaggttccaaattgaaaccaacacccaaaagccaaagctacaaactttcaataagagcttactattttacatataattctcacttctaagtcaaattatttatatatactaaatcaacaactactcatcaacatcactacttcactacgttaccataacaaccatttaacacttatatccacctattcaaatttaaactaatacaaatctattctcaaactattggtggtatcatagcttcgttcgatcttatcactggacataatctttttcactcatcaatatgagtttagagtccaaccactcttatctatggagaaaatgagaacctattttcgatcacaaaatctatagaaaaatattaaagaatgaatcactatttcg

SEQ ID NO: 61122 - DNA, 1045 bp, Cannabis sativa
gtgttggtaataggctattaaagcgttgtgttctttattgtttaccgacttttgttctattttaattacatttcttatcgcttattaattgattcactgttacatagacttcccaatgtgtaagtttattaatatttacattattagattaaatgattataaaaaacttaaaaattaaataatttaattaaaaaatatctataacatataaatttgcttagaaacacaattctatttattttctcactataattaatagatttcgtacaaatatatattgttttaaaaaatatattataatcacttgtaaaatttacattaatttattcaaatgatatatattttaaaactaaaaataattagaaaatccttataaaattaaaattttacaatatatattaattttgtgagtaaaaaatctcataatattattaaaatattatatataaaaaataaagttaatataacaaacatatgttatatcaaaatttaaaatttcgataagatacgatgatgagaatatgtaaaataggatactctaatatttttttttttatattaccctatttatttttttttataacaataatttttttaacaaatatatataataaattttatacttcttaataaacaactccaaataataataattaataaaattataaatggacttaaaagttttttattctttttatggagttttattttttgataaaaaaatttgttaataataatatgaaattaaataatataattttatttttattatatattagaattattattttttttcaagataaatatttattatattaataaataattattttttattataaaactaaaaaaattaacttagctagggctatattacctatagtttatataatagtttgactgcctctttactagtttacttgtataacaatatcaagaaaaatgatatgtgttgccacacgaaataaaaaaaaaaaaatgatatattcctgtttttttgttttgttttgttttttttttctttgaaaaaaatgatatatcttaa

SEQ ID NO: 61123 - DNA, 1063 bp, Cannabis sativa
ttttttgttaaagaattttttggtcctgggtgggggcccttgggcgtgggcccctggtgcctcatccttaagccgaccttcacaaacatacacacatatataaaacgacacgcgttttacacatagtaaattattcattttttaaaaaaatagcagacaaaatatctactataactataatatacgttatcattttaaaaaaatattaaaatataattctaaaatataaaggagtaaaagtggtgtcctacctaaaattttcaagatcagatatatataaaaatatatattatgaacttacaaatccaaagcctccaatactatatgttggtggaatcatggtgaagtctttgttgcaatttttggcaaggaagagtttggccaaagcaatctgaagaaaaataccagcaacttgtttggttcttagggcttgagcatattcatcttgtgtgtgaaattccctaatttgatttggatggtatttcaaaacttctactaagtacctttggagataagaacctgtgcaatagccaaatatggccttactactctgcagtgatccaatgtccggttccaactgttgtacggttagcatgcttgcaaggttggctgtgtatgtttgtgttatcaccaatgccacaaatagccataccaacattgtcattcttgagagattactatgtaacctatcacctataaagccatttttatatacataattaaatcaattattagtataatataaatagagtaataatatgtgaacacaaaatatatacaatagctaagacccacaatttaatatagagcattgttataaggcatgaggtgcctagcatcacttagaggtggggcctagtaattggttagtgatatttttaaatagttattaaattaaattatgtgggacgtgatacttaatcacactaatagcgatatgaccctctaaattgtaaatagtgttaggcaatactagtgtcttttagtatttgtctttaagaaagtattgtcacatcacgtgttgtgcgcggtgtagtggtagggttgccttttctggcatgct

SEQ ID NO: 61124 - DNA, 1171 bp, Cannabis sativa
  modified_base (354)..(364): a, c, t, g, unknown or other
  modified_base (1037)..(1042): a, c, t, g, unknown or other
atcctggtaaaataatttccacaatgtggtccctacaactggccaaaaagacacaaacatcccggtggatttgaagcaggcccttgccttcaaaggaggaccctccactggcgcgtcccactgaaggaaggacccttgggtagcatccctcaggaacaacaactggatctcatctccagtactagatttactaacatgtatgttgattataattttataatctaacactataaatatgaattttctaatacgatgaaataaacacataagagattaagtaatccttataatgatggtagcagaaaaataatgactcattctattcagttctctagctcttgattcctttctgtnnnnnnnnnnnatcaagatctgaacctagatcttctctccttcagtttagttaaccacagtcttccacactatgctaggtattgctttgacatcagtggacatactctcaatcaccagagcacaaaactttatgaagaaaactcaagagaaatttgaaaattacaatagaaaataagaggtttgcaattaattcagtttgtcagataagagagagagtcatctatgaatcaaacccttaatgttctgtttatagggatttattaagtttaggtttagagcttaatgggctaattagaaagatctattgtcttagaattcatcatcatggtcgaacccctagtaaagcccatgagttagaattttgccattattttgctctagttatttaaatactaattctatctatttaaataattatcaaataaaattactatttgaatatatattaattagaccctccatggtctcttaattaataaataccttgaattttcttttattctcaattaagcccttccttaatgaaaattcacaaataatacatagccttatttcgaattctaattgattaattaaaactaattaactgatactacaaaataatattatcctagttagtatggggaccatggtcctatgtaatcaagcttacaataaatagatctgaaatttaccaagtaaannnnnnaacttattaattcctcctaactctattatagatttggaactgaaatcttaattacatagaacacactattaccaaaaatagatgtgatttgaattacccattgtttcaatccaaatagtcaaagatcct

SEQ ID NO: 61125 - DNA, 1205 bp, Cannabis sativa
taatttccactcaaaatactaaataatcagcattaattttataaatataaattaataaaatactatttaaaaccaataataagtatataaattttattagtattttgattatttattatacattaaatattattattagttttaaacttgcaatatatacatttaaaataaccttatcaaatacaacatatattctttcaaactaaaactcatcaatataacaaaacaatatagacttaatataattaatattttaacaaacaaaaacagttgatgtggacacaatcaactatgtattatgtaagcaaatcttgcactaacaaagcaaataatgatcacaatacgtgtgtgctaaatatttagatagatttgggtaatatttttgtttttaaaattttaaattagaaaaataagtaaaatttttgtttttaattttttttaaaataaaaatatatcttataactatttttattttttaattttaaaaataaaaaacaaaagtgtgttttgtaaattttatttttattttcatttattgattatattttaagtcgggttcggggtcgaggtctaggtctaggtctaggtccaaggctgggatcggggctaaggctcgggccggagtcggcagggtccgagtctaggggcggggttcgaggtctgggtcgggtctagttttgggttttggattgggtttggggtccgtgctccgggtcgggtccaaggtctgtggtccaaggtctaggttcaggattcaagaccgagtcaaggtcggggtttgagttggggatcgggttaggattcaggttccatagtctaaattggagtcggagttaaaaatattaataaaaaaaactattaaaaaaaattgaaaatgacttttttttcaatgtttttaaaattttgtttctcaattgaaaaattaaaatgaaaaacatttttattaaaacataattttggaaaatattttcacttttctaattttaaaaacaaaataatgagtaaaaaaatattaccaaatgcactcttaatttcaaatgtattctatctctacttacctgcaggggcacacggggtgggatcatgtgggggcacatgaccccactccacttttaataaattaatttttggacaatttttatttatatacaagtaaatgtacattattaccaaaaatgtgtaaaaaaaaatataataacataatt

SEQ ID NO: 61126 - DNA, 844 bp, Cannabis sativa
atcttcataaagtgcaagtatgttagcataatttaaagtatctcgttatctatgaccatatattcactataactcttcaagagtatgtgtgaacttctaaattatggatgaggggttcctagaacattaatatttatacaatttattgaatcattcatgtgtgtatatacaatattattcatataagtttgaaattttaagtaatatggacaaatcacattaatgataatacaattttcatttgcgatggtactccaagaccatatatttgctccatacttattgtatgatcttaattttcatatcaaatgatcatatatccataatctttgatgcatataaaatacttcaggacttctctactaatacttgtgaactatatacatttaatattcctcaataaacagaaagaaataaaagtttgttcttcaatcatttataatataataaaaaaaaactcttgaagagtctatcacaacgtataatttacgcatttatactgcatagacaatcatacgtgtttttcaaataataatttacttacatgtctttatttcatacaaagatttttatcatatagtgcgcctgactttgaatttataccacttaagaaatacattaaattcttctagaaattttagataaaacatatttcaaattttcaatatattaggagctctatattaataacttcttgttgtaatatttatgtaacacttatacatcctcataaagtatattctagactataatcaaatcatgattatattttctcaatatttaagtcttatttcaatcaatctaatatatatgcaaactctgtacaataattcattatgtacaa

SEQ ID NO: 61127 - DNA, 1213 bp, Cannabis sativa
tatatatatattagcaaagaactcaaggttcacccttagagtgtaacaaatggaaataaaaaaaagagtttgaatgatgatattaatggtagtgatatttttctatgaaaaattagaggaagataaggtgaaggaatcaagagatcgctagagagtgtaattcttttggtcttaagtgctaatgaaaaaaaaaaatatataagagggaaccactatttataacctttagaccctaaccacctacgctacttactaactaaatcgtagccctcttaaaaaaataattcaaataaataactaacctttaactacaccccactattcattccataatctcactactgcgtatgacttctcctttgagtcaaaccatattcccatcatttgttgattctttaagatttattctccaaggctgccacataatcactatttcctaactaaatttttaaattttaaatttgctcccttaattcctatgtatacgtgtccaagctaagtagattgaagttccctttgtttttttttttttttaaaaaaaactaatcctcattactaagctatatatataatattcctatcacaataccttgactcattcttagcatttggccacgttggcctacattaatttcaagaatgtaaattaatataacttagctcatcataactatttttttaaattgtgatgctttaatcattttgaattctcaacaaacatatgcatcggaaccattctcccaacaaattctatatgttgctaatttctctaactatttcatttattaagtctacacatttcaaaaatactagtacaaaggtcatcttctattactacacataagcactttgtttacataaagctcggttaccttaaaatatcacttaactaaaataatttcctgccaaaagggaccttaatctctatagctaaatttccaaagtcctaatacatatcacttagcacttggtccgaacttgctaacaaataaaattattttcttaatctcaatggacaatgtctaaatctattagtaacccatggaaaccttgtttaaaaaaatatcataattctcataacttaagaaaatactatttaaaggataattgacatagtttaagcaatctactatctccacatcgagttaactaaaatataaatttatatataatatataacatagtaaagaataataacaaaatatttttggtt

SEQ ID NO: 61128 - DNA, 1124 bp, Cannabis sativa
tagctcactgagaatttggaaaaattttaaaataaggaaagaatttgggaagcttttatttgcaaactggacctctaatttttaaaatttatgaaaatgaaccttctacatcctgatatttcaaattgagttgctaattcatatttgttaattataatcctaatcaactcaatgcttaaacttcaaatattagagatgtgaatgagtgatgaaagcaactttaagggaagaagaataaaaatatatggcggtaaaaattttcattgaataaaaagtattttctttgtttgggtttgaaaatttttaggaaattattttaaattttcattgaataaaaagtattttctttgttaacttagtattattatcatacaaaactaatattgggatagaaataatatatggcgattcaaccccaaaaagaaaagattatttattcttctcttaaacaattttcaatccctgaatgaaattaaagaccattctctaccattcgtgatccccatttcttgtaattcttctttcttctcaacgattcgtcggtgaagagatcgacaaaccaaatatgggtgttgagatacggtacgacatggaaggaggagaggataacgatccaagattgggtcaatgtggtggcttacgttagggttaaatgacgccattgattctacaattctactttctcttccaccactaacaattaagttcaattttcattctgcaatcattatttaacccaacgattgtggatgaaggaaaatctccgtcgattcggcttgcaatgattgtggctgcctttctttttaaactgttttctccactttattttcttcttcttttaggtgccatctttcgtacataaattgttcttgcagttacgaagtattaggacaagttgttaggaatatgttaattcagtttgttgttaggtttggttagctaccaactgtctctagttggttaagtctgttaggtatttgttactcttgattgttatgtatatatatcaaacctgtaactgatgcttaatcaataataaagaggcttctttctctcctctttctttctttctttctcttttcttctctttctctcgtttctgtgctctatttcaatggctaaga

SEQ ID NO: 61129 - DNA, 813 bp, Cannabis sativa
tttttaagtatttcccaagattttcggaaacaaaataagataataagaactgaagtaataatggacagagaaagtattataagggacacacaggtttttacgtggttgggcgttaacaaaccttagtccacgagtcacttttattcagtaatgtataacttataataatctctcaagtacacatacacatagtgtatattcgtatattcgcctgagcaaaagtacgtaagagaattcaacccctaatccatgagattagttgggtatttatagtgattggagaattacattagtgtttctccttttccctctattagggagtttacaactgaataatgtccatgggctcactcaggaagtccagcccatgaaggatacaatttgttgactaagagaatcggtcttgagttgatcaagtcaaaactgtatccgatcataatgggagaatattctgaaataactgcattgcgcttgttatgggaggtttcctctttacttgcgatatgatattatttcccaatttgacagctgttgtttccttatttataggggaaacaaattgggaaatcgaaagagtcttccaggaatgatgcatcttccccctccaagctcatgactccgaaactgtcttctgggctcgatttgttgaaggcgaaaggtatcctgagcacggaaccaagataactctcagaaggacacatctggatgggcttggctcactttttccattattgagggtcccactgatgggtctggaatgctgatatggaatccatgtgtcccattctggaaacgcggatagcatttaccccc

SEQ ID NO: 61130 - DNA, 1998 bp, Cannabis sativa
gtctttatggaaccaaaggaataaatttgttcataatcagtatacggttcctccaaaagaagtgtatgattgggctcttatttttttctttaagtttttggatgctcagcaacatcctgccacaggtttccaatcagctcctcgttcgaatccagtgcagtcatattcttctacagggcttaaacttttcacagatgcagccattgattccaataattggaggcacagtatcggagtggtggttttagatgctgataatgcagtcaaagctggtttttctgctcctttttctgggttggtgccacctgcggttgctgaagctaaggctatttttcaggaaattcaatgggctcagatgatttctctccctgtagatgtcttgctcacaagtattaagaactcttgtaattggaataatagtgtgttagatgatgtattagttaatattaagaaattgtaatctttcagtccaaggctagctatctcttacatccctagggaaagtaatgttcttgctcataatttatctaagctaggccttggattagataatgagttagtttggaatggttctttaccttccatttagcttgtagctttatttgctttgtattgcttcctgttttaataaagcacaagtatttcaaaaaaaaaaaaaaatctacctagagttagtagtttatttataggcaaataaagagaaaaaataaaactaacaaagtggtttatagttcaattgttaaatttattagagattatcatgaaaagattcatgataattgttcatgcgcatgtagaaataaaataaaagagagtgtatttataaagagaccttataattttacctatggggttgatgttacaatattcatcaagcaatttgataatggaatggggacatgtgaagtttatgcatgtttggtgcctaaaatatgagtataacttatacatgtttggtgtctagtgatagtgcataattttgatatgcttggtatcaaaatttgtgaaaaattaattgagaaaatgtgaaaattattcttatgtgatttatttttcgaatcttaagtatactttaggagaaaagttgtcatactaaaagtagaccctacaaggtctcttaattaacaaataaaccatgaatgctctttttcttcttaaatttgtccttccttagtgaaactcatcataaataagacatagccttacttagaattttaattgataaattaaaatcaattaattgggtctacatgacaatattatctcatgtagtgtggggaccctaagcctatataatcaagctcccaataagtagttctagaatttaccaagtaaattatctatcttattaattcttcctgactcgactatagatttgaaattgcactcttgattacatagaatgctctattcaccaagaatagatacgttatgaattatacattatttcaatctaaataatcaatgatcctctataaacggtctacattgagtagggacaaaatcactgttttacccttcaatgtattttatccttaaaacactaaactacttctaaataatatttctagaaactaatataattactaatatgagtactccaccatttaaactcgcttagccaagctataaggaaaccatcgtttcacttctaagtatttatagaagctatagatttcatatctatgattatcgctcacactcaattgcactaccgtgttcccaatatgtaagtctatgtttataggtaagttgtaatgaacaagtcaaagaacacgtttgagttggaacctaaccatctcatgaatgagatcattgatctaagatcaacatagtgatattgacttagaaaagatattacagtaagtttacgatatctttttcactgtgaatatcaatccagtccgatacaagttgtaatgaccgctctagtaatttggattagtaaaggcaattagcactaatttatattattttattattatttatgaatttatt

SEQ ID NO: 61131 - DNA, 660 bp, Cannabis sativa
aattttcttttaagaaccgtgtccgtaaatatttaataattgaaataaatatataaaactttaacacacctccaacggctttcatagctcagttggttagagcacccgtttagtaagcgggaggtcttgagttcaactctcaatgaaagcatagtatgattttttgaacaattttccaaaatgagtgcgcttccagtttccaataagcatatcaagatggttgggaaaatcattttcagaacttttagttttcgttatatacaatattaatgctaagaaccattttcttcgttcacatcaaaaatttacaaattcaaaaaagaaacaaaaagaaaaacaaatgaaaatagagtgactccttttttctttcatttcatgtaaacaaatcagaaattggcattattgaatcgagtaaaaaagtacataaatcgaaccgttgaggaaaaaatatggcaagagatacaagactttgtagatactaaacacctatcaacttcttcattgctttaaaacacaacggttttgttttcctggtacggtaacactcgcagctcacagtaagattttatcgcctttgaaaggcattgtttctcgaggttctctgatttctgcacaaagctctgcaagttatctctgtgtgaaactctctcaacctgcata

SEQ ID NO: 61132 - DNA, 1444 bp, Cannabis sativa
ttttttaaattttaaaaaaattatcttaccgattaggcttcattcaaatttcaaaaaataaacccaataattaaaccaaaaaataaacctaataactgtacaacgatttcttaatttgaatttgaactaaattaatctcttttaattttaattttaattttcaaataaatttttattttaatcaaattaatttttctttaatttctcctttaattttattttttttaattttaattatacattacaaacttaataaaattataaaagggttgcacgtggtaaccaactagtaaagataattgatatacagatatatacctaatttttggatgattgtccaccgtaagagcaccaaaaaattaattattattggagaatggaatttgttcacatgttaaattcatcaacgaatttgtattacgtgagcactagcagggtcatttcatttggtattaatttctttttggaaggaaattcgtatttttttattattatttaaatagtgaaagttattcagaataattacgcgaccaatattctttgtttcgcatttatagaataaaattaataacggccaaataataaagaatatcagtttcaaaaataataataataataataaagaatatcagttttaaaaaaataataataaagaatatgaaagctttaaatatgcgaaatagtctgtagattcttttttcaatgggctggcatatgtctcctaatttgctagtgttttcttgatatagtcggactagatttcaagtgaaccatgagtagtgtatttttattgtatctttttcaccgttcgtttttttttttaacataaatttatcaattttattgaaatttaacattcatcatccaagagtatttaaagattatcagggacaacattcccgtgaagactacaatcagagaaaaatcaagaccacctagccacaaagtgatgcgactcgattagctgatcgtctaataaaacgaagactaacattttgtagagatgataataaaaatttataatcattaataatcaacccaaaaatagaagtcatttgttgcttactaaagattacttatactgtaaccatactatcagtctccaccttgactttactccatcctttgtcttttagccaactaagagcctctttaacactaagtgcttcgatcacctcagccgcgcgcataggaaccgacttggtatttggatgtgagatcaacaagatgcctagatgaatcacgagcaaccacaccaaaaccgtaagcattttctttctcaaaaaaggctccatgcatcaacattgatcttgactgtacttaaatcgtgtttaggccattgctcaattttattatcattttgttggagagacaatgataataaactattcttatcttgagctttacaccaatgatcaagtgtaatccatgctgatacgagaac

SEQ ID NO: 61133 - DNA, 973 bp, Cannabis sativa
catgcgatttgaacttcaccgtacagtgtatggggagttcttgatgactgggttgtagattggtccgattgagttttaaattgaatttttggtcggttggtccgatttttaattctaaacccatttgagaatcttctagaccatcacgatgggcagtcgattggacgaggtcagtgagtcaaactacaacagagtcgtttggtaagatttattggtcccattggtcaattcgttcaagcccagcacgattaacaatcaattagtcgaggctcttcaatacgatggagaacgattgatccgactggtccgattcgttcaaggtcaacacgatttgtagtcgattggacgaggcgagcgagtcgaactacaacaaattcgttcagtaagattttattttaagctaactcctcaaccacagttcaattcgattcaattcatttggatcctttcactttttgtttttctgttgtagagagaacaataagaaaaaatagaggaaaaagtctgtggagggagtgagatttgctatagctataggaagttagaaaattagagttaaagtaatatgtatttttcatttgggagttgatataagtcttgtatgtacaatatattgctgcaactactattggttgtaggaaacttttttatctgtaggagcagtatttgcaaagtattacttaaaaattgggtatttgttaaatgtcaaataagactttcgcaaagctttggattatagcttctttaataaggtcttataatttttattttttataaggtaggaatccaatcttttataaaaagttttaacaattaaaaagaaatcttttatttttttacctaaacactatcaatagtgtttttttttccataattctataagaccacttgggctacaaggttacagggatcaaagccctattatatcttatcaaaatagaattatcgattttatgctaggtattttgagttt

SEQ ID NO: 61134 - DNA, 677 bp, Cannabis sativa
ttttttttttttttaaggaaaaacacaatttattaaaataaatttgctcttacaaaaaaaaaaactcaaaaaatatggacaaacatcattccatacacactctcctaaacaagtaacagatgttgcccaaataacaccattcgcaagttgcgaaatggtactgcaagaaccaccaccaatagcagctaataaaaaattaatatctaataaaatagactgaaaactaaaatttgagtgaagaattaatccaaccaattgcgacagtaaaattactactaataatagagatactgaaactaaattggtgcacaagagtcaggcccagtttaattgcaagcacatctgccacattaacagaaaattcaccaaacacaccagatgatcaagccagccacaccacaccctcagcattccgtatcactccacccaatctgacaaagcccctcccagtaatcactgaagcatcaatcacaagagtaaagggatcaagaggaggaggcatccaccgagtaggtcatttttcaactgggtttgaatagcgcaatcccaaatgaagacccttccgaatatgctctttgaattccgacaaatgattataagctaattttagaacaacatctaatcttgacttcctattaccaaacattactaagttttgatcatactaaagctaccat

SEQ ID NO: 61135 - DNA, 603 bp, Cannabis sativa
tataatcaacgattgcaccattagataacccaacataatatactggattatgataagtgttcgtcaaacaagatttagtacgagtaatatgatgagaagtgttatctgcatttttacctgcataacatgcagcgaataattaaggagagacgagaagtcactaagctgcccaagggtctcactcagtgatcccagaggattaaggctctaaacctgtggacaaatcctcacagacctccgcgaggaaagtcctcacaaatgcagaccttaagggaggtatccgcgagtcagtaaccctctcctttggaaggcgagaccttttgctcccgcgaagatcgtgggccttccatcaagatgtattggttcggggtactcctttaacctgaagaggttcggtacgcaaatgccagcctgagggcccaccactcgctcatttcctatgtatattgtcagaggtacttgtctctcacaccacatagagcgtgcatgtccttatgtaccatgcaaaccaatcgaataactaggagcaagagtaatttaaaatatgagaaaggccctagagtgacacacgcccaccgtcagtacagccagtacaatctgaca

SEQ ID NO: 61136 - DNA, 724 bp, Cannabis sativa
tgttcaaaaactaattatcttattcttttaattttaatattaataaaataataatatattattagtaactacaatacatgaaagaaaagaagaaaaacttaataaattaatatatatgtataacagttggtttcagttttttcggtcggtttattaccaaataaactgaccattcaatggcagttttaaccgttagcgattttttttttattttcggtttcgtcagtttcgattccaacggtgttcggtaggtcagtttaaacagtttcttcgattttttagattttatgctcagtccaatcaatgaaaggatgttcaaaaaggtaacacattgatgtaagggagtctacttcttcctctgccggtagtggcaactggcaaagcattgaatttttcctattgagaacatgattatgtgggtgcttctattgttcgtgtgaataataactttgagattggttggataacgcgtgaccatgaaagaaatgtcacttcagttaattcaaagttgttacttggttgtgtacaaccgattatgacaattaacagaagttatgggagtcaaagagattcctagcttgatcaaacattaaattttttctcaaattgttattgaaattgattgtcaagttgttgttcatgcaattcgtcatactctctatatgtcatttctatttggcttgatcattctgttaggctatttttagcctatgttttggatcta

SEQ ID NO: 61137 - DNA, 1160 bp, Cannabis sativa
aagagccttttcttcactagacacttctctcaagacttcatctccaaggttgagaagaatggcactgtgagctttagattcaatctcaaatttccttttcttgtcatatatctccttcatagcctcgatatccaaagcctctacaattccctgatgaacaagaaacgctttcattttaatcctccacaaactgaagtcatttgtgcctgtgaatttgtccacctcgaatctggttgaagccataatgtattaatcttgatttcttgcacagagttcttgaaactaatccctgatctccctagtgttgtgataccatttgttgtgcactcaagcaccaacaagaacacaatgcaagaataaaatggcttagaatgataaactagaaaatgtatcaaaccagataaataaaaagacagtgagaaataacgaggttcagtcacaagttttggataaaacttggacctaatccccgagtagaaacaactctataggctgtgattactttattaattaatggcaaagattacaacttacatcaatagagaatcaagtgcacaaaatagaactaatggtgattcacaccagctacaacaagagcttcaaaaaagactgtcaaattctttgaaccagaaatagtcttgtactaccctcaatcttgaagagaattcatctctgttcagctctcatgtttcactcttgtgcaatctctctctaactcgatttctctctattcattctgctgttgaatgcctttatatatagcagtaggttaatgtccatttaaccgaaataactaccaatcgaaataactgccaactgtcaaggcagttaagtgttctaaacctcacaatttccacctggtttagtacacttaaacaacatagtaatcaatgccataaaagtaaccaatataactgtatctaaaatccaatgaaagtgaatctcaatgtgagattctagtttgagttgatgttgagcaagtcaagacaaagtctaaacttgtctctagtcaaactctttgtgaatgcatcagcagggttctcatgagtgtcaatctttcttactgagaccattttagattgaatcacatctctaataaagttcattttgatgtcaatgtgtttagttctctcatgaaacatgggatttttcatgagatg

SEQ ID NO: 61138 - DNA, 1272 bp, Cannabis sativa
gttgtcttctcacacaaattggctaccaaacttgatcatgataattacctgttatggaggcctcaagtcctttccgccattagaggccacaaactccagcattacatctctgagaaatttactcctccacctcaattcctttctgaacaagatcgaattacagagaacttcaacccggcattcttggactgggatcaacaagatcaactcttgtattcttggctgctattttctatgaaagaaccagttcttactcgagtcattagctgtgaaacatctgcaagattatggtccgttctgtccacatactttgcttcacaaacagaggcgaaaatcgatcaattcaccactgaacttcagaatctcaagaagtgtgctcatactctcaatgagtatcttttaaaggtgcgttttctaatcgacaaactcaattctgttgggcataaaacttcaccaaaagaacatgtagctgctatttttcgtggtttgccttctccagattacgacacatttgtcatctccgtaaattcaagagctgaaccacttgatgttactgcccttgaagcccttcttctagctcaagaacatagaatcgaaagaaagaatagagatcttgattcagcttctgtcaacatcgcaaactctaattttcgatctcgaagcaactctggacagtcaggaaataatcactggaattctgggcattcaggaaataatcagtggaatccttatgcaaacaatcgatcaaatgggaactcaaatgtccctccttatagaccaccaataccaggagggagaggcaatacattcaattcttttggctctacaggaaacaccaataattcgaaccgtggcccaaatcaaaacaacagcaagatcgtctgtcagatatgctcacggactggacactatgcttcaaaatgttaccaaagattcaacccttctttcccaggatttggatcacaaggtcaagggcatccctcggctatgttagccactgcagaaaccgtgagtgatgaatcttggtatccagattctggtgcaactcatcattgcacttccaatgaagatcatcttgcacaaaagaatgaatgtcaaggaaatgagcaagtgtacatgggaaatggaaatggtctgccagtacaaaatataggtaaaactcagattctgagttcagataagtccactgttcttactttaaataacttgctgcatgtacctcaaattaccaagaatttaataagtgtttctcaattttctgctgacaatggt

SEQ ID NO: 61139 - DNA, 779 bp, Cannabis sativa
actggccatcttgaatatgatttatgatctttatataaaatcgagaagtaaatattaaaaatgctctaatagaacaaacatagattttgatgtaaaacgagagtatttacatagcatgtgtgacatttaggttacgtacttactgtatatatgttaatttatttcaaagatacaaatatataatatatgatttaggattttaatggtctaagaagagttgcggttatttctataatctgtcatcacttaaagaaagaaagctcatacattgcattaacgtaactgaaacaataagattcatatatttaatctttcatccatattcaagcaacattaaaacttgtttcttttatttttttgcctattatttttatttctttccaatcttatttcgattaaccaaatataaacataaatctagttaagtagtagtcaattttaatttcctgttgtttgacctaacctacgtgagtactgctcgatacgtacacttgcgtagtttataattttatgcaaaaatataatgaagagaggtaatgtgacggtcttgaagattgtgtcggaacatgacctggtagttccattcacaaagacgctactaaaaaaaatcttttatgggtcatataactaatatgggactaagggagatgcccaatttgcttttagggcacatgggagaatgctagggtttatgccctaaaaatcatgtaaatatatttctaattattaataagagttgaatattttgatatatgcatgaatgttaaattattgatatt

SEQ ID NO: 61140 - DNA, 1239 bp, Cannabis sativa
ttttcatttaagagaaaaataaataataaaaaaagaatatgaagcttatacaatgtttaaagctagatgagatgaaaagaaatatcatcaaattattataaaagactaagaactcttaatagaaccatatatattgttagcatgagattaattatgtattaataaaaagttatgattaatattagtggaatactaagagattggtataataataatggtgggagatataacaatgaaaatatgcccttaataatgaatgatttaatggtaatttattttacatgatttacagtacatatgtccattttaataataataataatataattaatgatggtgataagattataaaaatataaaaagataccacatatctatcaaaaaataatttgacgataatttttttttttcatttgaatttttctatttgagaaaatctcaaatataatactgtcatatatagtatatagttgtttttaatattatacatgaatatatatatatgtttatatatagagataaaaattcacatttttatatatttcataagaaagtgtattattagaattacatttgaaccgatgagttatacttttttatttttatttttttattgaatttgtattttaattttacttcattggtgaaaaaatggttttaatttctttcaaaagtgataaaagtagtttagataattatattagaattacatcattttaaattagaagatttatatgtacaatattaaattattattaaatccttttgaaataaaaaaaaatattaattagattaaatattatgaaatataataataataatattagaaagaaatcaccttgaataataatcaaatttatatgtttggacttttatttaaaggtcaaacatgagctcttcttttcactacgtttttatattagttattttaaataagcttgacatattaaaaaattatataaataatttacaacaacaactaaactaaattaataaataagaaaataaaaagtattaaaaggcaaacaattagatatataaatatatatatatatatttacttttcttcaatttttagagtaagaacatctcatgatttttttttctaaaaagtttaatcctaatacaaattttatatgaatactaataaaattagttagaagaacaaagaaaatgaataataatgcatatatttatattcatgagattaattagaaggaaaaaaaaaaaataataatt

SEQ ID NO: 61141 - DNA, 880 bp, Cannabis sativa
  modified_base (358)..(361): a, c, t, g, unknown or other
acaaggactaggaccaggactaggacctaaactcaaacccgaacgaagatcaaaacccagacagagacctaaatcttaaccgagaataggtatcgaacccgaacctagaccgggacccaaacccacaaaataactaggacttggaccaagaataaggatatggacctgggaaacagaactaggaccgggacctagtacccaacccggacccgacctgaacctaggacacagctcgtgacccgacactagaaaatgaacgagactgggacccgagattgggatccgaatctggacccagggctaggacaaaacccatagtcgatgtctggatttgtgacccagccctagacccgaaccnnnncaaggacccgaacacacacccggaccggaacctagtcccaaacccaaaagtggacccaaacccataccttgtgacccataattggaaaaaaaaacaggaagttgaccgggactggaactaggacttggacatggaatcataactgaaattggacgtagatccagaaccgtaaccagaccaggacccggactccaaaacaacctagacctaaagtgggagccggacaaggatcccgacccaaacctagactcgggagccgatcgcgaacctgaactcaaacccaaacatggaaccagactaggaacacaaaaccagggtcggacctaaagccgtacccaactctcgttcccaaacccaaactcagaaatgggacctggcacctaaaccagaaccagaccgagacccgtgacagtgatccagatcttgactcgcgattcgggtcactggtcctggaacagaccagtaggcggtgtttagatctgggactcaaactaggaccagaacccagaagaagaacca

SEQ ID NO: 61142 - DNA, 934 bp, Cannabis sativa
aaactctccagggcaaggattattctaccatgctgcaacaccaaatcccctccaacttcatgtctttgctgatgcagattggggggcttgtccaaattcgaggagatctatatcaggctactgtgtttttttgggcactctcttttgtcatggaaatcgaagaaacaacaaactattttcaggtcctctgttgaagctgagtacaaatcaatggcacatgctacctgtgaactcacttggctcacatccatactcacagactttgatgtttccattaaacttccgtcagtgctgctattcacattgctaaaaatccagtatatcacgaaagaacaagacatgttgaaatcgattgtcatacagttcgagagaagatcacaaatggaacactctaaatgaaccatgtcccttctcaaaataacttagtagatgtactaactaaaccattcttccctactcaattcaacaacattgtatctaagatgggtgttaagaagttttacacaccaccttgaaggggcctattagagttagttatttagttttctgttaagtttgttattacttagtcggttagttagtttaaccacctcctgtattttaactctacaaaagctctgctcttgtatcattacagttaagttaatacaaaattactttgctttactctttttttttgatttttttggggaaattttcataaatatgggaattgaaggtataacttacttttttatggcataaataaataacattatagggttatgggatttttttttaaatatttatatggattttttatgccatatttttgtaaaaaagttgaaattccatatttgtaaaataataataagttttgccagaaaagtcgccatcaccgaaaaagttagtgtcgctgaaaaagtcatcagaaaagtcgtcgaaaaagtcaccg

SEQ ID NO: 61143 - DNA, 773 bp, Cannabis sativa
ggatttgagtagtttgtagtgatcggacggtcgtactttacgaggttgataaggtcggttagaatccatagctggcctaaaaactacaccgggaaactccgtatccattgagatgtaaggatattgatcgatgagttgtccgatcaaatcgaattcggattccaaattttcggcccaaacttcccgaatcacaatcggtttgggattagagattaaatcttgcttaaacatcttggaatatattaattgtggatgagattgagaatgattttgttgttctgtatctgatttgggtgaagagagagttgatatatatatatatatgtaaagaggtaagtgatgaaggtgggggatgttgcttggaagagagagagagagagagagagggttcattgtaagtggagaaatgagttgaacgcgtttgcttttgactaaaacaagtaacggatcagacttggtccgtctttggctcctctctctctctctctccgcctataattatcttaattttaattaattaattaattatattggttttggatatttgggtaattgggtttccttcctttttcgaacatttctttcacgttttcggctcaacttgagaattgggatagtggcaaacaaattaattatttaatattctttctagttgtattacaaagttttagcacgtgtcacaaccaacattttcaatttttcatgacttacccacttgtaacaattttgttcagattgcataaaatatttattattttctctgattttataat

SEQ ID NO: 61144 - DNA, 1423 bp, Cannabis sativa
  modified_base (27)..(37): a, c, t, g, unknown or other
  modified_base (64)..(74): a, c, t, g, unknown or other
  modified_base (102)..(112): a, c, t, g, unknown or other
  modified_base (460)..(461): a, c, t, g, unknown or other
atagattttaaaaaagaaggtaaaaannnnnnnnnnnaaaaagaaggtaaaaataaaagagaannnnnnnnnnnagaaggtaaaaataaaagagaacaatannnnnnnnnnntagagtgtaatttcctctagaaaaaataatatgataaactcgttcaaaagaaagaagaaaaaaaaacaatttaattttgtttagcttttattatgtgactcaaccacaattacatcttaactctttggtgtgcagtgtaaataagcccaataaatgatgcaacttaacccattaattcaaatggcccatggacccaattgaaggctttattcgatgggcctttcataattcagtacgttggatttaaaatatggatttttataaaaatactgaattttaggtaaaaatttataattttactgtcgaattttttttttataaaaatactgttttttttttatttttttnntattttttatttttttataaaatagccgtaaaacaataaacagaataattgaaacaacagtagaacaactaagaaataaccgtgaaaatttgacaccacacagtataaaacttatacaataccccacagtaaaaaaaattaaaaaaaaattagaaatttcaatatatagtgtaaaaatttctttaaaatatttacaaaattatttttggcaaaataatttgtgtatataccgatccacactgaataaaattagtggctatattgataattcttaattctttctccttctaaatatgtgggttgttttgttttttgttttgttttttatttttttttattttataggaattttattaatcttttttgtttgtgaacaaaatagaaattttacttgaaatcatcactgagcatatttcagttttctttttcacttttttttttttaaaaaataaaattatatcaaaacgatcatcttaaaaaataggtcacaataatataacttttgagctcaattaactagcaatgtgatgtaatttttttaaaagaaaaattaatacaaaaagagataaatggatatacatttttaaaaatttatcgaaattgctctattaaaaaaagattatgtagaacataagttaaccacttttaaatatgaactaaccttctttcaaaaaaaaaaaaaaaatatactttttagtaacttataaaattagttagtatattaaattagtttatgttaaactttgattatttttttatcttttttattttgaacacaaattatttttcttttaatgaatagaaaaacaaaattaaaatgttacatttggttccgatcacattggtttttttatgataagaaactatgcttcttatatatcaatataataacttttaaagaaagaataattacataagacactattttttttaaaatatttacatttttacgttcaaaaaat

SEQ ID NO: 61145 - DNA, 1032 bp, Cannabis sativa
acagtcctcaggtatcttctttaagctgacttgatttatcagtcagttgttttggcattcattttggttgctttgcttatatgtaaaaagaatgaaatgaaacgtgaacttgtaagccttttttcttgtaggcaaagacctagttctactactaggcaattgctgatggtcatttaatattgttataaaatttaggaataccatacttctataagtttcaaattctgtttatggtgcctcctttttcaggcactgagtaggaaaaaacgaagatttatgatttatgttcactcaaaaggcatgatagttgatgacgagtatgtaatcattggatctgccaacatcgatcagccctctatggaaggcactagagacactgaaattgcaatgggagcttaccagccccatcatacctgggcacggaaatttcgtaatcctcttggacaggtaacttctgaataggtgacatagggctttggacaatttattagagtgctaatatacagtcgaaatttttcagttcaaaattttattttctcaacatattagtaaagaaacgtgttgttgccaatatgttcattaaatgaaaatcattgtatgtagtttgattttaaaagattataaagcaagggcttggttgtaacatatttaggatatgttttctatactgttatgaaaagaataaaaaatggggtttggagagggagtggatgaatgaaaatcgagacattagttagttaaattaactaattatgtgaggaatcagggaccttgtgcctgaatcgttaagtaaacacttaattagagagaaaattgaaacaccagtttgacttctatttcctttactgtttgttcatttctattaggaaacatagccttaccaattgtgaaaaaacaaatttaatttcgttgctttgataataattttatttggtgttgtgaataatgtgtggttggcagatatacggttataggatgtcattgtggacagagcatatgggaactatcgacgattgcttcacacaaccagag

SEQ ID NO: 61146 - DNA, 960 bp, Cannabis sativa
  modified_base (679)..(679): a, c, t, g, unknown or other
tttttcttctactctaataacgctttttttgtccataatcaccaccttcctgtggaatcgaccgcccgatctatactacaaccaccgctagtggaagtcacattttgggcgtaaatcaaattttggcgccgtttccggggaggtaatttttttttaaaagcttagtgaaatctacaatcaagaggttagtaattgttttatttttatattttattttcttgtgaatatcttcttatcttgtgtaaatatttttgaaaaaaaaaattcaagaaactcaaagtatgctctaaggttgcggtgttatctgatcttccttatcagaaacgatttcttgatataaaaaaaattatttcctttaatttttatttcattctcactttgacttttatttagtatgatagttcatatcatgttttagtttttttttttattttttttttattttaatctttttctttttatttctttttaatactcttagaatttaagcccttaaaaaaaatcataaaatacaaaaagaaaaaaaaaacagtgagttctaattaattttttttttctttcataaaacgcttagtattttgtacaacaatataatattacatatgacgcaaacaaaaattattctgtctagaaaagttggtttttaccctccaccttacctgggaacctcggttctgtntaggcaaggttgggacgaagcggtaccttggtaacctttccaactagcctgggaatatttttgtgttagtcattgtaatattgtatttttgtgctctttactataaaaaaaaaataaaaaattattaaaaaaaaaagtcatgactaaaataaaagaaaaatgaatgaagaacagttgcaacgttttgagctttattttccagcatactatgcttcatgtaacaattttgcaaattatagtactactgattgtactaataattttaatggtgtatttcaact

SEQ ID NO: 61147 - DNA, 617 bp, Cannabis sativa
aaacttaatatatacatatatcatatcgggacgggttttgggtgggaatctattcccccgccctgtttttgactcgagtatgaatatttaaactcatacccgccctgttcccgaaagtcaacccccgtccctattccattagaggcgggtacctataggtacccgaacccgcaggtataattcccatctcttttttgatctcatggttctaagcatatatcatattttggcatgtttatttactttggaaagagaatcaaggtatgacaataatccttattctattgtttattaaaataagaaataaaataaattgtattttccacatacatgggaaaatttattataatttaacataaatatataattcaaaataaatataagaaccaaaaaaataattaaaaatcaaccaatgtcaatatatcaatatttatatagatgggtgactacttaatggttacatttttattgtaaccacaatagttacattattttacctgtaataacacgtaactaataggtaaaatttctttttttttagaattactttaattataattacctatgtgcttaaaaaaatcatttttaattagacattttttagcaattactatata

SEQ ID NO: 61148 - DNA, 740 bp, Cannabis sativa
atagagcgtgattggataggagcttgccacctgggagggagggagaaaccaagagacagtgaacaaatccaaagaaaaatagaagaaagaggcggtgaaacaaaatagcgttttagggttaggttaattaaatatattttttaattaattttatatttatttaagaaataattaatgataggttgttaaaatatataatttttaaaatacaattatgtttaaattaaaaaaaaatatacacctaacgtgttacttgttttataattaaaaaatggaaagaattaagaggtgtctaaattaacatttttaagcctaattaaaaattaaaaaaataagaaaattaggtagagaataaataaaaatatttaaattaatatttttaaggctaattaaaaatctagaggtatttagattaatttttttaaggctaattaaaaattaaaaaaatgagagaattaaagaaccaacaaatgctatttagagagattttagggtgacatatcataaatagatagatatatagatatgatatttagttaagatatttttattatagatattttaatataaatatatatatatatatatattaatttttgttagagtgcggcagttgaagaagatatgtggtgtattttttattttattagtaaaaaaggggaaaaaaaatagatttgtgaatatttcaaatcaacaatctatatatataaataaaggaaagcacaatagaggtttaggtg

SEQ ID NO: 61149 - DNA, 869 bp, Cannabis sativa
taatggtatttaagccccctgatatgaaccgattccacatttttccctctcagttttgctcttcttttcttatttgctctgaacttttgaaattttaaactctttctagatttcttccccttttcctctataaactcaatcctcactagtttcagagactaacggattttatcaaagagaaatcgacaatctcaaggttagttcaaaactgtttgcaatttttttttattctgtgttttagggggtagaagatgtatgatataatagggaattttcataaagccttatttttctacttaaaactgggtagttttctggagaaaataggcctgaaatttgcataatcgcgagtttcaggaagaacacgttgagtattcgcatctttcttatttaccatcttaaatactcgcgagtattgagatgatcatctcgaatactcgcatttatatttttagaaaatctggggatttagccaccccaacccttgtttagaacttagggtttattattgccttatgtttcatacatgttttttgtttggaatactggttaggtccttcaaatgttgggtgtactgccgtaacttaatgttcatgtgtgcattcgcatgttccttaagtcactgcgacacacccagccatttgcgacatacggccagttttctcttttcttgcctttttcttttcattgcatgttaagactagctgactttctcaaaacaatgaggattttccattgacctaatgctcatgcaagaaatgcatgccccttgggacactagagactcctcagctgtttcttcaggtacatcattagttgtacatgtgcgatatgttttttagtcgcatgttgtaattgaccagatttct

SEQ ID NO: 61150 - DNA, 2080 bp, Cannabis sativa
  modified_base (31)..(52): a, c, t, g, unknown or other
  modified_base (321)..(336): a, c, t, g, unknown or other
aaagtaaaaaataccgcctggcagtattttnnnnnnnnnnnnnnnnnnnnnngtataccatgtaaatttccctcatcttatccccaaaatttaacatggtatcagagccacttggaccaccagtccaaaaaaccgtatactttcgctgtctctcctttaacctccatttgagaccttttggcctgtgtcagtttccagtgttggatctttaacttgtttcaaaatccaaaaatttcaaatttctagacgtggttatacccaaggcccaaacgtgaggagagtgtattaagagttaatccccacattgctaatgtgtggaannnnnnnnnnnnnnnnaagatgaatgggctactcctcccattgtcaattggttttgagatggaacctcattcatcttatccccaaaaatctaacatataccaaaaagagaatttgttaaaaaatattattggtgtttagtatttttttttcagtgtcattccattattattgtaattaagtatcagtccatataacttaaaaaaataatttttagttagtatcgctaaccaaacataaacgccacctataaaaagtagtagacaccactaatattcactagcaatactcaatttatatatataataccaataagcagtaagtaaagacaatcactcttatcataagttatatgtatttatgtatgtatataaatagagattgacaaaaaagaatgtaataaaattgttattaataatgaattaataattacctcaagagggctctcattgtatagaagttggcggcgaagttcaggcttaaccatgatcccggttggaggctggtccaatccaagtccatatatcaactcatatgcattagcatctcctagctaccacagtgatacatttgaattaactagttaattttatagcttcacatttaatgtgtaattaataataccatacaattcattattgaatataattaggcttacacatcatatcaattatcacgtatagtatagaatgtttatacgaaccatttctcaacaagaaaccctggaagatgtaattgtccgtaggggtggcatttagggtcgacaaacgatacaaattcaatacgaattattgtggattagggttataagaaaatataaatgcaggctaaaattgagtcgagttcgaatgacacgattattatttaggccgggttagggttaacacaagtgacatgaaattaacacgaattgactcgtttatatccatatattattaaaattattaatttatagctaaagtgtaattaattttcataaaaaaaaatataaaaattagaaagaaaaatgctttcaaaaatataagatagataatttatatttgatattaagaattttattcattgtattaataatttatgataaattatttttataaaaattaaatatgtgatacaatgttgatcaacatatatattgtaacataagtatatgacatgtcgatacgagaacacgacaagtcgagttagggttgagatttttttacataaaatatatatgagccgaattaggattgtgttagaatttgaggataagatgaatgaggttttatctcaaaactaattgtcaatgagaagaatagctcattcattttatatataataatttatctccccacattaacaatgtggaactaactctaatagactgttagactaattaaatagatcaacctacgtaatacgtaatacgaacacgaatatgacatggtaacacgaattactacccctcattgttccaaagaaaaatcatataaagtaaagagagcaaatgatctttacttgctttgataaatattcattggttgaagatgaattgccaatatggatcataatagcagccacgtatatggcgatgtggactttgtcagcaaatttgtgtatgacgtccgtgacagatttacccccagcgctatgacccaccactatcacctacaacataaaaagtaaaaaaataaaaatatatatttaacaaataaaaaaatggtgataatagttataccttgtgatttgggggaagagaggagatgaaagaggtaagagg

SEQ ID NO: 61151 - DNA, 969 bp, Cannabis sativa
acacagatttagtaattatactatttgaaatacaaggggtgtttggatatgagatggtaattatatatgaattcctaatatcttgtttggcaaaatagttagtaattacattggaaaataatattttttgtatctaatgtttaatatggaaagtttatggtaattacacaatgtaattacattcaattctcatgggggaccatgagaattggagagtgtaattagaatccttcaattacttccaattatacagttatagtgtaattatatggtcagacaaacatgtcaaattgtgtaattacttctaattacacacaaatttaattacattgtggctttccaaacacactcttaggccatcttcaatggagacactaaaacaccaaatatagtgtagtttcacactacatttacttcaatgggacattaaagctatcctcataaatagctttgtctacagtgttccatcaaatttagtgagacactgtagaccatactattttttaaaaaagagtttttaataattaaataatgaaaaaaaagtaaataattatatatatttagtattaaaatattcttattatattaataaaataataaataatataaaatttagtgtaatttttgttgttatagttagaactaaaaaaaatagtactgaaatagtaatttttttggtattaatttaacactaaatttaaattttttcattagagattcttagtgccaaatttaatgatagtgtaaatctttggtgtgtcttaatgttgtgaataataaaatgaacattgctattagataccagtagtgcttagtattttttcaatatgtcgcgttgcgattgactagcgatattccataaaaactattatattacactatataagactcaataattagttagaccaataaggatattgagccagtattagtgcccattatcatttctctaataaaatggatgccttg

SEQ ID NO: 61152 - DNA, 741 bp, Cannabis sativa
cagaaaagataactcccagtttatagtttattcaaatacactgtctgaccctccaaagctgagaccaaagaaagtgaatcagaaaaaaccttctctactggaagtcccacatcttgagcccaacgtaaacctcctgtaatgatcgcatgattaagcatagaaattagtaaattattaacagtttattaataattatttatttaattatggctatatgtgcatatttattataaagcgctattattagaaaatatgcatatttgatataattcctcaaatacagagatttaattctaggtgtgttatataagttaaatataaaacttaatatttggttggaatctctgagttagttcgttattcggtgaattttttggttaagaactttttctttagactttctgcttcttagtcttttgagatcttgtggcaatttttgtcttgatgttgcttatttcttctaatatttttgtaagatttggacggcttcaaaggcaactcgaactgctctaggacttgagcggcttcaagatcctagcgtcctcgaaatttgggcgactccaatctgagttaatagtaagagattattctttcttcgttgaatatattatacatcttttctcttctcgctaacaaaggatttgttccaggggttgtttattttcttcaactagagctttgttgataattttgaacggaagatctatgcttattttggtgtttggatgctgagggctgact

SEQ ID NO: 61153 - DNA, 1004 bp, Cannabis sativa
ttgaagatagtcgaggccttgaaggtcgagaatctcatatgtcatagtgattcgcaactgattgtaaatcaggttctcggggaataccaagctaagggcctaaaaattgctaagtacttagagaaggttcagaagaacttggaaaagtttgattactttaaaatcgagcaaatcccaagagaacaaaactctaacactgatgccttagcaaaactagcctcgcagagcaatttggatgaattaaacttggttccggttgaagtgctaaatgagccaagtatatgtgaaaaagaagatgttaagatgatagatgtctcacctacttggatgacccctataatcaactatctactcgacggccaacttccaactgacaagaatgaggcacggaaactcctatatacagtacctcgctacacaatagtcaagggaaaattgtagagaagaggttattccatgcctctacttcggtgtgttctacctacaaaagcaaacgaaatcgtcagagaaattcatgagggcttttgtggggatcatccatgttggtagagtctgtttaaaaagatcataagacaagaatattactggccaacaatcaataaggacacccacgagtttgtcaaaaaatgcgacaagtgttagagattttcacatataccttgcgtaccaccaatacaactaaggatgatgacctcgccttacccatttgctatatgggggattgatctaattggggcactccccacagggcaaggggagccaagtatgcagtggtagcagttgatttcttcactaaatggatcgaggccaagcctcttgtctccataacctacaagaaatgtcctagactttgttgtcaaaaatatagcctacaggtttggaattcccataaagttagtatctaataacagaactcagttcgatggtgacttgttcactgtgttctgcgagaggaacaaaataattaagagcttctcatcagtatccaggcctcaggtgaatgg

SEQ ID NO: 61154 - DNA, 1648 bp, Cannabis sativa
aagttaaataaataaaagctttttctagtgaaaaaatcgtaaagtaaaatattttttactacttttttatattaggatcatatgtaataaatgtaaatgcttagaaaattttacggcgaatatctcatttaataaagtgtttctaatttatttattacctaaatttataatatagtttggccccccttaattttttatcctggctccgcccctgatgtcttcccaaccgagcattagacaatccgaatagcgtatcaacacttagcaattttaagacttgcatcgtgaagcacaaaagcaatccctataagtctgggatcgtatcacagagatatggaaagctgtcccaatcccacaatctatgtattctaaatacgtaacatgtattcttaccaactatagacattgtaaacaaaagggaaaccttccttcaagcatttagccctataaatagtgatccattctcactgatatgggggtcgagagaattacttgagagaaatctaagagagcatacttagagatttcattgtgagagcttcaagagaggaaacactatattctttgttcttgagttaatacaatccaaggggagtaggctattaccaaactaacggggtcgaacctctttaaaatcttgtgttccttattgcttattagttcatactttactttaattatattttctatcgcttgctatttgactcattatcgctggctaaaagcgaggtcaacattttggtactttcattgagagcaataacctaagtttgcttttttctttaagtttaatcagacacataagatggtggtgcaaactcggagaggcgtggtcgatcaagtagatccactagtggcggatcctacactgcagaccccaaggaatgcaaggatcccaccagtcactaattctgagcaaccaaacacacaaccacgtactgtgggtcaaggtctgacgtctcctctagttgggatcacactcggggtgcaagagactggaaacaccagttcagtagtcgaactgggtgctcccaacactggaatcccttcagcaacaaatgttcagacaaccattggagatgacactgagatctagaacctccgtaatgctcttgggctcatacaaggtcatactaataccttgcatcattactaggaagagcttcgtgttgcagtgaaccttgcgttcgaagagcaaatgcgccagttcgccgaatggagggacagagagatggaaacgttgaaggcttaataggcagccattaatgaccgaacaagacaagccaccgtactgatacgaagagtctaccaagttgctaaccagcaacctgcatccagcatcccactgggcggcttgaaagaaattcctactgggcatactgcccaaactctgaactgtcaatcgtccaatcctcagtcatgggttccacctgtgggccaagtgataggcggtcagaccttatcttacaattcattaggtggggttatacccaataactctgcccagactagcagttctagcaactaatcggcaaaactaaccgatcgctgagataacctggttgtaacaccctaactactaaaggtgtgttagcgtgatttttaacgtactgtgcagctcatggctaatcaacgagattattggaaa

SEQ ID NO: 61155 - DNA, 2149 bp, Cannabis sativa
  modified_base (436)..(437): a, c, t, g, unknown or other
aagcattggaattacaaccagacctgtcttatgatgaacaacaagtgcaaattctggatagaaaagagaaagtccttcgaagcaaaatcacagcattggttgaagtgctctggagaaatagtaaagtggaagaagccacttgggaattggtgtctgacatgaggactcaacatcaagggttgttcaagttatatttaaaggacgaaatccttttaatgaggagataattgtagcgaccggaatatttaaatatagattagtgagattataagtgttaattttattattattatcattaatattgaaatttttatgtcaatgattatgttaaatgtaaaatatgatatctctgtaattttagctcaccgacgatggaaaatgcaatggcggatattttagtcacttgaggaaatatagaatttggtaatgttagaanntatgtcatgtaagctaatggttggtgttggcggggttgtggttctggacaattttacccctaagccgatttttggtttaggtttagtgatgggggtaatttagtaatttacttttatttaattgggtgtcttcaccttattttgactgctgccccttcgattaaataaaggttaattagtaaccttttatgattcttgttggaggattaagtaaatagaaagaaaaggggggctccatcactcttcttcctcctcttccttgttcggccagcaggaaccaccaacctagggttgagttttcttccaatttcaaaagctattaggtgtagttttgaagatttgatctgaggtaaaaccctaagcttgttctattatgagtttatgatgttcttttgaaggttttgttaggttaaggatgattttgatgaacttgcttatgtattgataattttcggttagggttagttttagtaggtcttacatgaatttttaagattgttggagttattttttgatggtaatttgtgggtttggtcaagtttgagttcatggagctcaaacttgacttaaccattgcatgttgagttttgttttgtttttcttgctactgttgtgtgggatttgttttagaatgtattttcaggtgttctggaaggtatggttgcgtttgggaaagatttggacgagttgtgcaatttttggggttcgctggtgtaaaccggtccaccagttctacaaggtatgtaaaaccagttaaccggtttacatgccaggaccccaaaatctcaatttctccgaatctgtgttattttccgagcatggtttggttttccttagtatttggggtgaaagtactgtattgaaagtatcattaagattaccctaggttttgagttagggctttggtttagttgttcaagtaatttacttaattgtattatgtgacttaggacctccgtttaagctcaaggattttccattcaagtcgaccgccacgcttgaatcttgaacgaggtaagatagcataaataatatgtataaccgattgtatgcttgtgttaattgtttacactactaacactaatggaaatgtgatttaagagtgttagtattataagatattctaatcatcatagtgttaccaacacaagtactagggaaggtacgtcctgcatgtggtacattcttagtatctcctgggagtacagtgaagaccctaccaacacaagtagagttggtactttagtgcatatgatacaatggtcgtacgtctattaagaacgttcttaaccatttggtgaactcagtttatgagttcagagcggctaatataaagccgctagagcattgctttcatatatgttatgcatatcttactgagtctattgactcaccagttgctaccttgtgtaggtaaagggaaagctacgttggaggagcagtgagttagagcttggagatgattgtgcatatggtggcagtgcaacctggagggtttcggttttataacattttgatttgccctatattttgttaaaaaaaaatatatattacctaactttatatggttaatgtaatttgcaactgtgtttaaatctcgggatcccgatctatatgcttatatagttataatattataaaaattagcttttgggtttagtaagttttcaaacacgggcgttacataaactttttggtattttctagatata

SEQ ID NO: 61156 - DNA, 1135 bp, Cannabis sativa
atgtatatatatatatatgagtgcttctataatgcaggatgcagtgatgaactatgtactgttttggtattttgaattgttttttaatttaattttaaattttttttaataattttaatgttgaaatagtttagtaataatgttatatgaaaaaattgatttaaaaattattttggatattaaaataaattaaggtgcattgggatattgtttagaaagggtaattatataatatatataagctaaaatattttgcattttaaaattattttgtaatatttggcctgaaatttctatttttttttttttaggattgtgttccttgtaatattagtattgttaaaaaagggtttttttttttaacattaattagtaaaaattcaattaaacttttgtaaaaaaaaaaaataattaaattttaaaaggaaaattgataaaaattacaataaaattaatttataatgaaaatttcattttagcgtaaaaattatatttataaactaaattttctaaaaaaaaaacttgaaactaatttgattattaaaaggaaaaaaattaaaatatagaatatattaaagattaaatttaaataaaattttataaaacttatttttattttaatttacttaggtacaaaattgaattagataatgtgatgccacatctgaaaaattaaagtcctaacggtaattttcttaagtttagaggtatatttaaggctcatataagtataagtgtataattttagggataaaataattttttatttttttaaaaattactaccaaattaggacatgctttttttattatcttaatccgatgttattagttgaaaaataagattgtatattttgtgtgtattaagtttgtcataaattatcttatttgtttttaaaggtaaatattaaatatatgcagctaaaataagttttattgagtttatttatttacaaatttaaaattttatatgccgcaattatcttaattttttttttatataaaaaacagatttagtaacacaagttacttttattattttttttttatatttttattggacttgcttatttatttatttgatgaatattttttgttttatttttatattgtaggttatggatcttgtgtgtatc

SEQ ID NO: 61157 - DNA, 549 bp, Cannabis sativa
  modified_base (26)..(33): a, c, t, g, unknown or other
  modified_base (115)..(128): a, c, t, g, unknown or other
tgagttatagggattgagctggtgannnnnnnngtgcttggttgaatttgctaagtgttgctcactctgcacggttcttggagtattccatcatggacatgccagcgaggcatcnnnnnnnnnnnnnngatccgaccaggtgctctaagtagatgccaccactactagaaaacatacatttagtaacacttttttttaactaaagaaaattaaaaggcaacacttataaaagtgttgtctcctagagtgttgcaaaaaatatagatataaagcaacacttaaaaaagtgttaccatatgttataacttaataaagacatataccaacactaattttaaaagtgttgctatatatcaatattttttagataaaaaaaatcaattttatataatattataatttttttaaataaataatttttaactaatacatcaaattttatatttaattattttttaagataataaaaacttaaattcgaaattgtataaaatttaaatttacgttaataataacacaatctagattaaactaaattttcaaatttat

SEQ ID NO: 61158 - DNA, 2538 bp, Cannabis sativa
tcggggagaaaaccacaaactcgatcccctagaaattgggcccagtgaccaatttgacaatcaaactggtgcgctggtttcaatcattaaatgccaaatctgattcgaccaatgaatttggaatggtcaaaaaaaggggtaggagacctcatcctcaagtttaagaaccttggaagtatcaatacgacaatcccgaagctcacaaatggggcacccaacgtctaagttgacaaatggcgttgtgtgctgggttctgcttatccgattctgatttcgtttcgatcctccatttagtttttcacaataaataagatccataaagtcaaagaagtcaaattcacagcttcacatttttcattccaacatgggaaactcactcagaaatgaagagttttgagtctctcatttctgtagaacaatatcttcgagaactggtgaccaactttgccagaatacagaaacatactaagtgatgtcaaaatatcacttaggaatcttaaagtacattacttggacgtttttacacttacccaacgtccaggttgacatcatatgtcaacctgagtgttgggatgtcaacttgggcgttgagtcatgaactgcctttagtaaaaaaattataactcactcagtattgatctgatttaagtgtgagacgtgacttgatagagtactgaattagtttcaaaacacaagttgctacatgttaatcagatcaatattgagtgagttatggttgttttagtaagctatcgaccatattttcttgacatacatcagtcttcatcttggccgcgccattcatagtaatatgtttatagcatgcacattgacatgctttagggtaaccagcctcaataacaattaagattgtgctaccatacttcgtcttcaagaatgtaccgtcaatattaatcacaggatgacaaaacttaaaacccctcctacaataatcaagtgaccaaaaatagtacttgaacctgacatcctctgtcacaaagtcagtaatggtatttgaattcttctgttccagtatatacaagttggtgtatgcctaacctatgtaagtgtcctctccttgccttctcataactaattgtgataccgtattcatcaaatatatctctcattatgtatttttccttgtacttagttccatctgatatatactttcccttaataaggtggccaacaattcacaatgctcggttattagaatttctagaatctaggttacatgtgtgttcattgtggaacacagtaacctcaaacatgtcacaacatgtgttcttcctccgctcaatatccatttacaatttggatccttgcgagttgcgagttacgtaataatcaaggcgtaccactaagagaagttgtataaatagtattttcctccatgtcttctctaatctgcataagatgtttgaatttcgtacatacttcaacatcaaatgctagagtactacaaggaggatctagccgaatgctactagtgtctaacctcaaggcatgtacctctacaacttaatcaacttctaactcgatatcatcatccttgttcaaatgtaccacaagatcattattgtaatagtgagcatcaaactcaacaaactaatccaattcgttatcagtgttgtgctcatctaatttagtagggacctgctcattcaaaccaaccacgcaatttgtttctagaacaaaagtcccaactacacttcatggggggagtaggtcccaaattcacatctctcttccccttagtcacaaatagtgacaccaagttctccacattcattttttcatgcttaagaacactcttacttgaccatctttcattaaaacttcaggcggtattttattacctttcatgtacatttaaaacacctttaatttcaatccgtacactaaagggtccacttccaactcttcatacaaaattttgcattttctgtagagtagtgtcaatctcaaataccatcttaatttttgagttattaaatatccagttgaaatctttaacaatccaaactccacaaacatagttgaatctacaaacaaaaatgtaacaaaaaattaattcatatcacaaacatgtcgaaaactatcacaaattatttatcgaaaactatcgataaacataacgaatttgcattagattgatatcaatactgttatatagcaaatcgtttcacaacatattgctaaacatcattaatgtcgacgatgttactatatgtcgataatgatatcgctacttgtcgtcaaacgtcatccctaacctctaacacacacttgttgcaaaatattgctataagcattgctaaaaatctgtcgacaatgctactatatattggtaatgatatcgctacacatcgctacttgttgtcaaatatcatccctaacttctaacgcacactcttctcacaaaatattgctataagcatctctaaaaatcgttaaagcacgaaaaaaaaaccaaaacacgtagaatcactcaagttcatttcagacacaaaacaaccaaacaaaaaaatatat

SEQ ID NO: 61159 - DNA, 1802 bp, Cannabis sativa
aacacataatgctaaacgagctatttgaggcctcccagcacccaattcatttgaaattcttgtgctgacattcaattcagtttattagtttctcaaattgaactagtgcatttctctaaatcacaacaggacattatgaagaatagtattatacaaatgtttgctaaactcacctaataactccactgagtccaagaggtaccatatacaccaatgcacatgtgttaaggctgaaatgtgttgatgcaaatgttaggaacttcaacttataagttaccaaataacatagatttggatgaagtacaaacctgattgacaaaactgatgtttcgagttttggattcggaagaaagccagataacaaaaccatcatttcaaaagaccagatttccaacctgtttaaggacatagatgatgagcttctcactctatagtctatacactaccaaatcaaagatagtaagttagtgagcgagtacacatacgttaacattacagctgacggaatggaaagtttaagaaacttggggattccatgaaaagcttccatagagaaaccagtccatgtatgtttacataaaggagagattctaacatatagcactaatgacaaggcattaatccaataagagattgcatttgccatggctgcacctctatttccaagacctgatttaaacaccataaaccaacatatgaacaagtgtagtaatgttgtgattccagcagtaatcatcattggaaccacattgttttgtgtttgcaagaacttggtgtggcattgagtaacagcataagcgaaaatgctcggtatcatgaaccgagcatagcgaccagcctctgcagatatctctggatcttgacccaaaaacaaaaggatttggcctgcattgaaccatataatagccaagggaatgctaacaactagaagaacaatcattcctctctgcatgtgaataccaagcatgtgatattgttttgctccataagactgcccacagaaagtttccaaggcactccccattccaatctatcaaaacacaattaaatagtattatggcatgttcaggcctatacatacagaatttgtcatgtttttgttaccttcttttgcataaataaatatctaatagtaaaacagggctatgattcacagccaggaaaaagggacaaaagggtattcatcaaatggtgttaagactttcttctatcactaacaaacagagaactatcatcatatacatatatacatgtactgttagacttttatttgggcttgtattgttttgttaaaatacgggttgatgaatagttttttatcgttttagttcatattgttagcgatcaatagttaatgtgcttagtatctgtgtaaagtcaagttgaagcagaagtgtgggtttgtcaagttaactgaagcttttgattaggtttctcaaactcaataaatacatattgcttcgtcacagttgtattctttggttgatctattgatcaagtagtttagagatagattaagtagtttagcattgcattaccaactatattatttctaaagagcaatttctatatcattcaattactcgtagtgttctatgtgcaatactctaaatggaacaaaacccagatgaggtttctaatttaagaaaagaaatgaacaaagttaaagccataaaattaaaagataaggaaaatgaggcttataaattaccaacaagctgaaaccagttactgaagcaaaagaagtggccatagaagctccagctaatgataattccccaagatgacccacaaacatgact

SEQ ID NO: 61160 - DNA, 1134 bp, Cannabis sativa
aaaatacaaatattgacatatgtaatttaatatttaactttgtgtgtttgctttaaaaattaactaaaaataatcaatatgtgaaaatcgtaaacttttatgtttatttctattatataatatgaatttaataattatttgtaaatatttataaaattgtataaaattgtgtaattatgttttttttttttgataatttttgtaacataattaatttacttgtatataattaaagattaccttttttatatatatattttctctcacatacccaattcttaggtatgggtttggggtcggggccggatccaggtttggcgatttagcatctggggttctggggttgggtacgggtcttatgcctggtgctgagatctatttgtgttaagacttattttttattgaatactactaaatagaataataaagtatgatattgaagtcttctctggtggtgcatcttgtctaatgccctccctatccgaggcatcttggcaagaagaatcaacattgacgaggtacattgccccctttgtggggtgtctgaagaatctatggagcacctgtttctttattgtaacttcgctttggtgtctccccctccagaagattggatcaaaatcaactgtgatgtgaaggttggttgtgactccatgtgcgtagcagctttggctagagatcacttagggatagtgttgtggggtgcggccaacagtcttaatttaacaaatctgttgattggcgaggcagcagcgtgtcaacttgctttggaaactactatttcttggaagcataattatatcattattgagagtgattcagaaaatgtaatcaaggcgattaaaggagtccactccttatggaacattgataattatatttctgtttgtaatcaactctctatgaactttttatcttgtaatttttcttttatccttagatgttgtaattttgcggctcacaatgtcgctagatgagctttcgctcagaatgtttcgggtatagtagatccatcctctataccccactctatcctttataatgaccgcgaggtctaactttctagtttcaatgcacgttttattttaaaaaaaaaagtcttcctgttagatttggtaaaaactgactaatcct

SEQ ID NO: 61161 - DNA, 624 bp, Cannabis sativa
  modified_base (358)..(358): a, c, t, g, unknown or other
atatatatatatatttattgtatgattttatgcttcaattaatatagtttcttaaccttctatctctattatatataggaaatttttataataagaacacttcatttgttcttataagatagtgacaatttattaattaaccattattaaattaacttttgaaggtttatttaaactatcaattaaattgaaaaaaatgctttattaattatatttttttttttttaaaaaaaaaaaattagaagagatattcattagaaaacacatattaatcatgtgacattcaactatatctcgatagcaaataaaaatagtaaaaatatttaaaattggatgaaaccgtatttttataattttnttttgttatttttatgtatttgtaaaataatccctatatttattctattatgacccgataataatatcagacatatacattacagattatatatatatagttatcattacatttataatataatctcaattaaaaagtagtgtacgaatcaataaaagacaagataaataaaaaggatataactgcaaaaaatgaaaagattagatgattttatgctgagggcatacaggctcttaattagtatctattatatatatagtgatata

SEQ ID NO: 61162 - DNA, 2760 bp, Cannabis sativa
  modified_base (199)..(201): a, c, t, g, unknown or other
  modified_base (2217)..(2224): a, c, t, g, unknown or other
aaatgaataattagactttttgacattattttttttacactattaaattatatctctttttatcatattctatttaattttatcattaaacgaataacacaataaataatgatcgataaatgagtgcaaagtaaatatctttcatttttttttttactttaatgattaaaaaactaaaaataaaaataaaaattattannnttattattattattataaagaatttattctaacgtaaaaatggtcaaaagtatttaatttgtaattatttatcaattaccatccactacattattcatttcgcgataaaattaaataaaatataattaaaaaactatgttattgtaaaaattatattttaaaaggtattattaaagagtcatatactatatactatagaagacacaatttaatattgtaaaaaatttaagtgcaaaaaagttaattattcaaaagaaatcctcatcttttgctagcaatgaataaagtggataactaagctagggtagtaagagaaatgtttaatattatgggaaagaatgttgattattaattaaatgttaacaagattaagataagcttaagtaatttaatatctaaaagacaaaagttatataagaaacccttcacacttaaataggtttggcctttggcctttggggactacatttttatagattacataattaagtaaccatatagaacttctaatttttctttaagaagaagcctttttgaaagagttgtgtgtataaactagttttcaccttttttccccactaataagaataaataagattttcccccctgaaaactcttttaatactctaattacttttttctcaaatggtaaaaaattatattataaatatcccttttcaattacattttgttcattaaaaaaatgatttatatggtcattagctaccagtataatgataatataagtgtatttattgacactaaatatataaacattaacattaaaatactggtatacattttcaaaattggttattaaattgttatttatgtatatataattcttatttagacttgagaatgcttcattagcgttacattagtgttaaattagtaaattattttaaaaaatgaacagaatattgtaaaggtgaacatttatgacaatttttataagtcacctaaattttagacaaaactttacaaagaccctaatttagagaagaaaaatagtacccattaattataattctttatattatatatagcatcctctttgggagcttgtgaagaatctacaaacaagtgccactactctactatatattctaaggttatgcacattctgtcaaatggaacaaactacaactttacttaagactttaaaaactaaaataaaaccctccctaaaaaaaacaaagctatattatggaaactaaaaaagtgtttatgtgaagcacttctattagaaagtggccactcaacatccaataagtgatatatttttttgtatttggccaaagctttcaaaatgttccccaccccattcatttttagtttacttaaagaaaagaaaaaaaataattatttgataaaagagacttcacttcactatagtgactactttatcttcttaaaaggcctatattttcactcttttaatgtgtattgagtatatgattattcttccacctcccctctactatttccttttcaaaaaaaacctcattttcttactaataattctttgttgaaagcaatgggaataagcgcgtgacacactttttttgttcactaagtaaacaaaaccaacgagtatggttcattgaaaatgaaattaggaaacaaaagcatcaacacaaagatagtgaaataagttgtcatgtattgttaattaatgaaagtatgttgattatagttattgttatatgacttttgaaggttccaaaatgaaatgaggcatcaaagaagtgaattgggtaatgagctatgtagctttgtgatgctttggaaatggaaagttgtgtattattggtttgtctttaatacttttgaaaaggtttgtgtaccttgtgttcacataagacatttctttacctttcacaacatatcaagcttattatagagtaaaattagattttagtgtacttcttttgggataatttcaaaaaaaatacaaaaataacaaaaaaaattacaaaaatacagttgcacgaaattttaaatatttttacnnnnnnnntgattttatttacaaaaaatgcggtcttttgatatatttttatgttatatttttgttaatttactattaattttttgttatttttgttgttattttggtattattttcttgttatttttatgtaattttttttattatttttgtgttgtttttatagaatactgtaaaaatataaagagaatctttgaacgtaaaaatgtaaaaattttataaaaaatagtgttttatgtaattattcttaagtcgtttagtgtccatggaaactctaattatatttattttattttagggcaaaagtataatcttgagattttgtgagcctcaagaaaaataattttattaggctttatgaaaaaaaaaaatatttagtatttttaaaaattactaaaaaatatatattcttaaaaaaataaataaaaaattaggatccttaattaccttagcctaagattggctctaactcgcaaagacataatcagaatagcacattgattcgcgataataaagatcaagtggttcggttgtttacctaaaat

SEQ ID NO: 61163 - DNA, 1030 bp, Cannabis sativa
attaggcatgatcatacaaaactttacttatttataattataaggtaaactattaggatttttttttttgaatcaaagatgattttattcataaactttcagcataaacaatagtctttaaagcaagaggagcatcatgctcactgaaagtacaatctgacttcaaacaagaccctctagcaacacagtgagcgggcttattagcagatcgtttaacgaaaattacagaaatgttatttaatgacaatactaactcctgacaatcacgaacaagcaatccaaactgggaaggcatagcaattgaacttttaagagcttgaacagcaatcaaggaatcagtttcaagcaccacatcaatccattgctttctcttgatccaacttaaagcctctttgataccaattatctctgcaacttcaggcttcaccaccccagatcggcttcctgaaattgcttcaataagtgtacctttgtaatcccgagctacacaaccaaaaccaaacttattctccgattggaaaatagcgccatcaacattgaccttaaccgtatttgtcattggtttccgccagtgctctctaacattgttaatatcatctactaacaatgcccccattttttgtgattgagcactactccattggtcaagagtaattctagctgaccgcaccacctctaaagcagaacaagatttgttattccaaacaacatcattccgcacaacccatattttccaacttaccatagcagcctcacggataacatctacaggttgagaatcaagcaaactaaagaaccaaagcttgaagtcattctcacgtatagtagcagtactaacacaagataaattccaacaagctttactaaagccacaacccagtagaatatgaaagatggtctcctctgctaagctacagaaaggacacgaagtctctacattaacatgctttgtatttaactgaatcttagtagggagacactctgacaaagcacgccataagaagtgctgaactttaggaggaatatcaaa

SEQ ID NO: 61164 - DNA, 837 bp, Cannabis sativa
  modified_base (182)..(184): a, c, t, g, unknown or other
  modified_base (228)..(231): a, c, t, g, unknown or other
tagagcgttctatataattaagagagcaattctgaatctataattgcgcaaggaggaattataagttagagaatttacatggtaaattctagagctctttattggaagattgattatataggcacatggtccccactgtagttaagacaatacagcttgtaagactcagttaattagttttnnntaatcaattataattctaaaactaaactatgtcttatttatgannnntcactaagcaatgacttaattgaagaacataaacactacaactgaacatggtagattagctataaattgaactaccatgtccctaatctgtatgtcacgagaagatctattagtcgactttaacgagcaaattgaagaacataaacaatacaactgaactagaacctaaccatcttaggattgagatcattttgatctaagatcaactaggtcatattgaattagatagatgttaaggtaagtttagtacatcttatccaagttcaatatcggttccttccgatataatgacatccaacccaatcttactttaaccaatgccctagaaaggacatagcacttatccaaggtgcaaggaaactacaatgtagattatcatatcagtgaaatcatataatcttgattactttccactgtattgacatcacaataaacaagaatatcaatgtgataaggatttaaaagaatttataaatcaaataattcatcatgaaataaacacgtgaactaaataacacattaaacaagtaataaaataaatatgtttcttattgataaatgaatattcaagattacattgaagtagagttttatttagggcacaaa

SEQ ID NO: 61165 - DNA, 848 bp, Cannabis sativa
aaaaacaggatgaatggaggcgtcaggtggtagctgcaggcggtatgctgctgtacccacacgtgccagcacttaaaatggcccgaagaacctaggggacagcttttcattaggccgtcgagccacagtacgctgcctgtaaggacgcagcttgacataaaccatgtcacccacctgaaattgaacatctcgacgcctgcggtcagcttgagttttcatcttctgttgtgcccggagcaagttttgcttcagtagttggaggatggcgtctcgctcttggagttcttgatccaccgcagaaactttagtactagcaggttcgaaacggagcaaagggggtggatctcgatggtagacagctcagaaaggagtcattccggtggatgtatgatgggaggtgttataccaatatttagaccaaggaagccacttcacccattggttgggtttggcgcttacaaagcaacgtaaataagtctcgagacagcggttgactacctccgttttgccatcggattggggatggtaggcggtgctatgcctcaaggaggtgccctgcaaccgaaataactctttccaaaacaaactgaggaagattttgtccctatccgaaaaaatggagcgaggaattccatgcaacttatcaattttgcgtacgaaaacctccgccactgttggtgctgaaaagggatgccgcaggggaacaaaatgactgtatttggtgaggcgatcgaccaccacaagaatagagtcgaatcctttggaaaggggaaggccttcaataaaatccatggagatgtcctcacaaacgctctcgggaatgggtaacggttgcaggagtcccgcgg

SEQ ID NO: 61166 - DNA, 994 bp, Cannabis sativa
gaggacccccaaaattttatgactcaaacctacaatgctgatcacgagccaattatcgactgctaataagaagaacaaaaaaattacacatctcttatttgtgtaagatagcaataagtaaaaaaattcatgatagtcatgatgtttgtaggaattttttctaatcgtctgtttgtcaatttggcattttctatgtttttcagtttgtccatttgttgtcagactgtccttttctctgtttgtcattttgttggtttgtccttttgttgtcagtttgtctttttgtatgtttgtttgcttgtaggaaatttctaggaagtttcctattttgtatcctacctcatgtaaattgctatatatagactcatccttttcattgtaaggacactagaaaagctttctactaaataaatttttatcgttcttctcttaaaatgttcttctaaattttctttaagagatttcttaagtagtgatagtgtgcattatgggtcgtactgaatagattaaaaaaaaaaaaattaagcgtaagaataatttcaccattaaaacccccatagtaagtcaatatgtttaatagtaaaacctgatcaaacaaattctaactatcaaatattttatttaaaaaaaaattatttcaaaatttataatattttttatttttaaatattatattttttatttttataattttatttaatttaaaaataatttttaaatataatattaggtgtaccaatataaacatgtcacgtacataagcagtttatggtgacagttaactgaatgacaccttaaatatgctattagttgagtggtttggaaagttttatcgccaaatttaacttgaaagagttaagtgaaagtgaaatgataatttgaagggtttaaccgccaaaaactctaataataatatgcataccaattgttgaaataaactcccttcattccctgtacactgtaaaaactagtttattacaaagagagttacaag

SEQ ID NO: 61167 - DNA, 776 bp, Cannabis sativa
ttatttatttattttatttttatcgagttatttatttaattattttattgagattactttttatttattagggcaactcttgagaaactcaaatttaatattaaatcaacactaaaataatattattttaacattaattgttttcaatttcaaccacaagactaaaattatactaaaagtatattttttattattataatatttaattagtagattatattattatataattatttgttttttaacaagggattatttaattattaaaaaaaaaaagatataaataccgtggtctacagtacccactattataagtgggacactgtagactcccgccaaaatagtaatacttttagagttgggttgtaagcttttagtgaaaaactacatatttgaatttttaaagtttcattgaagatgcccttaataattaatatttgggtaaattgaggcaaaacccctaaaactttcatttcactagcaattaactcctaaaactcattttttggcgataaaaactccaaaattagtgttatgttagcactttactattccatccatttcttagtgctaagtgccttgttggatcatctacgtgtacacagtatgcacgtagcacaattttattgatccaagtaattaaatatttaaaaataaaaataaaaataattaattaaaaaacaatttttacttttttttttctttcattttcgtttatcttttttttttctttctttcttcttcatcaagcttgtcaccaccaccaccatccacaa

SEQ ID NO: 61168 - DNA, 1062 bp, Cannabis sativa
cacgagatcattctgaagtagctatgtcctaatattttgttcagaaagtcaaacttgctcctgctcgaataatttaccttccaccctgcttaggtaacaagcagacgaataatatgaagtctgttcgggacattcatttctgtccagatgcaaagaatgcaagacacgtgtcacctgtatattcttccacgtcatagtggataacagttcagacccctaagccttatccgagtgcattttgaacaaggaaaaatgaacctcatgattggaaaccgtcttcaccagctaaacatttgtagatgcatcaatagaacgattactactagccacaatcaagtcctaactagcatccccaacgctaaaaattccattgaaataatcaacatttacatctttgatacaattattcttggaggtccaagtaccagcaatattttaaagctgcaagatattgttgtttctctttcttgttttggccatagcttgaaagaatttagaatttttatccccgctatgtaaaaagagttatttttacatttgcttcaagtacaactcttgttgagctaaaacctcaaaataattgttttgctcttgactggaatcctggacaggtaagggatcggttttcccttttagagctgataatttttctttgctaaaaaagattattttttaaattatttgttagattcctccaccattcttccagattagagctgtaaaactttaatttttctggaaaggatacataagcgtgagaatctcagtaagactgaacaatctgatcataaaaaggttctcaagtccacacattttccaaatagaagtgataaacatgaccagttcaaacatgtgtttttggtttgagaaatataagagagtgatctgaaaaaaaaaatcacaattgctgagggtgatttgcgaaaaagattcaagcaaaatatgagacacaagagctttatccagatgaatttcaactagattagcagtacccttacctcgttctcaattgtagggatggccacggacctccaaattgacaaaatattagctacttaagac

SEQ ID NO: 61169 - DNA, 1107 bp, Cannabis sativa
  modified_base (78)..(86): a, c, t, g, unknown or other
  modified_base (498)..(519): a, c, t, g, unknown or other
ttcttgaccatacaaaaaggaaagtactattataataaaataataataatataaacagtctctctctctctctctctnnnnnnnnntctctctctctctctctcttttggagccttggtcagctctcactcttgtacatatgtgctttgatttccagggcaaaaggattaacaagcgaagaagcaccaagggtaggaaagtatttgaagacctcttcggttagaatatcttctatgtagtacaccaggttgaatgttaacttggacgctcgcaatgagagctaaggtcaatttggacactcgccaggtgttttgatttccagatgttttagtttgctcctcgagaacaatctatttttaacatatcaaatgtatatatttatatgtataaaaaataaaaagaaaatttacaagagataatgattaaattctgtgggtcttaaatgttaaatttagttaaaatgcccccttatacaaaaatttaaaatattcttctttnnnnnnnnnnnnnnnnnnnnnnttttccttactcttacaatcgttaatgttctgttaaaatctcaccctacacatctcaaaaaattgtgaaatttcacgggggacgaagccaagatcgttgttcatcacttttctaatggaacggttgagagaaaaagtagttttcattggaaacattgagagaaaaagtaattttcatgcactaacaataaatttaatcgaaatagtgaaaatctcacatttctgatagtagtaaccctttgtgaaatgttgcccagactaacatcggaatatgttttgccactagtcatactgaattcgtgctactaagacgtgaatatgaagattaattcgtgttaaatttcgttaaatggcatcctaattcaaaaattgttaatattattctttttgggtaaattttaacaagtttttttgttactcttacacttgtcagtgttctgttttaaatctcaccctacacatctcaaaaaattgtgaaatttcacggggacgaagccaaaaccgttatacatcacttttctaatggattcattgagagaaaaattagttttcatgcactaacagtcatttaaatcaatatagtgaaaat

SEQ ID NO: 61170 - DNA, 710 bp, Cannabis sativa
catattctaaaatctatctcatgggccacgaccatgataaaaaaaaaacaataaaagagccaaatatttcacctacaacaattcaaactccaaaatgatccgaatcccacaacaaaaatagtaaaaaatttccaactccattcaacatacccactcagcaacaacaaaccattcaaggtcaaaattccaaatcaagtttcaataattccgacatcaagttcaaaaatgttcgagaatcaagagaacaatgaaaaaatattctgtctaagaaatgaggggaatttcgaaatggagaggtagcaaagtttaccttgaatcttggaaaatggtgagcaaatcttaaagacaaatcccttgattctttggtgttcttggctgaataaagaaggaggaaagccagtgatttcaatcgcaaaaccctaagatataggggaaccaaaaaaaatggagataaggtgacagagagatagagagagaaatttatagagaagagaagcagcaaaaatggagacgttaacggagaggtagcaccaacaacgatattccaacgacgactccggattaaaaaacgaagattagagaaagaacacaaaatcatccataagaaatttaatcggcaaattagagaaagaacacaaaatgaaaaggaaaatgtaagagtaataataccagtggaggcaacgacaatggcgatgaagaaccagtggtga

SEQ ID NO: 61171 - DNA, 1195 bp, Cannabis sativa
  modified_base (625)..(625): a, c, t, g, unknown or other
  modified_base (685)..(696): a, c, t, g, unknown or other
gatcaaataactttctcatctgacggctgccgtacatcacggattacaatccgtgaaagtacaataacgggataaaatcatatccatatagtattgagaatatgtatgcactttaaaaagtttaatgtcaataagttttattttgactaattttagttagttaaataaattcatctactgcaactattttaatagtttgtgcgcctacacgagtaagctgttcaaaaatgaaaataaataataaattgaaaaattgcaataaaaatgacaaattttaaatagttatcatattttaaagaagatcttatgacaaaaaaaaattgatgagagcaaaagtttcaatagttatcatatatatatcttaatagtgttgccataaaaaaattgaaagtaagaaatagatgtatgtgatataatgtgaaaatacaaaaaagaaaaagaaagaaggtgatgaattttttttaaatatgtaattatatatttatgaataagttattaaatttattagaaattaaagattagtgatagtaatttttttagattagtttgaaatattttagttatttcttttcttcatttcaatagttgatttgatgaataaattgttatattatatatgtttaanttaataaataaaaaaaaataaaagatataattatttgaataaaaaattatttttttaaannnnnnnnnnnncaacccgccaatccggtcaacccggccaaccgaaacctgccaacccgtgacccgccaacccgccaaaccgtgccttattcaggtccgggttctgttttattttttgaacccgaaaccgtgaatctaaaacccgcgaacgtgaaactcggtaaacccgcccgatgttcaacctttgtaccaccgtgttgtgtcatgtcaaaacttatatttttttatgtcgtatcgtgtttaaatacttttttttttatgtcaaatcgtacttgccctagtttcatatggtttcaataaattcagttaatatttacaacactaattagggccacatttaagcagatttagtgaaattttgatatgaatatgataaagatgggggccattcttttgtcctctattttgccattttctgtttttctctacagcctatctcagtctctctacgtctgtgattttgtgtgtcatgcgggtatagcattgcacttttaaatgggctgggcttagg

SEQ ID NO: 61172 - DNA, 1221 bp, Cannabis sativa
gttctattattttattttagaaaatataacaatccaaatatattataatgcattttattatttttaaaattttgtaaaaagtgtgatttttttttttttgaaaaaaagtaaaaaatatgatttgattgtttaattttatttttcaatttaaaatgacgaagaaaagcttattttcatcccatttctctttctctctcccctagtcttctttgtgtattgatgatatatttttttttttcactcttctttttaaagttctctctctctttgtctctctctctctctctctctccattagcatatatttttattttttattttttgtccagttcttcttttcattttttttttgggtttttaaattttcagtcacatttttggggaagataagagtgtgattcttttttattctgattttcgagaattgggtttgcaaataacttccattgcatctggtgttgaggctgtgtaggagatagtttttttctaatcattttttaaaatttattttagtgttattttacaattgttttgtcatcatttatttatttgatgtcgattacaccgttcttgctccattttctcagaatcaatagttgttttcaggtgttctcgtgttgtagtagtggttccttccgtaggtgtgaaagatggaggctatacatacattttttcttctttttctacagctattttcgtggtttttttttattctttttctcctataaatacatttgatgagctcactgtcaaaagagttttgaggtgtgttgttcttttatatttttctaaatggttatatctgcttcattattttacattttttttatgttgttttagttatattttagtagtctttctattcttatttttcaaggctgggcttgcaaatataaccgctattgcatctcgtattgaggctatgtaaaaaattgttagtttttttaattatttttttctattttttttatttattttagtgttgttttgcaataattatttatttgacgtcaattttactgtttttgctcaatctcgctaaaattaatggttgtttttttttgatgttctgttgtttctgtggtagtgtctgtttggtatttatagtataaaaggaaaaaagggaaggtagtatatatgtaatttttaccgtgtgacagtaaaattgtaaacttttacttaaaatttaatattttcgtaaaacccctatttattgtcttt

SEQ ID NO: 61173 - DNA, 595 bp, Cannabis sativa
cattagacttcctactactaatgcgcaaagagttgttctcatggcctctatctcttatggagaagttaaggaatactccttaaacagatgatcttcatgtttgaaagggaaatgacctcccttatatttagccattgaaaaacataaactacttgcgagagagtaaggagtatgttctttgaatctctaataatttggatttcgagaacgtatcttgcttcatccaaattattcatctaaaatgtagtgcttagttattctttcatgtcttacaatttcttaatattatttccaatgagtaggatatcgtctatgtaaagcatcgagaatgccacaatttgatttgcttttagtatatatacatagggctcatcaattctttatttgaagctataggtatggatgatctcattgaacccatgattctaggaacatgaagcttgattaagactatatatagacctattcaacttgcagactgtaacaccctactagtttaggtgtgctattgtgattttatattaactgtgcaattcattgctaatcaacagattaattaaaaaccgtgattaattaaaactttacttaattatct

SEQ ID NO: 61174 - DNA, 1361 bp, Cannabis sativa
ataggtatactatccgcgtggtgtgtaatttattgaggacaagtgtaaaccacataaaatcaaaactcttgcacaagctgacaaatgtaaaaagactagtgcatatatacatatacgaattgatgatacatgaagagaacattacaattgtatcatctatagccacacaaaaatatgtgatagtgccttcattaattaattatatatgaatattatcatatatattataaaaagttgcacagaaaatcaacggatcactaacgtggcaatttcagttcatacgatatacatgaatacatataagtatagtaataatattaagaatatgtgaacacatgtatatgagtatctcatccgcagaaatttcaaatagtaacactacactactattgcaaagtttatataactaattaaagagatattatatctatatatggacaagtcaaaagtggaagaaacactttaaccctatcagagaagggaatgatagtagaattaattattcatacatatatatacatatataagaaacaataagaagatgggaatttaacaaacaatcacatcatcacccacaatatggcaccaccgtcactaccacactctaccaccccaccactatgtcacgccactaaccaaaaatacacatatatatacacgttccaaattataaaatatatatgttagcaaaattaataataaattgaagatctatttatatataatataaaacttataaaatacaataataatatataataattatgtgtatgtgtatttgattgattcataataattattgtaatttgatagtgtaatagtaaaatgaggctattgaaatttgaattctcaaccttttagttgtggtgggaggcctaagacggtcgcctccttcatcttagctcaaggtgggtcctgacaatactatcaattaactcttcttccctagatctctaaataaatcagaagcagttttatattatctgattataaaaagtatacaattatgatgggacaatatgtatttatagaattaaagagggacttagctacataactttagttagattgggtctgctcatcaaaaacttcagttaactacaaaagcccacgctcatacttcacctagactttacacacagatactaacccattaattagtgatcaccaacaatatatactaacacatcaaaaaattatccaatcaacttaaattttaataaaactaataaaatttaatgtaaatagaaataaaaattctaactatatatatttatatatgtcattttctataatataatatattattagagccacgagaactacaaggaagctactagaaagaaagtgtgtgcatgaat

SEQ ID NO: 61175 - DNA, 1049 bp, Cannabis sativa
gagagataagtttaagaactcagagagatgacattgatagtttgagagagaaaagattgagaggtagagagagaggtacaaagaaaagagagagattggatttgggttttgcaagaagaatcttctatagatgaagaagattcttaggtataagtatgagagttaaaacacttagtgattaggactcaacagagaatctcgtctcgactgtattgtacttattcttactcaatcaataaagaaagatgaaggtggtattttagaactacagtagagccatagatcacatcgatctatcggacttgaaccagtatatatcatggtgtccattactttgttttttgcatttattgttttttgattttacatactctgcttgcccctgctttactttcgattgttgttcttaatttattaatcttgtcattgttaattatttagttgtttagagtttcattgatttgattctgcacatttcgtcgtaattttcctacgaaacactttcttttattgatgactactcttattactgtaaagtattttagcacttccatctaatttttccctacataaatcacacaatcaaggcacagtttgctttttgttccagaacctttttaatatctatatagatatatttatttagtttacgatttaccttgagcaaacaattactattaaaagtcatcaatcttctataaataatataacaacttcaaaaacgaaaaatctttattgcttggccggattaacatatattcaaaacataaatacttacacttctttaataaaatcaaaaaaaaaaggcaaaaggtggcaatattaataattgctttgttattcaagtatatgtgagctgttttcttagctagctcaaaagaactgattgttttttcttcgattctagaggaatgttttgatattaaacttcaaactatacttccaaaatatttttgataatattattatttaatcctcaaactaacacttcggaagatctttaggtggtggtagaacagattcattgggcccttttccattgtccacaa

SEQ ID NO: 61176 - DNA, 993 bp, Cannabis sativa
  modified_base (964)..(967): a, c, t, g, unknown or other
tacatgaagtgaacatgattaacaaagaaaatatttttgaaatggacatgaatgaatcttttgaaacttaatgtttggaatgtgcttaaatgttgatgattctatttatgatgttaattctttgcttgagtctacacctctaatggatactgaaaagtggaaagctaaaattgaactatttattccattagagcatgttgcgtcaactcctgagccactaaagttatatctcaaaccatttcctgacacatcaaaatatgcatttctaggagagtctaacacctatcctgttatcattgcatctgatttagatgaaaaataagaagcaaagttgttatatatattcttagaaagcataaaaaggtcataggttggaccatatgagacattaagggaatcagcccaactatttgcatgcagaattcatttagaagaaaatgctaagacctcctgagaaagccaaagaagattaaatccaaatatgaaagagggagtaagagatgaggtaattaaaatgttaaatgtagggatcatttaccctatatctaacagtccatgggttagtccagtccaagttgttccaaaaaagtctagcccatgggttataaactaatttattaaaacacaaacatggcatccctattagttagggtgttacatattttattctattttgatatgatatgcattaatctctcaaactaggattcttgatctcgaaggaaaatttgtgggatggctttgatggagtctagagtcacaatgatgactaggcatatcaggattttgtctgcacactttctattagggctttacatcaggtgggtttaactgggtttgggtttttcgggttcaagtttcgggtgtaggaaattacataccaaacccgcccattatagcaccaggtttagagggtttcgagtccgggttttaccatgtaatacccggaattaagaaatggatnnnnaaaaccctaactagataattatgtat

SEQ ID NO: 61177 - DNA, 924 bp, Cannabis sativa
aaattagacaaaatattttgaccaccatagtaatatttatttaaagtagaagatataattattaatgaagtaagaaattatgaaggaaataaaagaaaatattttttttttctattgtttggtaaacaagaaaaaaaaaagttcaaatatgaaagttactgttttgtttgtataattttaattttaataattaatagtgaaataattagtaatttacatatttatctttgtccatactcaatttctctccaattttaagaggataaattttatttttctcccaaacaaacttatttttattacactaatagttaccaaatattattataaatactatgttatagtttggtgtatttttttatcaaaaaaaaaaaaaaatcattttttacaccctacttttatctcttaaattttctttaaacatatagggtttaatggccccaatatacaggtgagactagtcctgttttcttataaacatgaatacacctttgctggcttttgattttgtcacttaagaaaatcaagaaaaacaattacttaatatatatttctatttgtttaatatattctccattctagatttatatattttattatctttaatttttttaaaaataaattttttgatatttcaacaaattaatctaattattaaagctgaacataacttttgttcaattataaaagaaagctataggtagacccatctgtattactatccctacaagacatgtgactaaatatgctgccaaaaatttgatattgcgcttgtaaaatatgaaatttacttctaatgtgttgacaaaaggggttggcgaatcaacatcggtattagaacttttgccagcacaaaataaaaagcgctagcaaaaataatttttcccatcgcgtaaatgtgctggtaaaagttagatttagcca

SEQ ID NO: 61178 - DNA, 767 bp, Cannabis sativa
aaagttggttcattgggctttttagccatccaattttcgttttgtgatagctccaaattatttaaggggcttttacaccacatacttaaattttaaatttttttacttttctactatagagcagaatttttttaaaaaatactgtgtaagttttatattgtgtgttgtgttaggttttcactgttattctacggttgctttttagttgttccactattgttttaattgttctgttttgttattttataaaaaacaatatttttgtaaaaaattctatgcgacagtaaaattgtaaatttttatctaaaattcaatatttttgtaaaatgcttaaaaaaatgtcaaatgagataaatatctaaaaacaataaaaggtttatgtttttacggaatactgtgtttttgatatacttttttactgattttttttacttgtttttaggttgttctaaaaaaatattatattcatgttacagaaatatagtataatattatggcaatatctaaaaaataccaggttgtaaaaatgtaaaaaaaaaattataattttaggtattttgtttaaatttcttatatcaaattatagaaacattcaatgagccataggtccacttcaagatgaaatcctaataaaatattgggataattatataaagtactattttttgtaaaatttttacatttttacgttcaagtatttatatatatattacatttttacagtaaataatgaaaacaacaataaaattatataaaaacaacaaaaa

SEQ ID NO: 61179 - DNA, 1699 bp, Cannabis sativa
gtaatacgttgtataaatatatttttttagctaatttgcaccaagcttgcagaggtcctcccattgcttgtaagtcagaatcaaggcgtgtttgtgaagaataggtctcttgttcacaacattctcatttttcaagaccttaccaagaattacaacaggaagaacacctctccgagatgtgcaataaagattgatcgaagcaaggcttatgacactattgatttgtagtttttggagagattgttgaattttttgaaattccctaacttgttttattcattggattatggtttgtctcaatagaacttcttacactttgatgatgaatggtaggtttcaaggtgacttctgaagggcaaaagggttgagactgagagattctatatcccctcatctctttgtgatggttatggagtatttcactcggcttcttcaattcagaattaaagacaaacatgactactttagattccatctaatgcgtaaaagtctaaagattgtcaatctttgctttgtgaatgatcttataatgtcacaaagggttggtccattgtataaaagaagtgtttaaaaagttttacaatagtacagggctcggggctgataaaaacaagtctcacgtttattttggaggtatttctcaggaggaaaaggaagagttgttgcaaatccttcaatttgaagaaggacattaccctcttaagtaccttggaatactaatgagaccaacaaaatagagagcagaagattgtagtattattctaaaaaagattcagctgagattgtacacttggacaagccgacgcctctcttatgcaagtagatctcaactcatcaactctattttagttggtctttggaattactggatgagtatttttatgctctctaacaatattgttaaagaggtggacaagatatgtatgtcgtttctttggggtcatgataatgggagaagcaagttgcatctgatttcttggggctaggatttcttacccaagtctatgtgggtttaggctttggggaagaaactatttggaacaaagccatgattgccaagtacttatgggcaataagtttcaagcaagactccttttgggtcaaatagataaatactacttatttaaaaggctaagacttttggagttatcaattgaaaggagatattagttggtattggcaaaaattgtgtcggcatagagatactttctccaaagatgatattgagcaagctatggtgaaaggtaatttcaaagtgggtttgttatataggaattctttgcctcttaaacaagttaagtatcatcattatgtttggaataagatgagtattcccaaacataaattcattttctggcaagtgattaatactaagttgcttactagagaccacttggatcagattagcatagatttcgagagcttgttttgctgagtttgtggtattgatgaggaggatcatgagcatctcttttttaaatgctctttttctcagttggtgatccaacaggtgcaaagatggactggctgtaggtggccccgaattttgatgattggaattcttggcttcaagggttgaagcgagagattaagactgaagttgtttcgacaatcatagcaactgtcacttactatacatatcggacaatagaaatacttgttttttttatagttatttttatagtgtgtcttatatcgt

SEQ ID NO: 61180 - DNA, 1101 bp, Cannabis sativa
tgtacatatcaatttagtagaaataatctcattacttgtaaaaagttatggtatctgagtcccacttctaattattctcctctttttttattttcttgttttgcgataagatggatttcactaattaattattttaataaaataaataattacagtcttaattgttttggtcaaagaaaataatttaaatgagagaaatatatgtttagaagaagatttgtaataaaatcccaaaaaagaaaaactcaaaaatttaaatgaaataatacttttaaacacgtggaaggttattatttggtcaaagaagataattttaaattattattttcttgagtgataaaattaattttgattgtttgttaatttttcttaatttggtatctgatttttttttaaaaaaaaaattaataagctacaaacaaatacatgttacacaatgttgacttttaaatatcatatagatgaatggttaaaaaagtgtatgtatagtatagggacaaaaatatagtcaccaccatagaattattatgggtgcacttttaatgggtattacccatgaatgggtaatattaggaaattttgcgtttttatgattaatttttctatttaattaaaaaaaattctcatttttacattatatgggctgggattggttcatcagctaaataaaacaataataaaaaaattcagcaaaaaagtgataaaaaaaagttgacattgacttaaatatttttcatataaacatatttttgatatagagtaaaaagaggtattttttgatatttttctttaattaactaaattaagcataaaaattcaaatttcttttttattattcgttatcgatcggaccaaaatttaatggtttaatatttttaaattaatatttatagttaaatttgtttagtacctattaatgggcaatacccattgagaagtattccatttatatatataatatatacagtagaacctctatctaaaaatgctatatttaagaataacgtctaatttgttataaaaaaaaatggggctttttcatttttacacttcagaacaatttttttgcatttttgtcaaattctacatagaaacccctat

SEQ ID NO: 61181 - DNA, 1452 bp, Cannabis sativa
  modified_base (39)..(41): a, c, t, g, unknown or other
aaatatttaaaattccgtgaaatcgtatttttgtaattnnnttgttgtttttatgtttttgtgaaataatcccataattaatgaatataaagaccatgtattttacaaaaatattaaaaaatgaagatacgttttgatatatatggcataaatacttaattacattaaatttagtatattttagaaaaacttacaaatatgaaaaaagtcatgagaaatgctataaaaaactttaaatttgtgtttctttttattttttttaaaacactaaaataaataaaaaatgagctcaattgtcgatgctgtttttttttagaaattaaacctgtttttttatttaaattactgattgatttttttctggttaaaaactaattatttaattaaaataagtagaaaaaaaaaaccagtttcatcaacatcatcttgaaaaaaaaacaatctaaaaaattataatttaaaaataatacaaactttaaaaatcagtttcatcaacattaaaaaaaaaaactaataatttcattaaaagaataaaaaaaaaatagttttatcaacaagataataataaaatttttttttaaaaatgatactaactttaaaaaccagtttcatcaatattaagaaaactaattattttattaaaaggggcaaaacaaaaaaagtcatcaataacataatgaaaaatacacaatgtctaataactaaactttaacaaacgatattaaattaaaaaaccagtttcgaacatataaattttatatcaatataataactaaatttctaactttattctttattttggcatttaattttttatttgcttgctcaaaaactagagttgatttaagcatacaatatgcatcaaatataacaaatagaatcagaaatcaaagagacaaagagaaaaaaaaaaaaacaaacaaaaaaaaattaaagagacaaaaatgcaataaaaaaatcataaaagaaaagaataatatttaaattttttaattagggggccattttaacgaaatttaactcgaacccaatcttcatattcatgtcttagtagtacaaattcttgtgactaatgacaaaaaatattctacgatgggtccgggctacatttcacaaaggggtaccattatcagaaatgtgtgattttcactatttcgattaaaattattgttagtgcatgaaaactacttttatatcgcaacgtgtccatcagaaaattgatgcacaacattcttggcttcttcctcgtaaaatttcacaatttttgagatgtgtagggtgagcttctaacagaacactaacgagtgtaagagtaaagaaagaacttattgaaatttacccagtataaaagaatattttcaatttttgaattagggggccattttaacaaaatttaacgcgaaaccaatcttcatattcaagtcttagagtacaaattaatatctgccatta

SEQ ID NO: 61182 - DNA, 1093 bp, Cannabis sativa
tctgaagaagagtcaaaatgaccccttctcagaagcctaatagaattccagtagccacttttcacagtatactagttatagttccaaatgagatgatcttgagaattgtgactttgaggaatagataaaatctgcctagcttcatcatcagagaacaagtcatcaatcaactaacccttccactctccattctcatgaatgaaatcactaaccatggttatcttatcacatgatggccaccaaaagaataagtaagagcaacagatcttttaggaatccatacgtgagattttatgttaacatttctaccatcacctatgagccaatgagttccatcttcttaaagttcatgaccccaaatgatacttttataaatgtacgaagcctttgaagtttcagatgcattgagaaaatcacaattaggaaaataaatccctttcatgactcttgctgccaaggaatttagaacagaataaagcctccatgcctacttagccaaaaaagctttattaaacacaaataaatcgcagaatcccattccactattagacttgtccaacataatctctcacaagtacatcaatggatcttctgattatcatcatccccaccccaccagaaacgagcacaaagtcggtgaagttcctaaaccaattttacaggaagatgaaaaagattcatgaaataagtgggggatggtttggatgacagcttgaggagcacttttcttccactagcaaataaatacttagacttccaaccaaagaacttattgattggaataaattagacttaatgtgacctacgaaacaaggaagtcccaaatgcttttcatgacaaggaagacattgaacccttagcaaagctgccaaattatctttcatacctcgagagacacccgaagaaaagcaaacagaagacttggaaagattgagcaactgacctgaagcacgttcataacaacccataatttctctgaatctagcacaactctccttagaagcttcgaggaagaagaaactatcatcagtaaataacaagtgagaaaccatcgggccccatctccctcaaggcaacccatgaagcctaccca

SEQ ID NO: 61183 - DNA, 1436 bp, Cannabis sativa
acattaaacctcaattaagtctttttgatttcaaagcataagttgttgagattagtggagaaggttaaataatgcaagcttattaataatcgatttgtggatgtgttggattgagttgagcatgtatattaatttctaaaatttttgacatttgcgagttatatttttcttttctaatttgttactattggaagtaattggattgaaattctactttcaaaacagttaaatcttgggagtagtggtggtgtggtgtgaattgaagtaaggcttgctttgggccttttgttttagtttagcgtcgagctttacttgagagagagtaaaggttaaatttggggaagtttgttaggttctaatttgtgctacttttaagtatgttttcaaagtatttttaattagttttagtttaagttacattttctgcaattttatgctttagtttgttaatattttcacgtgtagtaataaagaggaagtgaacaagttggaagaaaaatagtgtgaaaaatcattaattaattaattgaagttttttcgttggtgcaccaaaggaacagtccgtggaataatttagaagatccggtgcaatcggagtcgttaaagttaaaaaaaatgaagaaagtagagtagcgtcgtggcataaaaattcaatgtgagggcgctattgtgctaaaaatggggagagaggtcgagtttcaaaggaaatattcgggcctcaacattagagaagctacattgaggcatgaggagagattacagtatgcctaaaaaggggccaagcgggccgcgaaattgggaagtgtaggtcgcagcccgctatgaagaaattggtatagtcttttggatttttaggacacgggttgcggtatgcattggaccatgtagcaacccgctatggtgagattgcattggtggtttttaaaccctaatttcaaagcaggatttgacttttgactttttagacttttagggatacgaatttggagacaagaagcaactggacaggctaccaccattgttcatcgacgagttcttttctttctcttttaatttcaagtttctaatctatttaattcaattgttcacaatgacaatgagtagttaaatttttaattagggtgttaatggatattatttgatatttttttatggtttcatgcaattttagttcttccctaatttcttatgtgcatctattttatttatgcttaaattttataattgtttgatcaccaattatttgtttatgattttaacgcaaatctgaaaagtaagtgttgattatgttgtaatgaactagacatagatttcaatattgaatcaaattacttatatggtctatgtagcaattagaatttctatgcttaatgcaaaggctaattaggatttttttctcctcgaactttgacatgtaccaaatcatgccctctgaa

SEQ ID NO: 61184 - DNA, 4574 bp, Cannabis sativa
ggggtccaggtctagatcgcggtttagggtccgagtctgagtctgggtacgagtcggggtcggggtctgggtatgggtccgggtctagttcgggttcgagtccaggttcgggtggggggtttgggtcgcagtcgcgatccgggtcagggttggggtcaggtccaggtcaggatcggagttcaagtccagagtccgggtatgtgagaaaaaatataaaatataatgtgttagataaaaaaattatttttgaaagtagaaaataatattttaatatattcagttttctagttttttaaaactcaatttttaaaatttttagccaaacaacccgtattagttttaaaaattattttttgttttaaaataaagtcaacttttaagctatgaagccaatcaatttcttaatttttttttatttttaatggataaacacagtatcaaatttgattgtaggcttaaactaagaagatcaaagtagaaatttcattatttatttattttatgtttaaatgtcagagaagcatgggcccaaacattgggtggctccctcccaaatgtcagttagataatatcaatacaaagaagcaaaagtatcccaaaattgattctccttgtctattatttctattgtatcggagaaaacaagtagttagatatctatataatatacccatatatgtttgaccctacattattaaccttcacacatgcatatttccttcaaaaaaaaaaacatttcataaaacggaaaactagtaggaattaatacaatcatcattctcattacttttttagtaacaagtatagagttggttttacacaatatttctattcttacactatagacataattttcaaattcccattgattaattcattctcaacgtatatatacgtaaatgatatatgttgctaattatacattatataagtaggacaacgttcaatacactcacatctacgcactcctataattcatttaataacattttttatatacaacatacatgcttcactacgtgtaattgaatatataaagtgtccatatttaagataatactaaaaagacaagctttttacaagaggcttataatattttcagactcaataagaaaacaacttagaaggaatgagaggcaagtcaacctcatcacaccactccacacacctcgtctcaaaatgagaactcttaatttgattaggcgaataactcagccaaacttgaccgccaattctccacttcaacacactcccttccatctctttactcagtctccaccccactccttgtccatactcatctcccgctagtaccaaccctcctttcttcgtaaacaccctactcccaccactgtaccgctccctcaacccctcgtaacaattatcgccacccttcggtgatgacctacgccccgctacttcctgccccgtgacgttgtcatgcaacacagcatcgaacaccgccgcgttcccctccgcatcctggtcccaacgccaattgctttgcttcctactatttgatgtcatcgccgtggtttttacctgaacgaaattttatttgtaccccataaaattataagtgcacttcaatattaaaaaataattaacttaaattcatttttaatatatattttttaaattacttttttacatatttttatttaatattaatagttttatttttttcaatttttttttttaaatcatgtatgattttttaaaaaattttcgaaataaaattttatatattttattttattttataagtatattatttaaaaatataagaaagaagaaaaaaattattaaaatagaatttttttataattttatgaggtgtaaataaaattctttttaccttattcggagactttgaattttcgaaactgcccttcactatgttctgggccacgatctctctctccccattgttggtggaccggcccagactcagtcccgccacgtagtttgctccaacttctggcccaacccaaactcttattctcgacgggaaatgcttctcttccccgaactccacgtcatcgtctttgttgtacccgagttgtaccacgtggacgcgaaggttgtctacgcgcgcgttcacctgaatcaacccttcgtaaaatccaaccgtgtattccaactgaataactacttccagttgctggtgcgccagcgcgtatttgagaaccgcgtctttcgcttcaaaagccggtaaataattactcttactcatctcagttttggggcgtgtgagtttcatcccccagacaggcgcgtaccccttgagaacccaaaatccatgagactccgtcgcgtaagagaatccgactttcggagacgacaataacggagttaacgtttgtaatcctacgcccacttcccttaaaatataccattttgctaacatgtacccaagggtgcgcatgaaacacagctcagcatctactcctaccgttaagaaaaacgtcttcaaagccggtgagctattaaacgacgtagtttcaaggttgggagctaacaaggaccggaagtagaaggatccaacttcggtgggggaatcgaacgcgcagacccagaagaggcgcgtgaggagaatgagattgaagaaggtagaaaaagactctgacgtgtgagaatccataatccatgatacgacgtcgggtttcagcttctgaagctgagaacgtgggcaggtgctatcttgcgcagtgggtgaacgagagataatttcttggagaagctgaagaaccagaggaagaaatggcttatcggatgagagtgaacacgtgtcagaaacccatattatgttttgggagctgtgaaagccctgaagacaaacagagaacgtgactaggtcatcaatgttggagcctgacgatttctcggccctgagttgaatagaccgagttaggctgtggagctgagtcgatgcagcggtagtggctagttcaaatgatggatttgactcggtccagtggtgatctgagttaggcaactcacatatccatgaccaaacgtccatcttgttaaattaatgctttgaatatttctgagataaggaataaaattgtgaagaggtaagtatttgggagatgatggggttttaataaggagagattgagtgatgatcagctagacccaatccttagggttaacacaaaccacgtatgtctatatctgaggaaggttatactgtctctaaccagtggttctaactgttactagctttcattttcttgattgttgaagatttctatcataaatatgtatgtatatatatatatgtgttaatatttgaatatatatacacattcgaatccatgtacgtactgcgtggatcatcgatagcgccaaatgaagaacttggaagtagtacatatgtggggcttggccgtttacacgtgtaacgttatttagcttggcacaaaatagacctgtctgaaaaacaaatataatataaattaattaataataaatgagaggagaagaatagttgtcgatcgattgatcacatccattaccagaaatcttaaatttgtctgaaatggtaattatatatatatatatacctttgcacgaatataatatattgaattgaaaaaaacagttgtagagatattaaaaattggagagggacgtatagtcattcataagaatatggttaaggagattaattaaaagttgaattgtgacgttgtatggcttttattagtgttacgcttcaaagttatgtgccttacatgggttataataattaagatgaaagattaattcgacaacatatatgaagagattagatatataactatatgactaatgtgagttgttgtgacatgcatgcagattatccagctactagagagtacgtgtatctaaaggagccgctaattggatagtaagagcatcaacattaatgttaatgctaaatgggctcattatacaaaaaaaaaattgttgatttttcaactaaaatataatgtttgtttcttctgtcaagtgttcttaatttttttttttatttttgatattattagacaattaatatatcattaaaatattatataaaaaaataagttgtaggccatgtactcaacgaaagcgttgcctgttgatataagagtcatctattggtagacaaagagagattatggtggaaatctagctaatcaagattttttttatgttattgtacattacaattatttaagacattttacaaatttttgaaaaatttaaaaaaatttaacacgctataaataagattcaaattgtctgttgcatgtgacttttttataatatgcaccccattaaaatggttttttttttttttttgttgaaccgaaaacttcaataaaccagagaaaaaaaaaccaagtcagtcaagcgtagcaacaaggagtgctacatccccaacacaaagagacctaaaaatgttatgggacgcagcccaagcagccacattgtgagccagggaattgtccttacgaggaatccaaaacacacaacatttagcatcaaaattcagacaagaaaataaatgcagaaatagattagtgagcttccaagagggg

SEQ ID NO: 61185 - DNA, 510 bp, Cannabis sativa
aggggaaaccgaaaacatctcagtgatgatatgattgcacacaatatccaagttatttcactgctgaaacgataagagatggtgttgactacaatttatgattgaaaatatgtaaggaatcaaatgattacaaaatctgaaacaaatgaaatagtaacatccacaagattatgaaccaaacaaagaggaaaactgactcacaatgcaacagagtacatagttggaaggggagccactatggacttatttattttgtttatcagaccttgcatatcctgagcaatcaaaacaacagaaacataccgatcactaaaaaataaaagtaagctagcttggaaaacagtgagacattgaagtcactgaataatactttttaagactaataagaaacaaatttgcaccgaaggtttccttcatcttttcttaataacgtagtccaaagaaaacaaatgaagataaaaataatcaagttcctattttattaacagcaacttacaaatgctttgaaag

SEQ ID NO: 61186 - DNA, 2236 bp, Cannabis sativa
gatacgacatatagcccgtttactaccgcgatcacactgtaactaattgggcgacatcaaggagtaatgtatagaagagggttcttcatgacactacttagatgtgtcacaaaagaagaagctgcacgagtttttttttaagtacatgatggattctatggcaactacgcagccggacaaagcctatcaaagaaaatactaaggtaaggatatttctggccgactatgattacagattcaaaagcctatgttaagaaatgtgatatatgccaaagattttcaaagataccccatgcaccacccaacgaactaactcagatgtaaagtccttggcctttttctatttggggaattgatctaattagacaattgcctaaaggtaaagggagagtacaatatgcagtggttgcaatagattatttcactaaatggactgaattcgagccattggcaaaaattacatccaagaaagtgctagacttcatggtgcaaacataatatgtcggttcaggctcccgtacaagatagtcttagacaatggcacacagtttgacagaaaattattcaccgatttctgtgcaaataattgaatcgtaaaattttttttctgcagtagcataccctcaagcaaatggtcaagtcgaagcagttaataagacacttaaagatactttgaagaaacgacgtgaagatgctaagaggaactggctggaagaacttccagaagtactatggtcataccgcacaactgaaaaaacagcaactagacagaccctattcgctatggcctatggttatcaagctatgctacccgtagcattagaacccccatcccacagaagattgacctacgattaagaggctaaccatgccctcctagcggaatcacttgatgaaatcgaagaaagacgagctgcatcaaacctaaagttggtggcccaccaacaaaaggtggctcagtattttaataagtaagtaaaggcacaaaaattttttgttggagatatggtccttagaagagtatttttgaacaccaaagacagcacggtacgtgtgctcggatcaaactgggaaggaccatatcaagtggttgaaattctagaatcaggagcatacaaactgggacggtatgatgaaaacatgaaactcgttctagtaccaaggtattgaaatggggaacatttgagaaaatactaccagtaacagtgccaggtcggatgaccattctaagtacaaaatctaagaacatttactcttaagtaaaggtacgatattcattgaaaaaaaagataacaaagcacggtaaatctgggatcaaaagctgcccagtcagccagttgtctaaaaaatgaaaaacatatttcatgtttaaaaaccgcttggtcaatcatttttctcaaaagaaggcctataagctgaatagacatatatataaaaaaaggaagaaataaatattcaaacaacaagagtctgaggctcttggtacggatcgccttggtctgagggggccagaggatcaacactctaggcagcagggattttgttcctttggtcagctggagctgtggaggcagtcgcctcggggttttctttggccacctgagctgcgtagaaatcaagatacatgctcttggaatcgccacggtaataaaagtttccttcaggattggccttccaaaaatcatagaaaacctcaagagcagctgtctctaggctctccacctccttcttgagctcctcctccatggtctgcttaatcctgatctccttctcaagctcctcctccctagtttgtttattcttgacatcttcctccagtttggaaagaagagtccgaagacactccctctcatttttaagattattgacctccttggacaaagaaacattatcagccttcagctgatcggtctaaagcatatcttgcagctctttggtcagctcctcaaccttggtgttgctagcaagaagcctcttgttcacctcccaaagctcattccttacttccccaggctagctcctcgtgtcctcagtttccattctggccatatccacctacctctacagtgtgttggtggtggcaaggttcttggcagcagctgatttggctatggaataggcatatgacatcttcacattgacctgcacgacaaacatgttagggtttgggctacataaaagagaatgaaataaaaaagaagatatttacccgagtagctgttgggttttgtgccct

SEQ ID NO: 61187 - DNA, 586 bp, Cannabis sativa
atcatcatcataaacaaaaacactaatatataaaactcaccatgaaatacagaaatggaaacaaagatgatattggtaaagctgcaaaatttgaacaaatacaaaaatgatgaaattaaagggtaaaatgaaaaaaagattataaatttatgtattaattagttaattaattacctgcagcaagggcaagaagaaaaacaaagaagaaatagttgaaaggaatggaagaatttgattgcttaaacttttcaagaacacaacctgggcatctttcttcttcttcttcttcttcatttcttaacagagccacttctctgttctcttcttcatccatttaattttgttattattattattattgttgttgttgttgttgtttgttatatataatattttattagcttaataattaagtatagagtagagttaataaatagttaggtgtccttagttgaaaacgtggaaagagccaaagtgaataaatactattcttaacacgaaacagagaaaaaattgtttattgaattagaaaggttttcaggtgattacaagagtgtggcaaaacacaattatatatagtgttaag

SEQ ID NO: 61188 - DNA, 839 bp, Cannabis sativa
actcacaaattagtttcaacaaaataaaataaagtgatgagaatatataaaaattaacaaacacaaattatgagaagaaaacaagctagaattattaaattagacgaaaaaaaatataaaattgatatgatgatgcaaataaatattattgtaaattgataatgtcaattagaaatttaaaatgtcataatcctttttcttaaagtgtttatggtttgatttcctaattaattaatatattcctgtgcccaattaattttaagaataccaatttaagtacaatttctctaagtcgtacaaggtaaataacatattctgatgtcatttacaaattatacttttttaaggtaatattcatgcatcattcaagcaattttactaatcttatttttttttttcaaaattaaaagttagctggtacttactaatggtgatcaaacaaaaataatcaattatataaaatactctttaatgaacaaaatcaattcatttaatcatagcaacaaatatcaaatcataatttctagtcaacaaataattctaacaaaagagaaattaactcataatagattttgtaaaaattacaaattttaaaggaaaaagatatagaaagaaaaactcattttagagttgatcacaatactcaaagctcttcttccaagctcctcctctttcttttgatttttgcaaatctcaaaaataaaaatgctgaaataagactaaaaataacactcaaataaaactctctcttttcttttctttttttctttttattcttcttcattttcttctcttcttagtgttggcatcctggctggagctcacgctgccgcctcttc

SEQ ID NO: 61189 - DNA, 720 bp, Cannabis sativa
cttatcttgactaagagggtgatgcgagtcaacctaagagggtgacttttctcgactaaagggattaagaagagtattatcaacacacacacttaacatataataacacttaacatataatcgagactctataggggtcttcctacctaggtggcgcagggggtgcttccaccactcctgtgccactatgtgttgccaccatggtggtcgggttgttgcatgtcttcatcttcatcttcttcaaaacttgtcatcttcaacttttcacaagagattggtatatttttatgggacgggaagaggtggtgtccacaacttttggaaagccatcctgagagataaaacccttcacctaggtggtggagggggttggtgcactctcttagtggcaataggagattcgtctcttttttggggtcttcagggtatttttcgtctatcttgaataggtttatacacctatttacacccccaaagtacccccaaaactctcatgtttgcaatcatcaaagcactcatgtttcactctgttagataccttggcacaggtcttgcaaagttggtatcacagatcttgcgccaccatcttctctgtgttcacaaagaatttgtctgtaagtattttggccataattttctcaacataccttaaaattagacgatttaagatattttgaaaaactaagaatgagatctaccactattttttttttttttttt

SEQ ID NO: 61190 - DNA, 1231 bp, Cannabis sativa
ccttggtatagagagaatacggtgtcccaacccatttccaaacacttgcaaaaccagttcttcattccattcattacctgatgaaatatctgctacagttttgattgtaaatccattattcctcaagctactcataaggtccaaaaattcaggagcttccatccagggaatccacggctgttgccatatatttatagtatcaccagaagcagcaacagaaatggatcccttgaggattgttggtcgagtatccaggatgcacttccaaagataagaatcattactcttgcctttaactgcccaaaagttctcataattgcaatactttttcagcatacaggagacccaaggcttcttttctttggttgccaaactccacgctaacttagttaataatgctttgttgatatcttcacatcttcttaagcccaagcctccagaatcctttggttgacatatcttatcccaagcctttagagcaagataacggtccttatccacctttcctgtccaccaaaacttcctcatcaaagcatctagatctcgacaattagctaaaggaattttagcagtggacattgcatagattggcatagccgaagttactgattttatcaaggttaatcggccagcataagaaatgagtttcatcttccaaccttccaattttttcagcatactttctctaagcctctgataatcttcctttttccttcttttgaacacaaatgggttaccaagatgcctctcatcaccattaacttgattaatgttgagaataccgagaatatcgctcttcctttcaatagacatgttcttagaaaagagaactccagacttggatttgctgcaagattgcccagaccaagattcataggtggagaggcaagccatcaacttgttagcttcatttgaatttgcacgagcaaacagaatggtatcatctgcgaacatcaagtgagaaatcggggtcgctgagtgcgcaattttgatgccatgaacctcattctgagcttcggctttggagatgagctttgaaagaacttcttggcaaagtaaaaataaaaagggggaaagaggatctccttgacgaagtcctcgttgcggaatcaatttcttaagcggacatccattaagaagaaccgcataggaaacactagtgacacaagccatcaaaagctttcgacatttctcagagaatccattagccacaagaactttttctaagaat

SEQ ID NO: 61191 - DNA, 674 bp, Cannabis sativa
atataatcatgatttgattatagcttggaatatattttatgagaatttataagcatcacctaaatgttgcaacaaaaagttatttatttggagttcttagtatattaaaaatttgaaataagtcttatctaaaaattctaaaagaatttgatacatatattaagtgatttaaattcaaagtcgcgcgcactatatgacaaagatcattgtatgaaataataagtaaattattagttttaaaatatgtatgattttgtatgcaatataaatttgtaaattatacgttgtgatagacttttcaagagtttttgattatattataaatgattgaagaataaaattttattttattttttgtatattgagaaacattaaatgtatgtagtttgtttattagtatagaagttctaaagtacttcatatgcattaagaattatagatatcaattgatatagaaataaagatcatacaacaaaaatggaacaaatatatggtcttggagtactatcattctcgcaaataaaaaattatattattattaatgtgttgtgttcatattacttaaaattttaaacttttgtatgaacaaagttgtatacacacatgaatgattcaataagttggataattaatgatgttccatgaacccatcatccataattaaaagtccacac

SEQ ID NO: 61192 - DNA, 1184 bp, Cannabis sativa
ataagcccattcaacgccacgttaatattttttcttcttcacatcacaactctctggtgtacgtcatcatgcataacttaattaaactaccatattgagaaacaaaaactattatatatttcatcgaacattaataagctaattatagattagcaaataagtccaattgctagttagaaaattaatgaataagattaattataaaatatatatatatgacacaagaattagacaaacgattaaagcacttcattatatctaattaataactacaaaacttcagccaaattcaaccaataaacagactaatttttgtttaaaaataatgaatttggccaacaaagattttttcatagagatatagaagaactatgattcctttactctagctaattatgatttcacatatacctaattaagaaaaaaaatagcagatgtgtaagaacaaatatatataatttcattttcttaattatatatatcaaacaattcttaaagaatattccttcattatataatttttatttttttttagaaattaatcaactcattgtattctattatatatcaaactttacatcctaacagcactaaaaaaagaatgcatgcctgtgtattttgcactatgcatgtatacgctttacaatttatcaaaccacatcttctcatatatatattttttggcaaaatagctgatattctaaatttcacatcctatatttcactctataaatcaatgtattcaaagtaggcaaacaaaattgatttcatgacacttcatttctatctctccaaacatgataaactatacatatacgtacctatcgttgaaagttggtagttttgttccgtttgatggctcacaacaaattctgtaaatgagtattactccctgttctacgccagccaagccataaagaaatagcttccaaacaccttttgctatataacaacagtactcaaagaagagatgacttgctgtttccattgcttctgtacaataatcttcaaattgatgttgaaaaccatacaatataaatttatgctttggagtgatatgaatcgaccccacacatcaccatactaggacacatagattttgttcaggaaattcaagctgttcatatcttgtttgattgtatacctaatcaacaataatcaacatgaactgctggagattgatg

SEQ ID NO: 61193 - DNA, 834 bp, Cannabis sativa
tagtaatttaggattcatttggtctagtgtattgtattgtattgtataagtattatttaatataatactatatttgacatctactattgatagatttgtgtaaaattatattatctttatcagaaatgtggtcctagactttaggggtgcgcataaatcgattcaatccaattataattgactgctaaatattagatatccaattgggatcgaatagaatttaatgttatttttaaatatctaattagatcggatcgaatgttggatgtgtgtccaaaaatctaatacatatccaatatctaatcgaactaattagttgttttatttagtgaagaagtaattgattttatattattatacgtaaaatacatatgtatatatgaaaattaacattaaaattttactcattttcttagattggattgatataatccattccaatacatatttgacctaaaatatcagatgaatctgattcgatctaaaaataactatctaaaatattaaataagcccaaattaaactaataaatatgtataaaatacatccaattgatagaaccaatctaatccaatatccagttgatgttggatcgattgaatgactaaaattaattggatcacatcagatagtaaaatataacatccaatatataattggatcggatctgtatatgcctaaaaaaattagatttggtccaatgaacactccaccaaacccaaaccccagacctcgacctcggggcccgaatcccggtcttggtctcagtctgagtaccgatcccaatccaaattcgaagtctgggtccctgatcccatactctttgtaaatatt

SEQ ID NO: 61194 - DNA, 1596 bp, Cannabis sativa
ttagatcagtcttgccaaaaaatatttgagattgtttgacacatgtttgcattttatttaataagttatgcattttattagatcaagctcattcttgctcttgctgctattcaaggttggtgcttacatcaacttgatgtcaacaatgcttttctccatggagatttgcatgaagagatttttatgactttacctccagggtatagtcctaagggggagtttccacctaatgttgtttgcaagttaatgaaatctatctatggtctaaaacaagcttctagacaatggtttgaaaagttttctacagccttagttgaagaaggtttcaagcattcaacatcccatcattaattgttcattcaaaaaaaaagaatcaaccatcatcatacttcttgtttatgttgatgatgttatattggctagtaatgatatagcagtagtaaagagcttaaaagagaacctaaataagagattcaagttgaaagaccttggtgaattgagatactttcttggcattgagattgctagaactaatcaaggaattttcctatcacaaaggcactatgctcttcaacttcttgaagacttaggacaattgggatgtaaagttgctagtactcccatggaagttaacttgaaactcagccaagatggagaggaaaagcttgctgatcctaaactttataggagaattattggaaaactccaatatctcattataactaggcctgatcttgcttataccgtgaacaaactaagtcagtttttggtcagtcctagagctaatcatatggatgcaacaattagagctcttcaatacattaaagggacacttggacaagggcttttctacccaaccgactcaaaaattcagcttgtgggttatattgatgctgattgggtagcatgcgttgacaagagaaggtccacaactggattttgtgtgtttcttgggagatctttagtgtcatggaagagtaaaaaacaacatactatatcaaggtcttcagttgaagctgagtatagagcaatgtcaaacaccacttgtgagcttatatggttgacatcattgctgaaagaattagacattgatcacataggacatgccttattacattgtgacaataaagcagctcaacaaattgttgccaatccaattttccatgaaagaactaaacacatagagattgattgtcatcttgtgagggaaaaggtccaagaggggtttgtgaaaactgttcatactagcagtatagagcaaataatagacatctgtacaaaagctttacttcctaaccaatttgaaatcctcaaagaaagaatgggaatttgcaatatatacactccaccttaagggggagtatcaaaagttgttaaggtgttgtgtcttgagttagttaggaagttagaattctgttattttctatttgttgttggtgtatgaaagttgctgatgtgtgctatatatatgcccacttgatcaatgaatattcattcttccatttctcttagggcccgtttggttgatggtaatgggccagaaaggaatggaatggaatactaatgggcctgattattttgtttggttggaaaata

SEQ ID NO: 61195 - DNA, 2946 bp, Cannabis sativa
  modified_base (1628)..(1633): a, c, t, g, unknown or other
  modified_base (1661)..(1661): a, c, t, g, unknown or other
aaatgtgtgtttggccctaaaagtatatgtatttatatatatggtcgaatatttagagagagagaataagatgtgtcatgtagaagagtggctgtgttattattatttaataattggtaggaatggagggtaaggagaagttagagagagagagaatgaatgagtgagtgaaattaaatggaataatggtcagatcagatggttaaaaattgtatgacaattatgtatatggatgaaataatatatatatgtgtagttaattaattagttgttgtgattttttcatttttaatttattatataaccgtatgtagctgggtaaaatttaaaattttgattgtaaaaaaataataattttgtaaaaagagaatcgagaaaacaaacatttaatatatataagagtttctgtaacggtctgacacctatcaagttaggtatctttcactttaaaaatgataaaagatttagaagagtatatattatattatttgtatagattaatattcaatctcgtatattttaatttaataaacaatataaaaaacaattaatcatttataatacactacattgttatggtgttgggcaccataaaatgtctaatagtaatactcctttcactttgttactagagcaatgttattagacatgttatgatacttaatactttaccaaaatgacttattacaatgattattgatcttttatattatttataaaattaaaatgtgtgatacctaatattaatttacactaatagctatatatgtgaagtgcttgataccataaaatgcccttttaacatttgatagatgtgatctcacacatatagaaatttagttttcttcataatattttgatattttattgctaactgtgtataggtcatttagttgaagggcgttaggatttttgtcatttttaatgtaaacaggttactttatttctattaattctactcggtgagcaatatttgcataatataatagattagattcagcttacttattaatgaaatttcaataacaccattataatgtagaatatcattgctataagatagagtattgttattggacctagagagatagtgattaataatatttcttaaaagttatttaattaacttacataaaacttgttttaatacttaaatataccataatgtaaagtacttagttatcatttatatgttttattataaattttataaggtaccaatagcaatagcgagtagtgcctagcattacctatatgcctttacaattactttacgttggtacttgtattttttgagtggctctcatgtgaggtattctttggagacacgtgcatcatttttttttggatatgtttaacttttaaaatcgatacttaacacttaacaattaagtagcaccttttagtgaagaaatgttaaggtggaaccttaaaattcagagtactacaaattaggatgcacacatggtagagaaatggtggagagtgtttccttgtttccatccctattaaggatttcaatctccatccttatttattctatattagggataagatagaaaattccttaatgagagcggagtcggaacggaaaatctcctaataaaaaaataaaatttataataaannnnnnaatatataaaaatattaaactacataanaattaaaatattacacattaattagtattcaataaaataattattatccaaaacacaacttaaaattcacaaaaaaaatattaatatactaaaaaaatacaaatgcacattataaattataaaataccattaaaaaaataaaataaaatactaaaccggtccccttcagagtgagaagtgtgattcctgtcttcgctccatttaacgttcagggacaaaaagtaattcccgtacgtccccgccccgttccccatttagacagggaattcccgccccattaagagcgggtccccgcgaggcccatctctacaagagaaatgtgcatccctaaatacaagaatgatatattattaaaagtatattttggtctgaggtattatatattttaatttaaaaattaatataagagaaatccctacccaatatgaagcaccatattatagtatagtattgagcaccttaaaaagtcaaatgccaatggtcaattccaaaataaattcttgccaaagttagcccatatgacacttctcacagacagttagagtgttcaaccacttacttttacaaaatctataggacccgataagttgcctaaactgtaaaactcttggtggttatggaagagtggtatattctcccgccccttgtgaaaatttattgggctcctttcattgaattttttgtgccgcaagcttatcttaactctcacattagagtctctctcttactatagagcacttattttaaggtaatttttgcttattctttccctatgatgacttggttgattctccaaaaattcttcatcccctcaaatcaaggatcacgtactcgtgacctccccagtaagtaatcttgtattgccgctatcactaacagaattctatctaaccattaacatagtgaagtcacaccgagtgattctcccacaccgcacatagcctattatcttagcttctgaacctttgattctgatattattggccccattcacccaacttgttgggctgcaaactcctcttaactctcatataagtatgatgttattcatttggtggctgacctgtatagatttcgtttttagacacctttctaaaagaacctcttactaatgtagtagctgatcaatacttatattaaaagtaattcttacaaattgtttggatgtgagacttgagttgatacttcaacaaaaccaacaaaaaaagataaagtaatagaattggggaaatggtaatgcggtgccaccatgacactttatccaccactttctcatacgtggttg

SEQ ID NO: 61196 - DNA, 1046 bp, Cannabis sativa
atcttgacgtgaattgttgtgcactcaagcacaaaacaagaacacaatgcaagaagaaataggcttagaacattaaaccagaaaaccagaaaatgtaaaatgacagcaagaattaacgaggttcagtcacaagttttggataaaacttggacctaatccccgggtagaaacagctctattggctgacctaatctccgggtagaaacagctttattggctgtattaactttattgataaatggtaaagattacaacttacaacaattgagaatcaagaacacaaagtacactaacggtgcttcagttcacaccagtaactgaaatatgctcacaaaaggctgtcaaaattcaaaaaataaagtcttgtaacacctcaatcttgaagagaattcatctcactttagctctcattcttctttgtgtattaccctcaccccaacttgatctcatcctgttctgttgtttgttgaatgtctatttatagtagtttagttaggacacaactaatcgaaataactgccaactgtcaaggcagttaaattggttgtttaagtgttctaaacttcacataaattctataatttcagatggggtcttttctttccatttagaccatcactattcactaatgcaaaatctaaatatattgtcaaatttgacgaaaaataatcaaatgtttaggtaacaaatgtactaaagtagcatttatctaattaataaattttattatggtttacaacttaagtgaggtttcttaaatgtaagagagaatacaattttattttgttaaatctcagtaaagaataatgtaggacacgtcattaagtcctagttatgttatagccttgtaattacagtccaagcctacgactataaataggtttttggctcattcttttagaacttaggtgctgtttggttaggaaaatataagaatgagaatagaaataagaataagaatgaaataaaatttaaaatacgtataaaaatttgataaaaaaattattaaattttttctcatcatacattagaatggtgtttctttc

SEQ ID NO: 61197 - DNA, 831 bp, Cannabis sativa
ttagatgaagctccaacaacatttaccacactactaaccacactaaaaagagatgcaacttcagtatgcttctttgcaatagatagaagacaaagttgaagttgatgagaaaaacaatgaacatagaaagcacatagattttctttcaagattaatgttttatgaccatttaactctcctggcatattacttgccccatcatagccttgacctcttaatctagtcatgcttaattcatatcttgaagataacttatcaatagcctccttaagtgatgaagatgctgtattggcaacatgttcaatccctactaaacgttcaataacttgtcctttcttattcacataacgtaatacaacagccatttgttctttgatagatatatcacgagactcatcaacaagaataaaaaataatgagttgtcaatatccttgatagttagatcaattgtttcagcggctcagcacttattatatccttttgaattttaggtgatgttaatttcaaattctcaggagcatttttcaaggtaacaactttgacaatatcattatgctcagagagaaattgtaaaaggtcaagaaagttaccttggttgcttgaattctcagattcatcatcaccacgaaaagcaagcccttgtcttaaaagaaaacgagaaacatcaatggatgcacctaggcgagttcgataatcacaccgttcttgctccgattgctttaagaaaaatttctaaatatgttatttttccttcaacaagacattacacttcattatagcttcattgtgatcactagcaaacccctaacatgggtctgtagtctttcttg

SEQ ID NO: 61198 - DNA, 1146 bp, Cannabis sativa
  modified_base (1106)..(1120): a, c, t, g, unknown or other
tgtatttatttaatttttcaatttaatttttatttatgcttattatatataatttatacttaatttaattatattaataattaaataatatatataaattatgctgaaagatgaaattgtaaagctagtaaataccaagaccctatggcgtcagttttttcataacaaccgacgccgaagggtacttatgccgtcggttttttcataacaaccgacgcccaaagggtacctatggcgtcggttattatgaaaaaaccgaccccatagggaccctatggcgtcggttgttatgaaccctacagcgtcacctggaacagcgtcggtagcgaattttgccaaaaccgacttcaaaaccccttaaaaactgtctctaaagcacaattttgtagtagtgtttgttgaacttgattggaaacagcctaggttgacaaaatgtaaacctgggcgctgggcctagccctatgtttcaacctgggcactaggtcctagttttgccccttcaaaaattttgttttgtcaccagaaatagttgaatcgtaatattttctaaagacgaagataatgcttgaaagaattcttaataaactccactttttgtggcctaggttgtcaaattgtcaatttgggtatagagccagccctaggtgtcaaccaagacactaagtcttcttatttgtgctcaggaattgttgtttttcctctagaaggacctatttccccatttttgatgaatacggattcaatgcaaaactaggatcttcaattggacacttggaaggcgcctagattgacaaattgtcaacctgggcgttgcgtgcttagggcctcaaggccccaggtgctaaaagttcaacttgctcttaatctgattatgatgccttgaacatgtctatggtatgtctagttgatgtgctaatgaaaaatttgaccacttttcacatagacggtctccgacactactacaaaaagcactattcacgttggtcaacgctactgttcattgcattgaccgaggtgaatagtacaaggaaacattggggcatcacttctaaactgacgcaaaaaagtattaattagtgtcggttattgttggaaatattttaccnnnnnnnnnnnnnnntaccatgtatgtttcattaacatcct

SEQ ID NO: 61199 - DNA, 964 bp, Cannabis sativa
ttctaaatcccaacttgcatctatgtgacctgccctatcttccatggtaccatattgctcggctataccataaaatgactcgtgacagttgatctggacatagaatctaggatacaaactgtcaaacttatgagcaatgcggtccacgagaatggaattccaagtataaaaattaagacgggagtgttgaaaggtaagtaatgtatcacgctcaaccctaagtacagtaggtgactagccacattgattacctcaggatgttcctgcactggattcctgaggggcagggctttgaaggtattgtgcttgggccaagcgattccaggcctggtcttcgtgtggaacaattatttgctgccaagaagtatacttgggaatcttgtaatcacaagtgtattctttgtcagcgagaaggcccgccgatcgcaagtttacttcgttcaaaaggaatttccatgatcgaagactgtcagggagagtcatcaagcgcctgtgcctactaaccatctcgggggtaggggtgggtctcgtcagaagagctgtcataacaaacaacacattagtcaagtacttaaaaaaaaaggaagactgatgtaaataaataagaagagaacaatcacttatggagtttgcgaaatgtggctgtgccaatgggggaagaccagacgtctagaagcagtcgtccttgaaggacaccttatttggcaagtctacgataattttcggctcgctagcatgagtgccaagatagaaaaatccccctgcagcattcttcgtcgatggaacgactttaactgagtaaagatactcaatctctactggcgtgggacaaccccaattcataattttgtataagactttcaaactagcaagaatcctacaagaaataggattcagctggaatggggcaaccccgatgtgatttatgtaatccttgaagtagtcccgaagagggaggatggcc

SEQ ID NO: 61200 - DNA, 1020 bp, Cannabis sativa
atgttgtctagcattactcctaaaagttcttttgaattctttatctaaagctgatcttattcaatactggttgcatcgctcaactaaaaggatggtacattgaatgagatagaattaaaatatatttcaccaaattcttcttaatatatttcaagagaatgcatattggtacccaacatattcaaccaagtgtcaatcatgcatacttattcacaaagtcattaccaacatcaatatttgagaagatggttcacaagatcgaaaatttttgattagaagatctccacgaatgcctaaatgagggagagttaatttacaatgtactttttttcctttgaccaagttttttcaacaaagtttttaataagacaacctttatgaacatctcaggggattgttattaaatattattataaatatccaaattaatacattaattagtaccacaaatactttattatatttccttttattttattgtttagtttcctatcattttagttatatttttgtataaatagaggatttaactcattagaataaactgctaaaaaattctcaattaatctttcattttttttttcttttttctttatcttctcttttttctttttttctatattttatattttttttttattttatattatttataacagctggttaaattttttctcccttatatacacttaagaagaaaaggaaagaaaaaaaaagtcttatgttggctaaatgagaagggtgtagtattgatgaatatatatataatatataaataatagataaaattaatattaatgtaaaattttaaaatatggtgatgatatagcatgcatgctggtatgaaagtgtctatatatcattaatctttctacaaatccattaattgtgttaatggacaataatcttgatctttaatattattgtgtcaaagttttcttttattattttaaactataatgatgagtgatattttatcattgagtaatttacgcataaatattttaactttcagttaca

SEQ ID NO: 61201 - DNA, 1399 bp, Cannabis sativa
tattagttctacactcattttttttcgtgtactgtgaatttattgctctttaaaatataaatttgcttgttatttgcaaaaggacttatggtcaatactaaagagcgagaatactgtttcttgttttcctttattttagatctgaatccctaatgtaaatttaaatggaagcaatggagatgtgtgattgctctcagtttttggcctaccaagggataccgaagcaatggagtcttaaaccaacataaagtcaatctagctagaaaaattattgttgtgcctctacttgctgattcatttttgttgggcctgaatactgatgattagttggatgtggccgcgtatgctcccagtttcgaaataatgaactgaaagagagccggaggcaattcctacatttgagcattatgcggtaacttcatctccttctcatctgagttgtgacattcttaatagccagtggttagaacttaggcatatcatctctctttctcttgtactattttgttctttatcatgtaatttttttctctcttgaaatatactgcggttcatgaataataaaaaatggaattatgatcattgattaagaactctgctcacatgtaattttttgaaattgtttattgttgatcaacccacttggaatgagcctcatacaatcaggtcattagttgaaatcatttgatgtcttacaacttagtgaaatgtcactattactcatttgtttttttttttttaaaaaaaaaaagggctgccttggtttattaattacagattatagaaattggggattaattttgctttgactaaatttgtgtatttcatttgattttttttcctacatattttttggggaaacaattagattggtttgagtgatcatagtgatgatatttggatggagcgatgttaatgttgaattatctgctaccctcaagaagctggccaagcccgctgaaaggcatttgggtggtggtgaccgtctacggtaaataatccttgcctcctttagtttttagttttgctttgttaaaatttttagatgcatttatattttgatatatttagattctctttttgaaactagaagaaactttattaacattaattagaacctgaatacaaaagcgcctgcatatttttgatatcattagatttaagttttagatttgcatactttcttaatagggatgttagttttttagttggtttatgttggtgggtgaatttctcttaattaacaacaattaataattataaactagagattcaaaagctattccaagtagagaaagaattagtttcctcattgatcctaatttggtctattattaactacaggagtttccaccaaccagctaaggaaggtgttgaaggtaccatttagcaattgtca

SEQ ID NO: 61202 - DNA, 955 bp, Cannabis sativa
taaattctagataattattttctagtaaactaatttgtatttttctaatatttaattgaatataaaattaattattaagttgaattatattcaaggtacttaattaatttatatttttctaatatttaattgtttaccgagatttttagaaaactaattataaataataagaactgaagaataaacaattaaaagagaaaaagcaaaaaagacataagcaatttttacgtgattggggtgttaactagccttagtccatgagtcaatgttattatgtaactctttagcttgaaaagcctttgggaataaaatgaatgtaagttcttaagtttgcttgagcaagtatcgcaagagaattcaacccttaatccataagattcattgattatttatagttttgagaattacacttagtttctcttttccctctattgtagagtttacaatgaattacacacttgggttgactcgttaagtccatcctaagaaagagaagatatgttgaataggcagattggatacgattagaattagtcaaaatagtgtcctacaattgtggattacttgttaattaattgcttgatatctattttaggaagttttcccttttagcttgatgttattcattgccgagatctggcaaactgatatttccttatttgtatgcaagaataaaatgggaaatcgaactggtctcccaggaatacgttgtcttacccttttggcctcacggtactggacctcattccaaacacgagctaccacaggcggaaggttattcgatcacggagctgaagtacattcctggaaggtcctatataatttgggcttggcccaacttatcttccatggggacccactagtgggcctttgatgctgacctagattgcacgtgtccacagtcaaaaatgtggataacatttacccctggctttcagaatgttgtgtatggtgg

SEQ ID NO: 61203 - DNA, 787 bp, Cannabis sativa
  modified_base (651)..(655): a, c, t, g, unknown or other
aaaatagattacattgaaatggagttttatttagggtaaaaaatctaacatctaggaatttttctaagttctcaaatagcaaagaatttctgaaagtggtcatctaccggaactcttatattcaaaatcaaaaatactgtattctgaactacaagtggcttgattcttcacaaaaaaggtatgtaggcagctcagtattctgaactgctcacaaagaaggtatgtaggcacaaatctcaaaattccattaaaggtcatccacctaggaatttttctaaatagcaaagaatttctgaaaggggtcatctaccggaactcttatattcaaattcaaaaataccgtattttgaactacaagtggcttgatccttcacaaagaaggtatgtaggcagctcagtaaattaaattgactgagttctgctacaattctaaatttcctccaatttttcccaaaatttacctcagagttcaatatcatcgtaattggaatcaaagtgtgttgcctttaaaccgaaggattgtaattaagagattattcttatgatcttggatgggtcaaacttaaaattaataaactcttatgatataaatttagcatatgtgaaattgtgttttgtatttatttttatattctaaatgtgaaatttttnnnnnacataatttttggcacgcccggtgagacctattctctatttcatctccaactatgatgactattatttaactttaactttatggtgctaatcatgtttaccattttcggggaaaaaatggcaccacaagtca

SEQ ID NO: 61204 - DNA, 501 bp, Cannabis sativa
acttataataccaaaattaataaactaacgaaacaaatttattcaccaaaaaaatgaaaggagtagtactacacattttatttcagaaaaaaagtcttaactgtgtgaatctcattttctccgaactcaacaataaagttactactaggtcgaaaaaatatgtttaattttgtcaaaacaaagctatttgaaaaatccaaagaacatttatacattaataaatgaataaataagatttatccctctgaattataaccctcgtagagttttgtcctataaactgttctttgttgtaaaattccacttgaattataaaaattattacaaacatctctatgcagttgtaatttgctcatttctttaaacaatttgttgatataatactaacatgacgtttatcaagcctagttcaagagttcaggaaaaataaataaatgcataaataatagtctaatagcagggggcaaaattttacagggtcatagtttaggggacacaaat

SEQ ID NO: 61205 - DNA, 1208 bp, Cannabis sativa
atcttgctgggagatcacgttgttaaggtcaccgattatacaccaaggcaggttcgagttttgcttcagagtacgaaggtgattccaggttatgtgtcgatgactcctgcgcggctcaccatagactccagttagcctccaatctggttttcccactactttgacaacaaaatcgatatgatactgagaataacccaccacatgaccatcctcacttgacttccataaaagagcaagcccaccacttctcccttgggcctcaacattgaaaaccccttcaaagcccaaatgtctactaacccattccactctctccttggcacatttagtttcacacaaaaacacaaagttgggtttcttttgagaaatagtctctttaaggaattgaaccgtccatgggttcccaagcccacggcaattccaacttaggacattcataatgcttggcgggcttgagaaccaagacccgccccattcaagttttttgagccaacttcattattatggaacatagggatatccccaccatcttcaatactcatatgagatgagctttcaatcacctcatccagcccatgagagtccatcactattagattcggcccattgctaggttccccaggcccattcgagatatcacaagtcaatctcttccttttagtatccagtgaggacacataattctttggaaataattgggttgaccccacaaaatcaccattctgattctttccttttccatctgatatagtcgttattggaaataaattcccagctgacacaataacattcctttggattaatgattgacttccttgattcatgggattaccaatcttcacccccgaattccctccagtcgctccagatggctgttcacactctggaactggatttccaactgtctccgatgaacgttggaactgatcaggcctaccacacgactcatccctggtagggtcgccattgttgatcgaagaggcaccagatcgcagccaacgagatccaatattatgatttttccttctaggcgctgccttcatttccaacccatacggtttagttagtaaatgagatggagtatcaaacagcttctcacaaaacctttctgaatgcccaatgattccacaaataaagcagaaagttggtaggccttcatacttgaaaatagcccaacatataggtttcccgactttctccaatttcat

SEQ ID NO: 61206 - DNA, 1387 bp, Cannabis sativa
caaataaatgatgactaaataagccaattatttcgaaatcttaatcgacaattaccatatatgcttaattacatttttaaacgtcttcaataaaataaagaatactaaaagaatactaaaggatattagtggtatttaatattctcttatgtgttaatatccttaataatcaaattatgtatcaggtccatacagtttaatataatagtttttaaaaaatatcactagctaatcgcaacacgacatgttgaaaaagtactcagtagtaagcactactaattactactaatttagtgtttaatagcaatactcaataaaatattgccaaagctagcttagctgtagctagttctcatatatttgctacgtggaaatggaaacgaaaccaccgttccatttaaaatctttttatggattattgtacagtcacaatataaatgcatatgttaaattttgagtttcttcaactagtttcgataacatacaaaaaccctctctacaaataaaattgaaagtgcaattttttttttaatgatttgagataatcacttttttaactcatcactctgtcaactatttgatttaactgatactttatttatttttaacttttatacagtgtaaaatttgtaactaagcaacaggttaacaaatagtttaactaaaaacatctttaaatggagcaccaaaatttatagtacaatgcttattttagtaattttgcatagaagtaaaaacacttatgtgaaattggtgttaaatttaggcgagtaataataaatacactctaataatttttttaaaaaattaagcttaaaataatttttaaaaattactcttaattttttaaaaaaaaaattttctcacattaatttgtgttaatttcaatacttattttcataatttttcaaaataatgtatatttttttttatatatttttaataaaatttcatttaattttttatttcaattttttttgttataatatttagatataatttatttttgttgtaattttagatttaaaaaatgtgaaaactttgaggctgtttggcttaacagtttaaaaactgttttcgattttttaaaattgaaaacagtttttaaaaattaataggagtcatttggcaaaaatttttaaaaacagttttttaaaaattgagttttaaaaaattagaaaacagaaaacatcaaaatgttgttttcaatttttaaaaacaatttttttttctaacatattatattttatattttgctcacatactcggatcctagtcccaaaattatacccgaacttaaacccgaatgggttaatgtcatggtatggtgttaaaatattaattttttttcctaagaaaaaatagaaaaaatctaaaaatagttttt

SEQ ID NO: 61207 - DNA, 1341 bp, Cannabis sativa
tggtaagatttgtcatatcaagaaatattgttataagttatgaagaaggcctaaaggaggaagaacgaatgattatcaagagaactctacaaattatggtgaagagtgtaaaggttttgaagtgttcatggaagattcatcaccagaagcgctagttgcgactaggtcatcttagaagaatgagtggataatcaattaagttgcacacatgaaaaacaataaggattggattaaagatttgaggaaccatgaaatgacaaggttttcttttgtaatggtcatacatgtcccatagaaggagttgggaatgtgaggttcaagatgcatgatggaacctttcaagaaatcaacgatgtgaggtatgttcctaaactagctaggaatttgatttctctaagcataattgatgatgcaagatatgagttcaaagaaaacttagggaccttgaagatatgcaatggttcatcagtcattctcaaaggtgaaaatcaaggtggattgcactacctgaagtagaagacgcattagtttaatttggacagagagagctgaaggttgatttatggtattgtaggcttggccatatcagtgataaaagtttgtaaattcttcataaatagaatttatttggtaaggatagtgctatgctattttgtgagaattacatcatgggaagcaacataggttagattcaaaacgggtattcataaatttaaacaaattttagaatagttccatgttgatttgtggggattagaaaaggtgtttaccttttgggtttgcatattttccttccagtattgataatttttctaagaaagtatgggctcatttgttgaaatataaaaccgatgcattaaaggcttttaagaattagaagaatttgactgaaagtgcaaccaataagaggataaaacatcttagaacagataatagtttagaattctgtaatgatgaggtcgataggcacatgactctgagacacacaccacactcgaatggtgtggccgagaggatgaataggactctctcagagaaagcgaggtgcatgcttctaagctcaaacatgccaaaatgattttggggaaaagccataatgacaatagcatacttggtgaatagatgcccttcaagttccataaatcttaaaactccaaaggatgtttggtcaggtaaagctccagatctatgtcatttaagagtttttggatgtgttatatttgcacatcaaagcataagaaaattggaaccaagatcaaataaatgtgttttccttggatctctacaagggttgaaaagatatagattatgagataaaacaaaagaagggattgaaatcat

SEQ ID NO: 61208 - DNA, 945 bp, Cannabis sativa
acattttaattaatcctaaattcagtctgtgctttttaaatgcagttacaatcaaaattttggtgaatagattagctaagttgtattcagtatcaattttctccaccaatacgtcccatcttgccacatattccctagtgatgtggtatttcctctctatgtgtttgtttctcttgtggctttaaggctctttactattagctatagcaccagtgttgtcacaaagtaaaactagtggtttttccattccaagaacgacactaagttctgagaagaacttttttagccagacaagttctttagcagccttagcggcagctatgtattcgacctctatggtagagtctagtgttgcaatttgcttagcacttctctaaacaactgctccacccccaagagtaaataccatcccagatgtagacttttctttgcggcttgaagctctaaatatagtcttcttcaaggaatgtggcatttgtagaaacaaacactttattatccttgtgactataaaatagtccacccctagtctctttataatttccaacaaatatacaaatctcagttcgtttttctagtttgtcatctttctttcttaagacatgagcagggcacccccagattctataatagcgtaaactaggtatacgaccattccatagttctacaagtgtcttagggactgatttagatggaacaacatttaaaatgtcattggccatctgaatagcatatccccatgaggacgttgacagggttggatagctcagcatagacctaaccatttctaaaagtgtgcaatttcttctttctgtaactccattttgttatggagtgcaagggcagtatattgcgattcaattccaagttcaattaaatgatctttcaactgtatatccatatactctccacccctatcagtttgtaagatctttaatattttac

SEQ ID NO: 61209 - DNA, 2800 bp, Cannabis sativa
agttttttgtaaaaaaaaaaatcgtgttatagtaaaattgtgtacttttgtctaaaatctagtatttttgaaaaaaaaaaacccattttaactaggtatctaaactcgtatttcttttatattttttaagaacttttgttttaattttttatggatttatttttatttcatttttacataacctcagaaaaataacgtgtaaacaataaaataaaaatataaaacaatatgaagacaacttgaaagcaacatagaataatgttgttgttaaaatatttaaaaaaactgtaggactgtaattttgtaaatttgttatcttttttgggtatttatgaaaaaaaaaccaagtgatctcacatgtatcatttactatagcttctaatttggtatttataaaaatattctttttataatttttcaaagatactataaaattaaattgtggagatattttcataaatacctaaaatgacaaatttattcattctattcatgggctatggatttttgaatttgggccaaatttatcaatgtaacttcctattggtttcatttcctctttttggtcccaatattctgctgcaaataagaaaaggattttagtaatcaatttgaatattatttatttatttatttgttattattgtaatgaatcaatttgaaatattaaatatgaattttttgtactcaatgtttagagagccttgatagaaataaatgtattaacatattttatggtactttcacaaacttcataatatattgtgattatagtagatatcctataattttattttttttttgaaaaaatgtaatttacaaaatatgatgttaagaatatgatacaaatatttttacatatatgtttttttattttactttattttttatatgcatgctattatttattttgaattatataaattataaaaaaaaaactatggtaagatgtttgttatatatgaatataacataaaataatattatatatgtggcaaattatgttacataattacataattttccattaaatttcaacataaaatatgtatttttggtattcattagtggtaattagttaatggcaaaaaagtactctaactgttatttttttttttaataatggttacctatttttgttgtgcaattttatttatttatttatttttcaaattttactttatttaaattccttgtctcttactcttcatcaaacccattgcagaacatttgctttttcttcttctattctctactttatctacttttggctttgttatttggtgaattttttgggaaactttttttgatctcttttgttgcaatagattttctcaaaatttgtaattttttggagttgcagacatttaagagctttcaaactaaaattcttgtgcaatcactccaaaattttaattcattcttttcttgaaattcaaaggcataaacaaattgatgaagtttgtattttgataaaaaaataaataaaaaaattattgtctaacataagaataatcaaatacataaaccaatacaaacttcttgatggaaaatactattggttaaagagtaaatacatatgccaataaaaccaaattacatatttaacccttatcaatatacttatttacttaaaaacaaaaaggccattgaataataggttaatactattttagatcttatgttttgtaaccgatttgactcactgttttattaaaagaattattttccaaatacacaaaaacaacaaaaaaaattacaaaactacgatttcacgaaattttgaatatttttacgattttttttattttatttacaatatatacgatctttttatgttgtactcttgttaatttgttggtaatttttcgtaatctgtatattattttttgttgttgttttgatatttagatgttattttcatattattgttatgtagttttcttgttgtttttatggaaaactgtaaaaatgtaaaaaaaaaattcttcaaacgtaaaaatgtatttttttttttttacaaaaaatggtgttttatgtaattatccttttattaaataacgaaataaactctgtattttttaaaatagtacaaacagaaccatgagctcaatttttgatttttttttaatattatcaacttaaagataatttctagcacgaatagatgtagaaaatataacaattttatcataagaattataattaaattttattttaagaaaaaaaaattagttcaagatactatttagtattatttcagaaaatacacggtccaatttaatatttaaaaaaataaagaattcaattagtaaattttgtaaaatacaagatctatcataatatttaattatttctctcactaaaatttgtgtagagattttacataaattcctatctatataaaaaaaattaggttataatttctccctagaaaattgaatgtccaatggatagaagaaatgtattaaatttccataagtattaaattagaaaaggaaaaaggtattaattaaaaggaatatgtagtatagggcaatctaccttattacttttttttttatatcttggactagagaaaataaaatgtaccaaaaattagtttaattaatattgaaatgtagatctctatttcatactcattaggggtttgactgaattttttttctatttaataatatttgtcacttatttgtgggtagttgttatgggtaggaatatctaaccctatatatatgcttctaatagatttcacatgcttaccaaaccatttaaaacaagtattcacatgcaatattca

SEQ ID NO: 61210 - DNA, 1105 bp, Cannabis sativa
caaagtgaggattaagaagtgcaagcaagaattaaccagtttaaggggcaagagagatgcactttctgtgcaacgttttggggagttaaagaatcaactctctcggattatggaccaacgggagaccttttggaagcagagggccaaacagttttggctcaaggaaggtgataaaaatagcaggtattttcatatggctgctactactagaagagggaacaatgctataggaaaactcagaaatgggaacggtcaatgggttagctgggagaatggtttatctgaattgattattgattattattcagccttgttctcagcttcgggtgcctcttgtttggaagtggtggaagacattgaatgttctatttctgatatggtcaatcatgaactgtgtctaccggttacagaagaagaagtccgtaaagcgctttttcagatgcatccttcgaaaagtcctggccctgatggaatgactcctggattttaccagaaatgttggagtatagttaagaaagatgtggtgctagtggtgcaaaaattctttcaagatggaaatttggctagtagtaccagcaaggcacatgttgttctgattcccaagaaaaagaatccagagctggttactgatctcaggcctatagcgttgtgtaatgtgctttacaagataattactaaggtgatggcaaaccgaatgaagccctttatggataaagccgtatctgcaaatcagagcgcttttatcccgggtcgcttaatctctgataatatcctggtttctttcgaagtgctacattatttgaaaaggaagcgtcaaggcaaggagggttacatggcactgaagttggacatgagtaaggcttatgaccgtattgaatggggttttttggaggctgttttgctcaaactcggttttggtagaaaatgggtgaacctcactctttcctgtgtgacctcggctagttataccatcacccatggaggcaaggaaatgggacctatcattccaaccagaggtatcagacaaggatgtcctctttctccatacctgttcattttgtgtgcggaaggtctctctgccttaatcaagaaatatgaaggtcga

SEQ ID NO: 61211 - DNA, 1180 bp, Cannabis sativa
attgatgcaagtatataacaaagtattgtttttttgggtaagttgaaaaatatcatttttattaatcaattaatcaaatttagctctatttttatatttaattgaaacatacatctttttatatatattatacccaaaatattctgacataagtgagtcacatggagtgacaggagcgaaattggtacaatatttttaaaaaaaggtaaaatgatagactttaaaaaagatgataaaaataaaaaatgacaatataaaaagggtatagagtgtaatttcctctatttttttggccaaatatagtacaattttttacttatctcattggagatattcatgcaaacttatatataataataaaaaaaaaataaaattataatcgaagttaataaaaatatgtacacattaataacgaaaaaattaatagacacattaagttgtcaaacaccacaaaaggtagcataccgtcacctcctacaaattttaatgtaacaaataatgtaaaaattgttaatcaatattattgtctatgtgaatcgatatgatattgagcaccttaatgtaccacatattaataataaaataaaaaagtcatttaccaaaaaaaaataatacaaagatcgttcataaaaaattaaaatacaaaatacaaaagaaaaattgctaagtaaaacataagacaaaaaaaaattactaattattggatacaatatcgataatgacattgatcaccttaaggtgccaataataaatacaaaaaatcatttactaaaaaaaatacaaagaaaatataaaagattaaaaaaaaccaacaaatcatttttttttatataattacaaaaacaaatcgtttgcttttgttttactttacatgaatttccgtagattgtatttcttttcttccattgcgtagcatctttggctctcaacaccaaactagtcattattggttttttcatttgccgttgttttacacttggtggtaatcttggtgcagattctattttttctattttgtagctctcaacaccatcttcaatcttggagataatcttggtgcagatttcatttttcaagccggtattctttgtccattgtttttgtgattttgaaaaggagttttcttatttgtttgttatatcatctatgagatttgaggtatcaacatcaagactttatt

SEQ ID NO: 61212 - DNA, 796 bp, Cannabis sativa
tttctctatatgagtagtatatttctaattttgaatcatcattttttttacataataatattttagtgacacaactattagaaaactcagaaataacgtacgcacaactatgaatgaagaatattcttggacatcgttaagaaaaaatttaacaaagtattattgcactgatgattaatgagttgtagtttaagaatatttttgtgaagaagcaactgtaagaacactgtcaatcaacgtgaactcaaccaatgttaaaatatgaacaaagtcaccatattagaattactttttatgagagccttatgttggatgtctatataaaattgctgcaaataagactaaaaagattgtaccattatcactatgttattattgatgcatcaattattggggtgtcaataaatggagagccaactgtaatgcaactacatagaaacaataaaattaaaatgacggctccagattcaagattcaagatgcgagatgaatgtaaatttagttatttttttgcaattagaattgaataaatctaagattaaaatttcaaaaaacaatgttaatgcaacaattaaaaaaattagattatacttgattttgattgatcgggaactcgggatctgtttcttacaggtcttcatcttattaatctataaattgaatttgggaggattaattttatagaatttcaaaaaatttcttgggtgagtttatattttaaactaatgtttatgcagaaacttccatcaatcagtaatggttgatttttagtttgatatttttattcttctcaggt

SEQ ID NO: 61213 - DNA, 692 bp, Cannabis sativa
  modified_base (435)..(436): a, c, t, g, unknown or other
tataatggtcacagtataactccaccacaacaaaccttaacctaataaaacaataagaaaatagaatatatatatatatatattatgcttcatggttcagcattttattaattccttataataatagagcactagatatataaataccttactttgatgttattatagtataaataatttgataaaacaaaaacaaataataattggttgaaccatatttttgtattttatatatacgtggcttatttgtatggatttccggttttgttcatcttcatatatagtatatggaagtttgaaatgataaagagtttacattaatttcattttatatatatgataatatataatatatatattttattaagtagttttatgacccatataacgtattgtatgtgtatctttggctgcattttatatatatatatatanntatataaatatatatattgatcatagatgtgacttaaagatcgaacccccgctaattaaggttcaaaaccagttagcttataattaatattaagagtaattaatacataatccaatttaaattagctgtaatgatctgcattttatttagttttacatatgtgagaatgtggtgcatttaatagaactgaaacagttaattcaaaataaaaaaaaaaaaaggggttttttcataaatgtacaacaaaaacaaaata

SEQ ID NO: 61214 - DNA, 6267 bp, Cannabis sativa
agtcacatggagagtatattgaggtgataggggtaaaatcggtaaagtattttaaaaaaaagaggtaaaaataataaactttaaaaaagagggtaaaaataaaaaggattatataaaaaaggtatagagtctaatttactctattgtaaagtcattttttgataatctaattatcaaaatattatttaatttattataaatatttaatgtgaattaaatattaatttcttgtttgtatattcagttttatggctgtcttttatcattttaaaaaaaaaaatcattatagaaaataaattctctttatggaaagtttgtttaaatgatttatatatgtggtataattgattctaaatgatggtaatcaattttttccagttttactatgaatatggggatgtataatccttttaattatggcagaaaataaaggaaaaatcgtgatcttgcttttatatggaaagggtgttgattttatctaaggtctcatagtagagtgtggatatgtcgcagcaaatcaggatttaatttaggaaagtcttgtataactataaaatcgtatttgtagctatctctaaggtttatgtgtgttataaataggacttagagtgcagccaaacgaatctatctcttcgatcaagtcttattatttatatttttatatttgtgtgaattgtgtttcttgtgagaaaacttagagtattctactaggtcttagtttctgtatttttattctttcactattctcataatatagagtgaagagcctcattgaagaagataagaagtagtcttcgagagaaaatttttccaagacttacttcaagaggaagtaagcatgctcgcattaaaagttgaaggaagttcactctttggtgtgttcagaagtcatattagtaaagaaaattacaaaggattacggcaaagctttagagggagtctaaacttgtttaagtgaattgtatttgtaatttttgtgactttactaattgattttattctctggacgtgatcacgtggactaatagtgtttgaatactgataccatgtataattcctttgtgtcaagttataaattctgcaaaatttatttctgtttctcttctgttacaaggagtgtgtgttctactgcaagtcgttatattcacattttaattacaattttttaagaaataagttggtatatgcaaaaacattatttttcaatttttacacatgtacagatgtacttgttcatactaaaagttagactttctcttttttttctactctgcgaaatcaccaaaattagtattagtaagctctctcctggctagattaattgttgaacataagtactattcatcaccttcaagataactaagaacaaattgttggaattataggttgtttgattatatacttcagtttttttttttttttggtcttaatgatatgattctttagttattatctagaaaagtttttgatgaataaaatattttcgtgaataccattaatatatgtcacaaaaaccagtagaaatattatacgcgtgagttttcatttttatataactaacacttacataccaaccaaccatcaatggatcatatcattgtccacattgtattttcgacgtggtgtagatagtgtcgtgacacactttgccacgagcaaattataatagatctcttctccaaccctgcaaagttttcttatatatattttgggagagtacacatgttttttttatatcgatatataaattttgtatttattagtattatatatctgtatatatatcgatcgagttttgaatctacatatacattctctctcctcaaatcctgagatccatacaaaataatgatttaatttggctggccacaccggaccatggtggtcctgttccctatcaaacactctacgccatttctctttcataatttaataccctctcttaaatatagcaaagctagtggaccacctgtatataataataataataataataatagtatattttatttatttatatattaatattttgttataattattttccataatttgagctcacaaatctcatctaccatcttatgggtacgtttcctttctcgaccatagataataaatcagagagcaaagcgagcttttcttggtccgagtcatggaccgcaacaggtctttatttattgtaatgccctaattcgtagctgcctcactcaactgtttttcttgtttaattatgtcatttgtttttgtgcatgcacgtatggtccgaataaatccacatcatttatgctcctttaattaattactctcatctcaacaatcttatttatttacaaattagactaatactatactatatatctcttccttttattaatcacctcaaaatatttgttttatttatatatacaaacaaataagttagctagattggttgtataaatataaatatattatgctgactacattagttgacaaatgtctttccgcatatgctcaaataaatgctaccaaaacaagtctttacatattactcacaaaacagttatatacttcattaattcgttcacataaaatcctttttagtttgagatgtaaagagtttttctttctttcttaattacatgattcgagaataaccttaaaaataaaataaaagaacaggagactacaataaataaagtggatttttggggtaccttaacttgttaaaaagttttctaagccaaaaacccagcaacccacctcaagggtgaggcatataagagacgggttttgttagtttgtaatttgttcacttttttttttaatccaaagaaatcaaataaaaattgttcaatatacatataatgaaggcaagtatatagtagaagtgttacttttacttttttaattgcgaactcaaatctactgtaaaaattttactcgtttgtaaatatttttaataatacaatactgaaaatagagttgaaaataactaattacatatacattaaaaaaaattaaaggactcaaatttaatgtcaaaattagtgtctcaaaatggtgtctaaccaactaatattacagaaaatctttaacttaacttttttttttcctttttaaattaaagaataattccattaaaaggtacaaagcaataaattaaaatgctcaaaataaaagttaaaaagcaaggagaagactcgggctccaaactttagcagtatccaaagaaaaagcaatacgagcaagggagtgggttaatccattaaaagaatacttacaattgaaaagaaaaatactagagagagaaccagacatttctaatatccttaataatagccccaacttcagtaaaacgtgtttctttactcaatataatttgtactaagcgaaaacaatcagaaaatagttaatgttgttgaaggaattttaacaaaaccaaaataaaatataataataatatgaaggggagtttatgcgagtactcaacctagaacgacgagtattcaaattaaggacacagaatacttaataaaaactggagatatcaagaacacaagagagtatagtggttcagtcagatcatggtctgctttgtccactgttgcaaggatttctgtctgtctcatttcacggtggatcactcctttacatagaaagcaagtgtccttttatttacacagagattgaattcattatcaatccgtttgtacattgaattacaataattaaactaaaaaacgtaaacataataaatgaagaacagtttccaatttaactcactaaatacagtgacttatgcgacttttatagtgcgagttggctgttcacattcttgcataagctcccaggcttaagatgcattcaggactagtcgagtctaggatgtctacgtccttttgaaatcgcttatacggacatcttgtaacgagctgataagctaagacatgcgagtctgcaccggtttatcaaggctgttaggtcaactggaccagctcgcagaaaagagaatcgatgtttacaatttcgcaggaggatctcggggatactcgcatatatcccggtacatgcgagttttaaactgttccttggtcctacactacgcgagccatacgaatgcgactggactcggtcatggtcgcatcattccgctgaatctggttcaggcgaggctcatattcgaggggtctctcatcgacatctcagctctcctcgaggaaagtgaatacacatgtctttttaataggagtccggtctcgagtttctaggtgagaaaatctcactataacagttaactaacattatacaatctctaacttaacctttttttttgtttcttatctaacaacatttttcgtaaaaatagttaaaactaattaatatataaaaaagttattaataattattttagttcttttatttttatttttggtaatctctattttttttaaacatatttagcatattgtttctttctgataagagaatttacagtgtactagttttaagtctttttaatatatatatttaatttataatatttattttattacttttaacaaatatttctaatataaactatttttttagacaataaaaataatcatcctattttttgtaaggactttttttatgtatatacaaaaaagataaaataatattaccaaaatacagtaggtcggcctattaaatatttatacggtccacaaataaaatattacaattatacctcttcttctaaaccttcagccgcacaaatcaaaaatacacctatgaaagcttcaacagatcaaccaaggaagacaaccgaaacgaaacccaacaaggtggaaatctaccattaattctagcgacttaacctgagaagaagaacaaaatcaatccaaacaaatattatttcaaattgaggaaagaaagatcagaaaaatctagttcaaactaaaattcaaccctgaattcaggtcgaatttataaagaactaatcctcctaatatcactttttagattcaaaaaatgtagatctcctacaaatagatctagagctcccaaataatccaaatcaggtataatcaacaaaaaaatgtatcaatactatagctaatgtttatcctgttgtatttatgctgttttgcaaatttccaatggacgatttgttaatatcatcaaatcatcaaaaagtttagtatattcttatgaatctagagcaacttacatcaaaacataattatgaatttttatgttgcattataattgaattaaggttttactaacgctctgaaacttgacataacaatgataacaactgataacaaaataatggtgtttatcaaatttgcaggtgttttatattgtcaatgcaagacaaatctctttaaagaaaattctataacatggttagaacatggttagttatattagtatattcaattagttgctatttaagttagtttacaaatatctaagagttatttttccaaatattgctattaatgttcaattggtagttattgaatggtaacaataaaacatacaaaaaaaaaaaacttaaaaatgctcatttacaaatccgtagttgcattacagttgaataatagttgagcaacaaaaataacactgtgtaataaatacaggattcagaattggcaatacatgacttgaacagagcaaagacgattgtagtaagtttcatttctattgcataaggattttttttttgttttttatgataaatggctcgcaacatatataacagttacattacaactttattagagtttttaataagacgacttacaagaattatacttttgtagtctcaggaaaagatgaaattccattcctcgtatttgcaatggacaatttgatgatagaataaattatgtaaattacaaaaatattgggcaatttatctcaattaattgcaaatatgatgaactaataaacaaactaaaagatgtgctagaatgcaaccatgaaaatactgaactgcaactgaaataccaagtgaaagaaggacaccaactgttgaagataaaggacgatcaaagcctatacttttacatacaactaaaattgaaggaacctgacttcacaacatatccattgtgtatgaacgtggtcatcaacataaaaacaaccaacaatacatcattcttggaaatgagaaactcatttgttgcacaaacaaatgcaatagcaactatggtggacaatgcaccgccaataaaaaaattaataactcaacaacaaacaatgcaaggcatatgttagaagacgtgttgggat

SEQ ID NO: 61215 - DNA, 1089 bp, Cannabis sativa
acacatttctacaatactcaattaggtctagaattttttttacatatttgtagaaaaacttactctaatttttttagataattgtaaaatacttcaaaattttctagacatgtgaaaaatacaatagaacataggcatttttagaaaactttagtctaggattttctagttatgcatgtttaaaaaatatgtaaaattgtatggataaaattcttgaactgaaaagatctataacaaataattctagcctcaaattcttgaagattagaaactatatatataaatactcatcaagggttccaaattgtaaccaacactcaaaagccaaagctacaaacttttaataagagcttactactttacatacaattctctcttctaagccaaattatttttttataataaattaacaactactcatcaacatcactaattcaccacaataaccactaagcacaatcctacatatccacctattttaaaataaactaatacaaatttattctcaaatcataaatggtataagagctccgtgctaaatcgctcaaataacagtatttcgctgagacactatgcggttaaacttactcaatcattctggatcaagacctattggcgcagtgtacagtaattcttgtacatctctcctaattaggtggtatccagaatgatcctacggtctgataggtaactaaaacttgttatatggtggatcattcaaataactatagtttgctaagataatatatggttaaacggactcgatcgttctggatctagaccattggcgcaatgtgtaataaatcttgtacacctctcctaattaggtgctattctagaatgatcctatggtccgattaggtaactgaaacttgctacatggtggatcgcttaaataactgtagtttgctaagacacctatgcggttaaacttacacgatcattatggatgaagacctatcggcgcaatgtgcaataaatcttgtacatctctcctaattatggggtattccaaaataatccaacactctgattagataattaaaacttgctacatggtggatcgctcaaataatagtagttcgttaa

SEQ ID NO: 61216 - DNA, 980 bp, Cannabis sativa
aatctgattatattgaaatgagtcttatttagggcataaaacccaacagctaacagatccaaaaacttttaaaaaataaaagacaaatttcattgagggttggaagaggatttgaaagcggaaactaggcattgacaatccgagaacaaatcagctttttctaggcttttgaaggcagccatcaactctccatgaataatagagaggtaagaaatcttagcagcaaaaagagcctgaataccaccaaaaccatctctgacaaccacacctattgctccaatgccttccatattagcaaaatcaacataagcacgagttcgtccaggcctcggaagtgtccatctcaccaactgaaaattccttccactcgaattagtctgtctcaagccagtaaccactttttagtgactgtaaaaagtccaagtgaatcttcctcttcatctcttccagccaccattgtccattgttgtgaaagtttgagttcttgaaaaattagagatcatgaaaaagaacagatccaaagagagcaaattcctctctatccaattaaaaattattacctagagaaaacaatgaattaaaaatacactaaatcacctctgctccagagtgcagagagacctcatcgattcaaatacaccaattgctcgagaaccaaagagatttagtaacagggcaatggcagaagaaatgggcagcagaatcaccctcagtggagccataaagaacacaattactagcttgattaccaaaaaatttccccaatcttgagccaaaaggaaaacaattcttaataatcttctaaagaaaaacttttagtctatcatgaagacatgatttccaaataactgaacaaatttcatcctcttaaaagtctccttatgcatatcatggtacgcagccttgagcaaaaaaaagaccattagaattggacatccacaccagagtattattaccatgaatctcagcaatattgcaag

SEQ ID NO: 61217 - DNA, 829 bp, Cannabis sativa
cgagttgaagattactgctaacggggatgagtctaatggctgacttggtgattttttcacgaatgaagtggcagtctaattcgatgtgttttttccgttcgggaaagttggattattggcgatgtggattgccgattggttgtcacagtagatgaatggaggtgtaggttgagtggtgtgaaggtcttgtagtaagtactgtatccatgttatttcacttgtggtggaggccaaagcgcggtactctgcttcagcagaacttctagagacaattggttgtttctttgttttccaagagatgagacaatctccaagaaaaatgcaatatcctgtagtagatcgacgagtgattggacaagttgcccaatctgaatcagaaaatcctcggagatggagagatgatgtggaagagtatataattccttggccaggtgatcctttgaggtagcggagaagatggtggagagctgtcaaatgtgatgtttgagggcaagacatgaactgactgagagtattgacggcaaatgtgatgtcaggccgggagagagtcaagtataagaggcggccaatgagttttctatagtgagatggattgtcgagagggtccccatcttgatcatttagtcttagtctcggatccatgggagctttggctggtttgctgttggtgtatcccgtatcagcaagtaattgaagggtatacttgcgttgtgagagaaaaagattagagttggctcttgcaatctcgaaaccaagaaaatacttaagagggccgagagtcttaagcttgaatctgacttggagtgcagcttgtaactgatgtaaaatg

SEQ ID NO: 61218 - DNA, 771 bp, Cannabis sativa
acagcctttgtatatatatatataggttccattgctctgtaacaattaattcaacttcaataataatcaaagctctttcaattccgcattaatatatatatatatgcttacttgaatatataacattgttgtgataataacaattaatcacttcccatgtaatgtctccgctttaagtttctattgggtctttatatttacaaaacgatgactcttatatacgagtacatcacactggctaattcctaaaatgacgactggccctacaaaccaacacgagtgtttccagtgtgctttgtcctcactcccacactttttgaaaaaaacttcccaagagatcacccatcttgaaattacctcagatcaagcacgcttaaccatggagttctttcgtgatgagttagagaaaaacaaaatacaccttattgatataggtagtaccaatcaatccatttaagctattttcaaccatgtagtcccatacctacacaatttcagaatcatcacacatgaccttccccaagcgatgtgggattgtacaactcctggtctttccccttcagatcatggggctctgactgtcacaatcaccatccatttgggggtccaacatccttgtcgaccacactttcgactggattaaggctctgataccattttataatgcccccacttcaagcctccattgggcccttacacccacagaatgatggctcttatacacaagtatgtcactctggttgcttcctgaaataacgactgaccctacaa

SEQ ID NO: 61219 - DNA, 858 bp, Cannabis sativa
  modified_base (707)..(712): a, c, t, g, unknown or other
cttttcgatcaatgtgtgtcagttctagtattagaatcccacaaattttttgatttagctgtggaattctttaaagtatcacgttcagtcatgtagtctcttaaagttcgttcattatacccacactttctaaaaccaacacgtgaggagggtgtataagatgaatgagttactcttctcattaccaattaattttaagatgaaacattataaaccttaactacacatttccaaattctaacaagatttgtaaataaataaataaataaaaaggatagatttgatgaaagattaaaagtaaggctgcacatgggcaagctattcaacctgatcaacccaactgatttttagtagtaaaaggttatgttaagaataggtcatggctcattgataggtcatatatataattatgggttggttataggttgggcacactctaactctatataacccaactcaacccattttttaagaggcgttttaaatttaagacaaatttcatatagaaaatagaataattttcagcataaataattaagtttaactttcagttgtaaataaatacataagtttaatttttagcaataataatacctaaggtatatttttagaacttctgtatgtacctgactgttaaatgttaagtaaattaccacgtgacaatccttgattggtccacatcattaaattttattttttttttaaannnnnnattagtttaaatataccaataagaaaatgacatgtggataatgatttgacatttaacggccagatacctacagagttctgaaactataacttaggtattattaccgcaaaaaattaaacttaggtatttatttgcaactgagagtt

SEQ ID NO: 61220 - DNA, 1061 bp, Cannabis sativa
gagttgggaaccacttggcgaaagatcccggtccgtgaggcctatcgccatgaaggcttctttaaataattaattcacagaactcccattgtcaattagtattctacccacaatcttgtttgcgatgggagtctctatgaccaaggggtcatggtgaggaaaacgcaccgtctttgcgtcttcttctgtgaacgtaatgggttggtccataagtcagggcctctgagctgggagctgagtagcttcctaaacctcgctgtgttttacgccctcggcgtagcgcttcaattcctttcgagtagtccctctgatatggggccctccagagatcatagcaactcttccattgggtcttggtgggaggccgggagtctgctgaggttcccctaggggagcaactggtgcaaacgctctcggctcacccctggcgttccctaaggcaaaggtcccgctacgggaaccgggttgagatgaggcagctgattctcaatccactcgtagagatgacccaatcgaatcaagttttcgatctcatctttaaggtttttgcattcattggtgttgtgtccaatgtcgttatggcattcgcatcttttgttgggattctttcgggagctatctctgtacagaggaggcagtctccggtagtgcgtatttttcctggtggcaaaatacatacgctcttgggagtctgtcagctccgtgtactgggtgtattggggagtgtacccgcttttctgtcgcttgtcctctgtccggttgctacctttcgaggacctcttgcttcgagagccttgagaaggtccagctaggcttacagcaggagcggagtgagatgggacttgtcccttcatccaagaaggattcccatagtgagaagatgcgggagcgaatgcttggctttgattatagcatggggtagcagagaattgtataccgctcattggtggagtagccgatggcaggagttggacttcgagcacatatcccgctactccggtcggatagtatcctccataagccactatttgggcctcctctaagttgatgtacttttggac

SEQ ID NO: 61221 - DNA, 850 bp, Cannabis sativa
  modified_base (26)..(44): a, c, t, g, unknown or other
tcgtacccactactaatggccccctnnnnnnnnnnnnnnnnnnnaaagagagaaatttaaccttaattaaacaattgtaattaattgcataagcttaattcttatcagacctaaataaaaactatcaaagtgagcttttttattttagaacctagtctattttaatcataaaattaaatgggatgcatctagtcccaaaagtaaacatatatgctcatatacacacaatgatttggatagatcctatcatgttactagatttatacacagatgaaagaatattacaaaattgacctgttatacattatttatttgatctactgataattggactatgattaaattagattattagatctatcaacaggttaattataccaatttaaatcaaataaatcatagatttatgaaaaaatattttaaataaataataaataaataaacatgtaacaagataggatagatggttatggaatttatttaattttaaattaaacccataatttaaaaattacgattgtaacaacactaaatatcttttcaatatgatcaactgacttttcaaaattatgttacttttaaaacataaaattaaatatctaataagataaagcgataaataattatcatttttttaatctcataatttaaatttaaataagataactaacttttaaaaattaaaaaatatctagttagttttttaaaattatctagattatctttttaaattatatcatattttaattttaaatatggtcattttataaaattatttaaataaataacatataaaatatcttaccttaggtttaaaataagataacaaatgatcaaattaaaaaaaaaa

SEQ ID NO: 61222 - DNA, 1859 bp, Cannabis sativa
  modified_base (1594)..(1604): a, c, t, g, unknown or other
gggacccttccactacattggccttcccatgatggtagaggatttcacaatcgtaatccttaaccaaatctaaccaatgcctctgtgtcatattcaaatctttccgagtaaagaaatatttgaggctcttatggttaatataaatttcacatttctctccgtagagataatgctgccaaatcttcaaagcaaacactaccgcggcaagttctaagtcatgagtcgggtatcgctgctcatattcgttcaactgacgagagtcataagcgatgacctgatcggcttgcatcagtacacaccacagatcctgtctggatgcatcacaataaactacaaacttctctttatcagaaggtagggctaacactggagctgtgattaatttttgtttcagctcttaagcttgcttcacacttttccatccacacagacacttgatccttcttagtgagctcgattaagggcattgaaattttagaaaatccctctacgaaccgacggtaataaccagccagacccgagaaacttctaaactctataactgtactcggtgtcgaccaattcctaatggattcaatcttccccgaatccactttgatcccatctttactgacaatgtgtccaagaaaagacacttgagattgccaaaactcacactctttgaatttagcatacaacttatgtttctctaagccgctgtaaaacaatccggaggtgttgttcatgctccacttccaattgagagtaaacaaggatgtcatcgataaaacaattacacagatatcgaggaaatccatgaataccttattcatcagatccataaaagcttcgaaagcatttgttagtccaaaagacataacaaaaaaaaattcatagtgcccatacctattgtggaaagccatttttggaatgtcctttactcgaattctcaactgacgatagctcgatcggagatcaatcttcgaaaagaccatcttcccctgaagttgatcaaaagatcattgatcctaggtaaaggatacttattcttcactgtcaatttgttcaattcacggtagtcaatgcacatacgcaaagacctatctttcttattggccaataacacaagagctccccagggtgacacactaggccgtgaaaaacctaggtcaagcaacccctgaagttgagtttttaatctttaagctctgctggagccattatataaggggcctttgaaaccgttcttctctaggtgccatatcaatataaatcaatttctctttgtgttgttaaatccgaaagttcatcaggaaaaacatctaaaaatattccttaaccaccttgatgtcttctggtcgaattgactcaggacgtttggtatccaataccacgaccagaaaccctagatatccatcccgtaacgattccctgattgttagtactgaaatcactaggatccgagatccctgaactgatccaacaataacaaacggttcctcaccctctggttggaagattaccatcttccgattacaatcaatactggatgagtacttggataagaaatccattccaagtataatatcaaaatccactaaacccatttctattnnnnnnnnnnntcaactccctatcctcaattctgatcggcatagactagatgactaattctccgctagacagtagggttccaaaccctatgttatactcaaaattcagtaagcacatcagaggaagacatgtgtcgagctgggaataacgaaaaactcacacacgtgaacgaaaagtatacttagcatggaacaactcgttggagatataattaacatgttatgttcataactcggctggctgaatagccttctacgagatagaaa

SEQ ID NO: 61223 - DNA, 581 bp, Cannabis sativa
  modified_base (27)..(28): a, c, t, g, unknown or other
  modified_base (540)..(555): a, c, t, g, unknown or other
actaatcagattgtaaagagttttatnnagggcataaaacccaacatgcatgaccatagatcattttgtagataaagacactatacgcccaacagtccacaacattgctgtaatacttatccttagcaatttcaggcgaaatgtacttggttgtaccgacagtggacgacaacctggctatcaccagctcagctacaaagaaccgattagcagccttaagtttcacgactcttcttaaattgaagagctagttggagaaccaagaaaacaaagatgagtcagttgatgattcaggtgattcaacaatgactgagattgtgtccgagcaaagtgaaaggtcaaactcagtgagcataatgtgattgtccgacttgacgagtatgtttttcaattttaaatctttgtgatgattcctaacatgtaaagatactctaagactattagaacttcgacgaattaaattatgtaaatacaaatatgcatgaaaatcaaatgaaaacaaattttattggagttgtttatgttggaattattttaccnnnnnnnnnnnnnnnnaccaagtatgtttgattaacatccta

SEQ ID NO: 61224 - DNA, 832 bp, Cannabis sativa
gcagtggtgtttgtaatgataataacatcatctttcctagtgatcatcatgacaatgatatggaaaactcacatacttctcatactcttatacattgttacaattggtacaatggaatttatgtacttaacctcagttctctacaaatttgaccaaggaggttaccttcctcttgcttttgccacaatattagtcacaatcatgtttgtttggcacaatgtgtacttaagaaagtacaagtacgaatcaaacaataaagtttcaccacaaatggtcaaagatatcatgaacaacataagaattactcgaatgcccggaattgccctattctattcagagctcgttcaaggaattcctccaattttcaagcattacgtgcaaaatatgcccgcgttacactcaacactcattttcgtctcaagaaaatcgttaccaattagtaaggtttcacaagaggaacgatttttgtttcgcagacttgagcctaaggagttgaacatgtttcgttgtgtcgcgaggtatggttatagggatggattcgcataaggaaagtgaaccctttgagaaaatgttggttgaaaaattaaaggagtttataatgattaagaatagtgaaggaatcataagtagtgataatgaggatgagattgaaaggattgacaaagcttttaatgatcatggtgttgttcatttgatgggagaaagtcaagtttttgctggtgaaggagctaatttgggtaagaaaatattgattgattatgcttatgatttcttagtgagaaatttgaggcaaagtagtaaccattcttttgatattcctcacaaaagaatg

SEQ ID NO: 61225 - DNA, 1131 bp, Cannabis sativa
  modified_base (1080)..(1106): a, c, t, g, unknown or other
gcaaccataacaaagtgtctctatcaagagggataattttgttgtgaataaagtagtcattacatgatcatatttttttttaatatttaaatatatatggaaaattttattgtacactctatagagtttccgaagattcttatctgtttatctattcagacattgagaagagttttttaatttaatttttttttttataataatatacattgtagttatttaagattacttataaatttaaaaaaattctaattagttgatggtgctcaaatgtagtttaaacaactgtttaattactactcatataagataaaataattaagtgtgcgataaaatattaaagttttattttcaacactataaattatttgatttttttttaaaaaaaaattataagtaatcataaatactataaaaattttaaaaataaaaagttttttttgaatgccaaacaaaataagaagtctattgtaacaccctttaagattgtgtactatactagtctatattctctctatatatgtatttatataattgggtgagacctacctaacactaacaccagtaccacatatgaaggctcaaaatcaaaactcttttagatggctttaaagtggtcaactaatgatatgaactaaaataagcttaacaactttcacatgcagccataaaagaaaaatgaaaaagaaaaaagcagaggaagaacatgattgtgtaacttgtgttgtgtggtgtcaccttattacaagatttcgtcaaaaagaatgggctcacacttacaaatgatattaaaaagaaaatatataaagtaattaaaaacatgtgcatgcatgagagagatagtgtgtagcatgattgtattgagtaatcatacgtggatatatattatcatattaattacatgtgattgattacaaaacaattgttaccttactaaataaagtagtgttacagtacaaattttttttacttatagttacaacaaaatttataattaaaagtaaaaaaattgtgactaattataaattatcattcatacattgtgactaaaaaaatcgtagctaaaagtattagttacannnnnnnnnnnnnnnnnnnnnnnnnnntatttttagtcacaatacttgttgt

SEQ ID NO: 61226 - DNA, 516 bp, Cannabis sativa
aaaattgcactctacccactctctgttactcgttaaagtgtgtaatcattctgtactgcatgagtacccatccccggaagtcaaatttctatcactaggtattatgttatctttgatataattttttctttttttatgaataagttattattcacttttacttttttcttttaatttaatttttaagttgtatgaaataggaacattaaataaatcataattaattaaaaaaaaaacacaagttgcaagtcacggctgaactgaaatgaaagattctttctttatttgtcctaaatttattgtgatgggcttgccaaaaagggtaattggactttgaagattggattctgccgacgtgttaggcccactatatcgttaggggtgtttggatacatatccatattggtttctgccgacgtgttaggcccacatcatggcccactatttccttaggggtgcttggatacatgaataggtttatccattgtttggttattaaaaaataaataaaaaaaa

SEQ ID NO: 61227 - DNA, 1166 bp, Cannabis sativa
tatcaatacatgataataaccccaataaaatatcaaattttataccttccactaatttttacaaaataaggacattattttcctaaactactcaaaatactctttttatttaattttctctcctagactttctctctcttcctcgtgctctctctccaccacaccgagaacccaaccgatgtgatagaaccaccgagagaccaaacgatcccccaaacggctacaaacccacccaaaggcctaaagtctcatccacttcctcattctagcatatgtctctctctctctctccattccccgcaggcgacccaacgcccaccaccaccaccacgacaacgaagaacaagattcaacctagagcaggcgacccacgacaaccacgagcacgaaccaccggcagcaggccaccaccaagagactccagagtcaaaccgtcgccaccaccaagctcagtaaaaaagtaagttttttttttaaataaaaaaatagatttttcataaatttggatgtgaatttgtgtatgttcttcagattagttgaatttttgtaaattttggatatgtgtgtttttgtgtatgttcttcaatggtatctgtgtatttttatagtgttatcgatgaaatatcgataggttattgatagaatgtcaaccaaaaatgaaaatgagtagctgatagtttaagcataactattttctaatttttactgtatatcaataggttatcgacatcttatctatggtttatcgacattttgattaggatattttttttagaatttattagatataacaatatcttgtcgatgaaatgtcaatatgttgtcgataatagcactttgtttgagcataactgggtttttcaattttttttactttatatcgataggatgtcgacatgatatctatagtttatcgacaatttaggttaagatatactgtgctagaatatattaaagttgttgataatgttgacaatttgtcgacatgttgtcgacaccttttatgcattaattatctgatttattttgttgacaattttattgtattctgttattttttaagtgtgataatatcgacagatcgacattttgtcgataattttctgtgagggtatctgtaatatttttgttatatattttttaaatggctccacgactcatagttc

SEQ ID NO: 61228 - DNA, 2398 bp, Cannabis sativa
ggtacaagttgaagtaaggtcagaagtaagggctagtgacaatgttgaacaggaaactgtagaagaatcagatcagactcaagatagctccctttacttctaccaactttccagagataggatcagaagagaatcaagggcaccagctagatttggttttgcaaattacacggcctatgcccagaccattgccagtgagattgagaattctaagccaattaccacttatgaagaagccatcaattgcaagaacagagacaagtggctgcagacaattgatgaagagaaaaatctctattgaagaataaaacatggactgttgttaaagaacctgaagggtgtaaattgatcagttgtaaatggatctttagacaaaaggagggcctctcaagtaatgattacaaaacatacaaggccagacttgtggccaaatggtttacacaaagagaaggagtatatttcaatgaaatcttctcacttgttgtaaagcaggcctcaattagagcaataatggctaaggcaacctctgaggatttaaaaattgagtaaacggatgtaaagactgtctttctccatgggagcctagatgagatcatttccatgaagatgccaaaaggttttgatgaagatagagataaggtctgcttgctgcagatatttctctatgggctgaaacaaactcataggcaatggaatctcaaatttgatgatttcatgttgagaagtggcttcaccaagagtgcttatgatccatgtgtataattcaatggaacactctttcttctactctatgttgatgacattctgttgatagggaaaagcaagagtgaattggagaaatgaagtcactcctgaacacagaatttgagatgaaaaccctaggaaaagctaagaaaatcctaggcattgaaataagaagaaatagacctaagtctctgaccttgacacaaggaaactaccttagaaaggtactgcaaaagtttaaaatggacagctcgaaacctgtgtcaactccttagctgcacattttcaattgtccaaggatcaagcacccaaaatagaacaggatagagaactcatggactcagtaccctatgctagtgggattggaagtttgatgtatgctatggtctgtataaggccagacatagcatatgcaatgagcattgttagcaggttcattgcagaccctggagagaagcactgggatgctcttaagtggattatgagatacatcaaaggcattcttgatctaggcctacaacaaaagctataaaacagaagtggatgtattgggctatgttgactcagagtatgcaggttgcatagacacaagaagatccattacatattatgtattcacaatgcaaggaggatactgaatggcaaatttatagaaggtagtaactctatcctcaacaaaaattgagtacatggtagctactgaggcaataaaagaggttgtatggttgaaaggtctagcaaaggagatggaattcaagacagaaaatatcacaatgttttgtgataactagagtgcacttcacctaatgaagaatcctatgtttcatgagagatccaagcatatagacatcaagatgcacttcattagagatgtaatctcaagcaaggaagtccaagttcagaatattcatactaatcacaatcctactgatatgttcaccaaggcagtgactcaagtcaaacttaaacactgccttgatctacttcatctagcaggatgtgactaaccttcctctttagactacttaattattttaactctatgttgattcacttattgccatgtgacagatcaaggaagatttgttgtataatgatccatctcatgccaaagtcggccacaagttagttaggattagttgacagttatttatgttaactgtcctaggtagttacaagttagttttttctacttttgtctctaatctgaattgtataaatatttagagtttaattctttgtaaagatatagctttgtacaatttcttatctctttctctctctctctctctctcaatgtaattactccatttatcaataaaacaacacaattaatttcaacatgttcttgctggtttttgttcattggttcttgctggtattgttactggttttgctattttattgctatagcattcttgttgatgttgccgttattgtgttctgcacttgaacaactaatcttgattgctaaggggtgatgattgatcgcaacaattacccacagttccaagtcaagaaagaatgagtaataatcctctcctttttgtactttaatattagggtgtctatctatacatttggtatcctgtgttttatctaaatacaagttcggtactctgtgtttttgtaacgtccccgcttcaagcctcca

SEQ ID NO: 61229 - DNA, 1271 bp, Cannabis sativa
tagactttttttattaaaattggaaaaaagtctttaattccaaaactcaatagttcaggaggcatttttaactatcttaaaagttcaggaatatgatttggtacatgtcaaaatttagaggataaaaatcctaattaaaaaaagataatttttataatttttaaataatttatttatttaaaattaaaacaataatttgaactaataacaattcaacacgtaacaattttaaatatgtaaataaatcattcaaaataaggactaatcaacttactaaaaatgtgactttggataccattatcttcgtttataaagattgtagactaatttacacaaagtaaactttttgagaagtttgctataaatttctttattttttttcggttatgaagcatttttgacccaatatttacatcctctctatcccctacgcattcatgatggtttaatgaataattatcaattcaaatacggcatttcccaaaactagccaaagaaaaaggaaaatattaataataataataataattaataataaaaagtagatttaagtgattggaggggaaaaaaaaaattaaataaaaataaataataaatatgcttagtggtctacagacagaggagccacccaatcccgtcaattcgtgctaatccatatataagaggcgcgaataccctgttatcatgtaccaacatacaccgtaccaaactattcgccacatcatcatttaacgccacaccaaattcaaagatttaaattaaaataaatcattaccgttattagtgctgactttatcaagtcaacaatcgattgcacagtaattactctagtccgcgatacacgttacctgtttccattcaataagaagaagagacaccttaaaatccaaaaccctatccaataaaggctagtgtttatcatgtaaataaagaagaaaatatatataaatataaggtctccttcttcccaagaacactgtaatatcacttcttcaatttcccaaatcataattcattcactctgatctttcaagattttccttcgagaacttttcacaatcatttgatggacgcttgtctctcgtaccacaaaatccccaatttttcgatctctctgaagccattttcgattggtcatcataataattgtaatactttgtttcgacagtactccactctcaatttccgtacctctggtttcagaatcagacccttgacggtgatcgccgccgctggtccgagccactgccagtttagtaacctgaactcgc

SEQ ID NO: 61230 - DNA, 945 bp, Cannabis sativa
atatattaaaatattcaactcttatcaataatcagaattgtttttacatgctttttagggcattgggcatctcccttagtcccatattagttatataacccataaaagattttactgatagtgtctttgtgaatggatctaccaagttatgttccgatgcgatcttcaagaccgtcatattacctctctctactatatctcttagtatatgatacttcctctcaatatgcttgcctctctagtagcttcttggttccttggagttggcaacccctccactgttgtcacaatagagcctcaataatttttctacttctgaaactacttctagatcagtgtaaaatttcttcaactaaaatgtttccttagctgcttcataagctattatatattcgacttccatggttaaatttacaatattggtttgcttaatgtttctctagactacaactctaccaccaagagtgaatactaacccagatgttaatttttgactatctttgtctgactgaaaattagacaaagatacttgagatctatctttaactatctatcacgtaggattttaactctcaaccggaatacacaagcatgagatttctcgttctccaaagatacttgagaatgtgctttacaactatccagtgttccaatcttgaattagattggtaatgactaacaatctctacatcatagcatatgttagacattgttcacaacattgcatacaccaagcttccaactgttgatgcataagggtactctctcatgtcctccatctcctgaggagtctttggacattgatccttgcataaagtgattccctatatgctcagtaatcgcccttcttggaattcttcattgagaatctttcgagcaccttatctatataagttgcttgagaaagtactaagagcatgcctggtattgttttctgttttttgt

SEQ ID NO: 61231 - DNA, 730 bp, Cannabis sativa
  modified_base (192)..(201): a, c, t, g, unknown or other
gtttagtcagactaagatgtatgcatgattctctctctttactctttaccctagaaactagaaagaacattgatgtggttagatatctatgtctcgagtcaacaattataatttatttggtgtacatttttaataatggacatcctcaaattaatttatatggtcttccctataataataataataataatnnnnnnnnnnataataataataataatttatatggttttgactttgtttctttttaatatttggttttaactttttttttattattattttaataaattataaaagttaattaacgacatcttttttattaaagacacggtcaggattaaaattaaaaaaacgagttaaataatgagctgcctaatttacaaatcgtttgataaaaaaaattaaaatgaaatcacaaaaagattgcaacatcacaattaacctttagaacataaatgttctgtttcattcaccactaagaagatactagtggacactgttgcagcaggttcattcaaccttgtacgtagcttgagcacgtaactaatgtgtaaggtacataattgtactactaacaactcccaattagtcgctaagaacttgttattcctaaccactaacaataatttaatggcgagccatcgaagaataaagaggaaccacgaacaatgaaacaaaatcatgtcacaagaacaaaactaattacagtagaaaaatcgaattgcaatag

SEQ ID NO: 61232 - DNA, 1737 bp, Cannabis sativa
cttataaaactttaattaagattaattatattttaaaattaaattaagtataattattaattaacttttcgcaatttattattaagtaatgatcttttagcaatttattttttttacacttaaattatttaaatttttataacaaaattctttataatttaaaattatacgcatataatttcataattaaaatttcattatttaatttttttttatttaaatatttaaaaagtgaaaaataaaattgattaggagaaagaaaaaagggacttaatggcaatagtttgaaagtgtgtttgaagtggaggacatcatggacagagccctcctcaaccactgcttgctaataattatgggtcgccgtctatgggtaaccaggtgccgccttcaaatattggatataatagtaactttccaggttcgtacagcagtccaatgaccggagattttagtggttcgatgcctcccagttctgcaggaccaagctacctagaccattcacagtatggtttaacttcatcttctttaccagctcagcatagccaacctccgcctgtgcccaggggttcgcctggtggaatgtatcagagcttactgcattattattgaggtgtatgagaagcttctcgggagccaatgctttaaatgcttgtggtaatttcgtgaaatgtagggaatgaaattcttggatatattatatgaatcattaaaaaattgttgttggttcacttcatacatctctgtgttgtcttctagtttatttatggatcttgatgttatttgcttgttgaacttattttaaaagcatattagagcttttctggtaaactgtttcaccgaatagttttatagatcttgttcaaatagttgaggaatgctttcattactatgtttttctagtatggtgctactttttttttttttttactatttctttcttgaatccttagtccttttctacttgacatgtgtacatggaccttgattagacatgaaaaaaagttatgtatgcatgttcttattataatagtgtactactttatatttggtgttaaagaaggaacaatgcttcctttcaatagtttgtggtaatgacaaataattctttcgccagatggttggaaatcttgcactgttccctatcaattagcattgcagcattgtcttttgattcatgttccttattgtggtatttgtattaggcctagatggagaaagtgttttaattcctacttcccttccagagttttctttgtaaatgtgtcaatgtgttggacgagaaatttgttggcttaaatatatgttttgccttgatttttggatgaccctttactgagtacattattttcttccatgatttgaaatttgagtataccttcatcttccacgaattatagtttattactcggaccttcaattgttttttctcttttatttttgcttaatctatttggaactttcaactgtattggttttttttcaatgttccttttcttctttctacattactaacctatgtgactgataaatcttttgctcgactattaattaacttttctcgatatcaaacactcttttctaattaaatgcttgatcttttgtgggattaacttgaatcaattgattagtgttaaataattataattaaatggcttaactgttaaaataattataaatattataattaaatgacttaattgttaaaataattatagtaggaatttaaatataaataaa

SEQ ID NO: 61233 - DNA, 1454 bp, Cannabis sativa
taaatgaccaaaaaccaggtaacagtcacaaatgccccctttttttattgttcttgtgagtgtggttattttgtaaactttactatttcacattgttagtttgacaaatttaactaggtaattttaacatgatatttcattttgaattgaagaacggcagcatatggatgctattcaagaagttgaaaggagttgtgaaggattaatggatgaagaagaagatgaagaagaagaaggtagaataagcaatgagtcaaaaggaagcagtggatcaaaagagagtaatgagaaaaaggagcataagaaaggtgtaaagggatttagaccagcttcattagatgttttgcataatgtaaagatcaatgttgcacctgaaactccaatctctactttgagaggaatcctcatgacttcaacctctgacttctcattcagcaaagaagagctaaaaaaatcagaagagttgatgaaacaggcctttatagagttctatcaaaagcttaaactgttgaaaagctactggtaggtatatattggttttctcttaattatgcagaatgaaatttagtatagcgtgttgtgtggtgtagtggcaaggatgtctttgctggcatccttccttgcttgggtcaagagttcaaatcctaccacaacccttcatgggaggaattatgcttggctgtttggtgggctagctttctgtggcgatgccatccttaatgggatgggaactctcgaggtccatgtcgatgacccaatcaaggaaggatgaggtataaggaccaaatagctgaccgaaaggatggagaaaggatcagtagaaaaaaagaaaagagaattagtataaagttaagtcttttgttttgaaatgttttaacaaactatgtttctgtgatgaatgtgacagtttcatgaatcaattggctttctcaaagatcatgaagaaatatgacaaggtcactagtcaaacttcacttataatttatcataaaaactcttgttgtacttaagttgtgtactaaaactatgttaaaatgcagataagtacaaggagtgcagcaaaggcttatttagagatggtggatgagtcttatctgggcagctctgatgaagttagttcttgttctttgttatataacttaagttactaaacatacttaatctctcttaaactaagccttgtagttcatatctgttgcacacacaggttagtaagctaatggaaagagtggaagccaccttcataaaacactttgcgaatggaaaccgagcgaaaggaatgaacacattgaggccaaagacaaaaagagaaaggcacaggactacatttttattgggtaagtagattaaagaaattgtcttgttttggattagtgtctgagcttgtcaagaattttaaagcttcttctttatcatctcaactgtcttaaaaatgcaggctttctctctggttg

SEQ ID NO: 61234 - DNA, 1154 bp, Cannabis sativa
aacatcatcaacatcaagatctgtcatggccttttttatacttctagcatgactatgaaatttccctagttttgaatgttgtaattgtacaaaagttggtccaatgaatatctgtttaaagctccatcactttagcttttgtgaacatggtaactggccgctgtttagcatcttgaaacagagggtattatttgttgttctgaattttgagctctttaaatcataagatttccatctctatatatcactagctctgcaaatcacaatgctcatctcagtaataccttctttgacatatgatatatacaaatttatataccttttatttgagttgtttcgtactgatcagtacaaaattattacaattgttttgtcttcatgttcgtatcaaagattactttttaagggatgggaaataaatttatataagttttactgtcatttttgctctgcgtatactgccatttttactgcttatttcattgagttatgctgcatttgttttactctgttatctggtccttctccgctggtttagtctacttgttgatgtgcttctggttgttattccttcataacaatatgtatttaccttgtgagcaatatttttatgatgatgtgctctgcatgttaaaatttacaaatgcgttcactgatatcattatgttgtatgtatgataaaccttgtgaacaattatgtataattattgcatgttgtcttatccataattttattaggagggagttgtcatctgatctaatgttgcagaaatttgtaaactttaatttcgtcaaagatttaataatgcctcgtgttatcttgaacccttgtcagtatgttgttttctgcttcatttcctaagtttaacaatgtctctcatatattgtttaatagttgaccaatgtcaatttacttattaaaaatagatttcatagatacgtatgatgcacaccattttgcttattaaagaagcagttcttattttcttgtgttatatctttttggttctgagctggagcaaacactatagccattttgtaagagtgtgaggatttgtttgtggatggcagcaaaagaagagataaatcaattggcactacgagttctcgatcggcgaaaaaagcaaagttctcacttgcattggcagaaacat

SEQ ID NO: 61235 - DNA, 892 bp, Cannabis sativa
tttcagctaaggcaaccgcctcacttagtctacatttcccttgatttaatcactaattatatattagttattaagcaatttaaggtgctaaatgatgcaaaagtgactttatgaaggttaattaataattttttatattatttattaagttaaaataaatgaggttcaatactaaattgtagcaataagaatatattatatatacaacttaattattattatgattcttttagcaattctctaactgaatatataaataatcatgaaatgtcctattgtgagtggctgtccacataaatctatatgttagtcaaattcacagctatgattgcttgttgattgtgtttctaacttcctctaattaattaagaagaaatatgcaataagttgtgtaaatttatgattatcaagttagaaaatatgcaataattattattagttaattaaaaggtgtattaacatcaatcattttcagaaattttgacaaacgaggttctttcattctcttggtcaagcatacgtcccaacttggataacactataagccaatattatagtactattcaccaccatagaaagtgtggccaattacatctaattgacattaaaatcgagttttcttgatagtatttagataaatatatatttttaattatttttttaacgaataatcattttattaaacctcaaactcagttatcaagatagataacaaatcagttgggatatattcaaactgaacttaataaaaaaaagagaagctctagctgagctatcaaattaactgattctttaataaaaaaaaaaataaacacattttgtaactcaatcattaatttttgacaatgccaaataaagaacaccatctcagattgcctaaattattacaaga

SEQ ID NO: 61236 - DNA, 1206 bp, Cannabis sativa
ttatcgtcaatgattatagtaattgcgtaattttatgtatttctgtcatcatttattagttggattttgaatatttattactactattatattttccttttttattgatatttatatctttaaatgtgttttattatattttattaggttttaattttttttaaattattcttactgcatatattttattaattggtttaaaaatctgtttcatttcttaattaactatcatttagttttaattatattaataaagatttttataaattatcgtatttttttaaaaaaataattttaaatattgatttattatctagattggttttatatggggatagtttattagtgagtgccatttttttttggctagtttgtgccattttgttttggcaattttgtaccatattttttggttagtttgcagtttgttgttagctcgttttgggtaaggattcatccttaaagagtgttattgtagattttcagaaataagttttaaatcttatttttaattatattttattaatttttgaggaatttcttgctgtcattttatatcattgttttcttatcatttatttgttaggcaatggagtgttgttacattttttgaaaaatagttaattttaatcgggttttgatttatttaatttgattaatctcttaaatcttatgtatggtgtaggttatattggctagtatagttctagtttggaagacatagctctaataataaaaatgcttcaaagataagcttttttcttattataataataattgcttttatcttaatttaagaattcacaacattatcattgtgtagtgtgctaacccaccttaatttatacatctatttattttgtaggtagtttttggtctaggtagttgttaacatcggatgcctcttgaaggtggatctcaagttattttgtttaaatttctgagataacttggtcttatataagtcgctttgtttgtagtgactcatattctgactctgtatatctttggctagacaattaacttgttgactgaaagttcttctgcgtcgatgattatcatagtgtcatttagatgactctctctaaaaaaaaagtgtaataatatctatagcactatcaattttacatcaaaaagcataccacttacggctatatgaccatatcctagtaatgaattcaacaagacctaaacacatttgtctcc

SEQ ID NO: 61237 - DNA, 1286 bp, Cannabis sativa
  modified_base (1152)..(1186): a, c, t, g, unknown or other
ggcttgaagcggggacattacagtccacgagtctatcttattagatttctctgatacaaactagggttctctctgtttctaagatttttcatccctttttcagtacacactgctcctatttataataacatagggagacagttaattacaatccgattcatatcccataacaatatttccttgaaattatgggattttattacgtctcacgtaaaataaatacggttattatttgaaaaatacacagctatgaattatctgcttttactgggtcaatggtgacatggatttagatgcgctgcaaagtgtatctcgttggttcatctcgctgggatagcaataataaccttgacagtgacctggaacttttcccatatctctccaaggttgataatgtaaatcccattgttttctgctattaaagacataacgctccctccgacaatcgcagttcttggtgaaaaggtgaacttcaatagtcaacatcatttgaatgtcaacttctatttgagagagttgactcgacggagcagtggatctcattgaaagatgtctgaagctgattagtgaaagtaccaggaatatgccttcctatagtgagatggatgtcttgctattcgttgttcagattcatccaactgttatgcttagttggtataatgtatattacacgctaaatgttctaacagtcaacatggctcgtcttcacttttttatacatagcgaggttggtgcctcgctttgtattactgatatcatccttacgattaagtcttctgatgtgaaatggtttctcatcaatgtatgagtcaatagtttgtacatccttatctcgcttaagactttacagtcagcgagttataaatatactctatcagctccttatttaatgagttattctattttaatatccttgaatttaattaccattatattcgttgattcgtactctgcgtggttgacacgtgtcctcctctaaagtgccaccgaattttgagtataaaagttaggttatcattaataagcctatgttaatttagaggttttagttttaattatatgtataattatatatagaatattatagaacaatatattatataaatttaaaaaaaatacccatgaacatgaaattgttgggttttgtgcccnnnnnnnnnnnnnnnnnnnnnnnnnnnnnnnnnnnaattaataaagatcagaaatcgttttatattgcatagttcacatgatttatttcatgattatgtttattgtataaattatattaagtccagaacatatgt

SEQ ID NO: 61238 - DNA, 603 bp, Cannabis sativa
ttcattaataaagttttatgatctgttttgtttagtgagtatattattatttttgattttggtggttgcttcaaaaaataatatcgttagtttaataattatgtacttaacaaatttttactcgtatatataagctatgcttggaccattttaattattatatataaagttgtgtattatataaacatcttgaaggaattcattaataaagttttatgattcgttttgtttagtaagtatattattattttttattttggtggttgcttcaaaaactaacgatatttatgattctatagcattatgtttaatgtagtgattttttttttgtaacatcatatgagaagaaatccaatttaagtaactattcaattcttattatgttatgaatactttgataattagttaatggattaaaaatataggctttgttgggtaacaaaatgaaaacaaaattgaaactattcaattcttactactttttctttttaattaaaaatatgaaaacaaaatgaagaaatggacatatggtatcctattttttattttattttttaatattatagtttattatttacctctcttaaaatactaaaagatatc

SEQ ID NO: 61239 - DNA, 819 bp, Cannabis sativa
aaaagagctttctgagaatagaaaggagctttctgagaataggaaggagctttctgagaacaagatagagtattctgagcgtaggaaagaaatttctatttttgaaaaaaaattagatgagtttcgtgaaaatattaatgatctcgttggaatgaaagatgatgccaaacatgttgaagatcttctccgagcattgtgtaatcaacaagagaaggacaaagaaagaactaaagtggaagagaaaaaattggctgcacaaagggacttggaggagtgtatcaatgatttaaaatccgggagaatcgttcttagcagtccagattgtgtggctccttctatatcaattttaaaaactgacatacaagtataaataattcattttcatttacctttatgcatcttttatgtgttttcgatttttttttctattttctttttaatgatatatgactaacataaattttacctatgtaggatgacaataaattcttttatcgaaagcaaacaaaaattcctaagagaaaaagatctaatgaagataaaaaagtataaaagtcgtattttttgattgcgagcaaggaggacatgacttctgtctatcattcttcaagttcagaaattccaccaacaattattgcttcaccaccttcgttttcaacacttgttgaaacaactgtaatcaaaggaaatgatatacatcccaatagttatcctccaatcgactcccatccaaattatgttgatatttctccaacatttttgacaccagaaaagaagataaattgtttctcaggcaactttccatttgatagtgatttt

SEQ ID NO: 61240 - DNA, 1225 bp, Cannabis sativa
gtggtatataattttattattaaggtatattaattttcagtgatacgatatattaaatattattgtatatatttaatgatctaacatatttatttatttttatcacaatataataatatgtgatattaaaaaaattatataacttaatttaattattatatatttttttaaaaaaaataatatatataataaataaatttttataatttttttactcatttattatatttggtcacttttatttaaaaaaaaaaaaaaaaacatttactaaatttttaaatttaaaactattttacatctcaacctggccattggccccaataattgaaagctgcctcatccataattatttaaaaaagttagtttgatgaattccctcacattcaaatttatttggtacattattattatattttgaaagtatggttgttattatttgatatccataaaaggcacacacactatacatgagcacacacaggcatattttcatttattcatttctttcatgtgatcacatctcaacttaaattccaaagctccaatgctgaaaaacatggaggacaacgatgccttacttacctcagccttcatcaacacactgttgaccaaacactccaactcctctcacccaatatccaaagcattaatccacactcaaaacgacacgtcgtttactcagactcttcaatcccacattcgaaacctccgtttcaataattcaacgacacgaaagcctctccttattgtcgttccaacccatgtctcccacatccaaaccgctgtcatatctgcccgaacgcacaacctgcatatgaagatccgaagcggtggccacgactatgaaggcctttcttacacttcttccacagaaacgcgcttctttcttctagacatgcagaagttctgctccattgatttagatatggctaccgaaacggcttgggctcaaactggagctacactcggcgaactttactacaagatagcccagaacagcaaagttcacggcttccccgccggagtatgtccttctgtcggtgtcggtggccacttcagcggcgctggttacggaaacatgatgagaaagtacgggctcaccgttgaccacatcgttgacgctcagttagtcaacgtggaaggtcgagttcttgacagaatgtcaatgggggaagacttgttttgggccattagaggcgggggaggagcgagcttcggcgttgtt

SEQ ID NO: 61241 - DNA, 823 bp, Cannabis sativa
gacgaatcaaggattaactacaagtaaaatagtataccaggaccagaagaggcacccggatacctttccgacggaggaaatatctgaaaacgcctacggagaaagtaactaaaaaacaataaaaggggatcgaggtaacacaaattatggaataaaggcccccggcggatgagaacttggatccccacagacaaggatcccgtcggaagtgggggggaaactaaagcgtaaaatatgaaattaataaattcaggaatgtgatgccgacggacacaacaccgaagctaggaagaataataactctaaaacccactaaaggcacaaacacgtgtagcgagagagttatctactaaaatacaaacacatggcggagggcaaaaagaatgaaagaataagaacacgtgtcaacatgacaatggttaaatgatgaataacccatgcaagcaaaaaagacgtaggggatatataaagaaggatcacgtaaaagaaaaggggattaggaactggaaaaagaaagaccctcaaaaagaaatctcgactgttttccgaccaaaacagtttggcgccgtctgtgggaaagtttttctttttctcagtaaaagaaccttttcgtaagataatcaacaaaagatatggcaaatgaacaggaggatctcacccttcaaaataactcagataacatctttggaacaccggcgaacattggcgacgcaggcgaggacgcagtgaacccaaccccaccatggcgagagatcctggagaggctgaaacaacaagaagggaaaatggcaacccagggagtggaaattgcccttcaaaagga

SEQ ID NO: 61242 - DNA, 614 bp, Cannabis sativa
aatgagggtaacatagtcatttacaaaagttttattttattttttccctttagtgctttcttggctgaattagaaagttagagtaaatttattttatgttttaatttatgtattacctaggaaataagaagattattcaagcaaaaaaaaacataacctcattctctcttttctttctaccccttcgagccctagaaatcagtagcaactaagagtattttcttcatcaattccacaaagtttaagctatatttatttaccctaggtgctacacaaggtgtgacatgagttcttcctcttttctcttgaatttcttgtgttataggttgagttttggttggggtttatattgatttcgagtatgtgtgattgttggagtgaagacatgtttttaggtttgaattgtttatgatttaagcttagtttgattggatattagggctgttatgcatgaatttgaagaaataaggtttaaggtgtttagtttttacacaacaatggtgaagtttgtattttaagttacttgttgattttgagttttgagatatgttgtatacatgatataaaactgttctgtgatgtttggaaacaattggttaggtttggaacaagtt

SEQ ID NO: 61243 - DNA, 1133 bp, Cannabis sativa
aatagctcgctttacttcctcaactctctaaccaactcctcattcatttgggcagtaacacgatgttgaacgcagtcaatcacctcttcacaagcactaccatcagaagtatacaactgggaaaaataattaacaaccacatcttctaacccatgctcccactcaacccaacaaccactatcagttttcagctttgtaattcggttgtgactccgtctgttgctggccactctatgaaaatacttactattttggtccccttcctttaaccaaaattattttgctctttgtttccaaaaggtttctttctgatcaagggcaacaaaaagctgcttcttgacttcactgtatcgttggatagacagtgaatctttcttgttcttcaacatcttcaattcacgtttacagctattgattctgctcttaaaattccctataatctccttcccccaagatgcaagagcagtggcacaagaacttatttttgcaaaattattttcatttcccaaatcatttcagcaactctttattatctcaaaatagacaggttccttaagccaagcattttcaaatctaaatctattattgaggataacattagattgaaaatccaactcaaggaatataggacaatgatcagaggtggatgtttccaaattaatcaacctagtttggggaaaaacaacataccagttagcagaaaccagagctctgtccaagcggctctccacccaactatcggtgcccctccctctctcccatgtataacgataaccttgcaactccacatccaccaaattacaactctgtaccgcctgttgaaacccctccaggagccatcgaggatagcttctcccccctcgctggtcactatgatgcaggaggtgattcatatcacctataacacaccacgacttttgagagtcattcaccagagatcgaagaagattccaagtattatgacggcaacgtctatttggttcaccgtagagaccggtgagtctccattgtaaccgatcaatatttacttcaacatcaatatgatgttgtgagtaacccagaacacgggcctcttcctcgttcttccaacataaaattagcccaccacttaatccttgggcctccactacaaa

SEQ ID NO: 61244 - DNA, 907 bp, Cannabis sativa
ctaaagtagatgtggaagaagtaagagaacaagctgcaacctggaattcttctgtaatttgtatggttcttggggccaatccacccctaactgtgtttgaaggttttctaaggagagtttggggacatttggggataacacagatagctagaatggcaaaagggttaacaatggttaggttcaatgatgaagcaacaagagaccaagttctagagggtgggataattcactttgacaggaaccagttatcattaggccttggtcgactgacctaaactcaattaagcttgtgcgttcagttcctttgtggattcggctacatgatcttggtcttcaatattgggggaacaataggcttagtgctttggttagtactattgggaaaccaattatggtggaccaatatactaaggatcgaactagagttcaatttgctagaattcttgttgaaatggacatcgtggatactcctccaaaatcgattcagtttctgaatgagtttgatcagttggttgaacaagcggttgagtatgagtggcttccagtcaaatgtaagaattgtaatggttatggtcatatgcaagctgattgccgaagagatgttaatggttctaaagagaagaagcaggaacctaaaccagtagctatggctggtgaaaaagagcagcagcctcaatctatagggcaggtacctacatctaaacatattgaaaaagctgagttggtggaaaaatggcaaacttctaggaaagttactcaagctaagagacagggtactttgatctcaaggtctaaattggaggcaaaagcatcaacagggaatgtttttaatgtcttaatggaggcagatggtttggaaaaggtggaggtggtccctttatctgttgaatctaatggataattgcaa

SEQ ID NO: 61245 - DNA, 1195 bp, Cannabis sativa
ttaacgaccttaaaagtttagggggcatgatttgatacacatcaaagttcaggagaaaaaaatcttaattggccttttgtttatatgcagtattatgggtcacacggagagaaagtgtcacaagatgtatattactccgactaacttgttggagaagccatatgggaattttatgtgagctaatacaatggaatgtgagctttgttggcccgaggtggttgcgatcgaagttgatggtagggggaagagggagtgaggatggtggtgtttcgattggtggtgcaggtatgagggaaggggggtagaggctggtgttattgcttaaacattgattggtaaagatattatggtagttaatgccaatactaatagatatattaattgtgattactctggtggggtaatgatgttgtttctaatgaggaaagtattggcctggtggatttaaaatagatgaagcttgttgtggttactagtggtgggacgaaaagtgtcacgagtgaggttatggatcttgacaataatgaccttccaaataatatttttgtggcggaaattatggagcaggcccgccaattaccatgagtactctaagctgaaattgtcgtgagcttgagaacctacgaacgcctcgatttcttatggatttgattatccaaaaaaaaacccaaatttatttctttacatgagactatttgtggtaaggaggttgtcataagattcagggtacgcattggttatgaagggcatgtttccattgagggtcgagaccatagtagtgatattgctatgttctggagggttgttgaggaggctatgatacttggttattttaaaaaccatatagatgtggatgtttcggttggggatctggtggcatggaggctaaccgatctatatggtgagcctagctaatatgtggtttagccaagatacttgagatttggttcgtacctttaaggatcattctttcgtgatgtattattggggacctgaataatgtggagagtaatgatgagaagagaggagggaaggtgtagcctaactggctattggatggcttttgaggtatgttagatgactgtgggtttgtaacacactactagattaggcgtgttatcgtgatttaaatgttaggtatgcaatctgttgctaatcaacagatttattggaaaacgtgtttaattaatttttt

SEQ ID NO: 61246 - DNA, 1223 bp, Cannabis sativa
aacaattcttgacaaaaactttctgatttatgaaatacgaatgccaaaaaatataaaaagacgtgtcttgtttttaagggtaggtaagaagaaacactttcttacccaataaatttaaagaaggtttaaaatgaagtttgtgtgagcaaaatgttgatcctaattttattttaccattaaaaaaaaaaaacttatctataacacgtgacagttgatgattggattgtgaaatcccatgacagtgagagtgagaagcaaatcctattttatcattttcaaaactaattagcctcattgctcactttctcttcccttcactgttcctcttcttcttcaaaattcattaaattgatttttcagatttcttttgtctcaggtatgtactcaaaatctaaaatccactttttgtaattaaaattatatttgattgtgctgttacttttcttttatttctctttattgttttatatcaggttggaatttttcttgtcacattttgaggctttctgtgttttcctttctaagcattatttaagattagaagcaatatgaggtttctattgtaatattacatgaagataccatgatcgataaatactgggtgttatttttttttaataaactttttattatatgtgcttatttcatgagcatttagtggagaactttttttttttggatagtaaagaatgattcatataaatacttgaagattgtgcttttgtgtttggttaaacctcatcaatacaatttgcctaatatgtatattgattctataattagttgttggcataacgcataacgcattttgattatattttacatatataggatgattatccattttattttgatgttttgcagcagagcttataatattatcgcggattatttttgatatggtgtttatgtagaaagatttgatctctatctaagtgttagatatttttactatttttttttttggttttgcttatgtactgtttgattaaattctacaatgaactatatttgctttaaaagattgattacaatgtattttgatatgatttcttagtggcctcaataacaagtttaacaagttaaacgcatgtgagaaaataatttgaatttggtgtaatacttccttttttacacacaatcaggatgatatgttgataacactatagagtttgttgtgaatttttttcattatataaaatttgttctctctctctctctct

SEQ ID NO: 61247 - DNA, 1908 bp, Cannabis sativa
attaatattaaacttcatacacaacaattgaccttaaaacaaaaattgttgtacttgtaacaattatgaaataactttgtaacgattatatctgctggccatggttgacagttttcggcgattcatggcgatttctggttgacgcggtgcttctggagtttgtggctgttcgtggtcgccgaagaaggaaccattcaatagggagaagtagtataacaaccgttcacctattttggatctccagctatctctcactatagattttcacttgttgtccatttgatcaatttattgttcttgtcgaccactctcattacaatttactttaatttttctttcattgttctataagtgcgcaagacaaactgtacattgatcagacttatgaaaatgctttggaattttcatcacctgtctttatggatctaaggatataagcatatgtttttttcttaatgtaatatcctattaattattacaaaattgtcacactaggacggctgattacccattcttgtccatcacatatctatagtcaagttatccattagaaagacaaagtgatgatttattttcatcagtgttccaaatttccaatccatttgatgagtcttgatctaacaaaattatggcgagtacgtacatgtgtttccggtgagagtgagttgatttcggtaatgcaaggagactttaacttggcctagctatcaaagtcgcttcataagtggggcaaatacagaagaatctttcaccattgtagactctatctttgaatttgtttggatggattttttttgttgctaattcagtctatatatatatattcaccacatatttagttaatgtttttagttaatgttcagtactttattatgttctccatgttggagatgttcgttctattaggtgtcaaacatcctggccagaggtcatgggcacatttgattttcgatcaccgatctcaaaatctccatcaaaaaatcgtgttctctgaagcatacaaggctattattagtgtagttattattattattattgatgttgatcaaaattttcaacaactatcaaataaatattgataaagataattaaaaaaatgaagatagaatttgtacgtggtttcagtattaataaattgtagtccacgattcacttttatttataattggaatgttcaagttacattattagagctcactttttgtgtgagtcctaatttcctattgtatttctaggtatttataagaagaacaaatggcaatagaagataaaaaggtgtgtgaacttttagtctctaggtgctaccaagtctctttggtaggtgttaggtgagacaagatttgtcacacatgcggttgatatgacagtgcataactgtcactttttctcagccaaggtgaatgggtaatcagaataagtatgactttgtaatcatactaatcatgcgccattgtggtcatgtatagtaatctgcttcagaatctgtgttacgttcacgatgatctccttttataataataactctatacagtgtgagtaagtatattacgagaagataagaaaaacgcgaataaactatcataggcaaagttcaaaaggctaattttgttacacaaaggttattgaagaaagaaaaaattgatacacgagcataaacaaattttgttttctaaattaaagtcatattatatgtaataaggaaagaaatttttgaggtttcatggtttggatatccaaaattagcagaagattgacaagaaatttgattgggaattaatttgggattcaatctttttttttaatatattgaaatcagatcgagttagattcaatccgatccataaacaaattaagcgggacgaggcagatttgatctaaaattcaataagtatccgaatgtttcaaatt

SEQ ID NO: 61248 - DNA, 983 bp, Cannabis sativa
cagaccaagcccttgatcgagacttggatttggacctagacatgtacacgaacttagacctagaacagaataccgacccatacccagactgggatcaaaacatgggaccaggactagagcccaaatgtaggcccagactcgaacttgggacccaaactcaaacgtgaacccagcctgggatccaaaaaacacgtacccaaactcagattaagactcggaccccgaccccaacatttacctagaccctaactcgaaaccaaacccggtcccagaattagaactgaaactgtgactagaacccggacctgagaccaaaaccgaacccaaaccaaaacccaaacttagacgagacctagaccgagaccttgactaggactgggacctgagacctaggacccaaacttgtactgcgacctggacttgacctggtcctatacactcagcgggacctagaccagaatctggaccctgatagggaccagcacccaaaccttgaccaagactatgaccgagacatggacccaaaccaaaacctagacccagaccagacttaggaaccggacctagatgggagacctagaccagggacccaaacacgaaccaggacctgacctggacccgagaatccgaagtcggactcagacctggacccaaaacctaccccaaacaaaaaccaggacaggaacctagacacagaccaggacaaaacctgaacccaaacttaaacctaaaatcagacttgaactcgggacccgaactcagagccagacctagaataagacccaaacatagacctgaacctaaacctgaactcgaacatagaccgagatcggaacccaggacttacacctagaattgaacccaaacacaaatcaagttcaaaacttgggacttgaacctggagcaggacccataccaaggactcgaacccacactcggagcctgatccagacctaaccaaaatccgaacccaaacccaaact

SEQ ID NO: 61249 - DNA, 2348 bp, Cannabis sativa
cttgtcttgttacctcgagaacctttccccagaattcaacctcttcaatagggaaagaaagccatgcttgattccgagctggccatcctgattcaaaaacaaattcagcaacagttccatcctctttagtatactggaaggggagattctgccaggcatcttcagccaaatgtggcaatatgggagctatcacttttacaatggagaaaagatgcgcaacaagaactgtttgacagcttctccttgtgaaacttgatgtacccctgcattatcatactctctattacccgatacatccatagattaaaacaagcacacttgatatatacgtttagcacctgctagcgtaaaagctaatattcttgttattttgcagatattagcactgttagtgaaaaagaaaaattacaagttcccggaagatcaatctttgcattggcaaatcacggtaatcattaaaaatctgaaatgaactgatctgttacaaacttgaagatagaactaagaagatttacccgacataaagccgatcttttgcaacatcaaaatagaaatttgataggtcaacaatgacaaatcgttgtatgacctggaaacaagacaaaacatactactcagaattgaataaagaagaaaagcaattagttaaatgtgatggctttcctactaaggtgagcaaagctttactataagaatcaaaagaaacttaacaatttcataattaatttattcttccttacaagattcaatctgcttaggatcataagtagatcactaaatacataatccctgcttgtttctttccttcccccatctctaatgaacatgcaacagttaattactccttttttgtgttctttcatttatttataaaagaaacatagattaaagcttctattcactctttcctcaaataaaatttaaggcattgcgagtctaagtttaaatttcagaattttgagcgaaaaaaccaaatgtaaagttatatcccacatttatattcctcacatatcattataacagaaatcaacaatattatattattttttacctgaaagatcttaaagaactgatagttttcatagctctctctaatgttctttacaacattttcaagctgaaatagagcatgctgatcaatcatgggaagatcgtgatacggaacagcattatcagcctgaaaatagggcatatttataagcaacaaataagatgtaactgatttcttcaatgatgtcacataaatatttgagagaaaaagagagaggtaggcctttttaaagggtgaaacattttagaagttcataatgtaaattcgaatttggggttcactaagctcaatctctaaaacatacttgccaatcatgcagatttcccaaaaggtatctcaatgttcctcgcagcttccgataaatgtcagacatttggcggagaacttgaggaccaaccagtacatcgctagtataatctacactggaaacccagagtcgtaatacatcagctccataaccaggtgcttcctgccagcagagaaacagaccatttagcaatacactcactcgcaaattgttctagggcatgggtaagattctgaagtggaatgtcttagaatatttaacattgaagaaccttctggtttttccctccttcaatcacactttgtgggtctacaacatttcccaaagatttgctcattttcagacctctctcatccaatacaaacccgtgtgttataacactagaatatggagcctttcctgcacacacaaaagaaaaagactcatgcagtgtctcaccacattttatctttcaggggggagaaatttaaggctgcatagaatgaaacgcaggattccatatacaaattgaaattagattgctttgcaactcgccccttggctacctaaacaagaggctatagaatacaaagcagcagtcatcgttttccagatgatcaaacctggaaatattctctgcatctaaatcttaggtaaaacagaaacatgaaaagggtattcatttttcttttcatggaaaaaataaaataaaatgatagtatttattgaaatgtaacctgtcttttgactcaacatcaatgaaatatcccaactcccaagtgattattagtacaaatgatatctttgcttgtaaacgaggacagagaacattattaataaataatatgttcagcttctaccttttgtagcaatgcttgttaataaagaactttggaaccatccacgatgctgatctgtgccttcaaggtacaagtctgcgggtaaactaaggtccttcctcgttcccaaaaccgcagcccaagaagaacctggaataaataaaataaaaat

SEQ ID NO: 61250 - DNA, 634 bp, Cannabis sativa
caaataacatgctcctaatttgtagacttttgcacttgttctgaataaaaggatgtaaattgtcacagtttattccatatttacagctggtcaaagcacataactgcttctttcccatttttcttagttcttgaagttcaaagaaagccaaaagaacttcatgataaacttaatacaagaaaaagcctcaaggttttattctaggagagtctttttatgaagggtactactgtaattctaggttagtggaatgggataattttttaaccaaagactatatagataagaatagctttcatttggggtatggaatgattagagattagtctcattgtggagagctccatttctctcgggatattgggaataagagattgcaagcctctcgaaagcttaccattctgtaataattaaaaaacaagaaagctcaagagaatttcacttattatttctattctaaaatgatgatgaagattctaactttaaaaagaaaaaagaaaaaagaaaacttatcacttcagcacagcagagtgaatactgcagactgcaatattgaaattgcaatcagtctaagcaattgcaacggtataaagaaaccagccaaacgtataacttataacaatgagtggaaaga

SEQ ID NO: 61251 - DNA, 1081 bp, Cannabis sativa
  modified_base (1007)..(1020): a, c, t, g, unknown or other
agagcaatacaagagggggggggggggaaccttctctttctaatggataagctactatgttggaatgtccaaggagccaacaatcaacaaaaacaggggctaattaagcaatttattagtctccaaaaagttgattttgttggcctccttgagacaagagtcaaggctcctaagcttgggaactggtattctaatttttttgtgggatggcgtttctcttccaacattgcttggcatgctggagggaagattgttatagcatggaatcctttgaggttcatagtggatattattagatgcacaagtcaacttatgcatctaagaattggtactactaatggtatatttgacagttacttgactgtgatatatgcatcaaatagccgaaatgagaggagagatctttggagagatgtttgtgagttggctccaaatgggaagtggtgtctgatgggggattttaatgatatcctttcgaaggaagagagaattgggcatcgggttagaagctatcctgatgatgattttcttaattgtgtgaatcaatgtcaccttgaggatgtgaagtttagtgggaatttctttacatggtcaaataaaaaacatggggatgatcgaatttactctaagattgacaggatattagctaaccaggcatggctgaatgcttatgagaatgctgaggctacattccttaatgaggggttattcgaccattctcctgggatcctaactttgtatcctcatttgaatggtgggatcaaaccctttaagtactttagaatgtggaaatctcattctaagtatgaaaggagtttagaagagatttggaaccaacctatagggggttcaaagatgtttcaggtagtctcgagattgaaattgttcaaaggggtactgaaggacataaacaaggagagatacatggacttgcaggctgctacagctaaggctaaaagctaaattggatgacatccagaccagattgtgttggaaattattttacnnnnnnnnnnnnnnactaacaagtatgtttcattaactgtaatgaccgctttagtaatttggattagtaaaggca

SEQ ID NO: 61252 - DNA, 561 bp, Cannabis sativa
gatttgcttcaattcgaacttcatgactttggagcataaatttcacttcagcaagagtgagattgtctcttgaggtcagattgacaacaacagcctcatacttagtccctaagccagcaagaacatacaagatgagttgttcatctgagattggattccctgctgcacgaagaccatttgccaggttcttcattttgagaaggtattcgtcaatggccagagagcctttcttggtggattgaagttgattcatcagatggatttatattgctcgagaggcagtcccaaacaattgctcgagcgtgttccagatttcagacgaagtagcacaattcaccacatgcccaatcatagactcagaaatagttgacattaaccaagaaaggacaaaattgatcaagacgcatccatctattgaattcaggattactcaccgtggttgtcgattctagtggctgtcgaatccttgcttgagggcgatttcgatttagcaaaattccttcaagatcatgtgctctgattgcaagaaggacttgggatctctagaaaaaataattgttc

SEQ ID NO: 61253 - DNA, 1492 bp, Cannabis sativa
ttgttgaatggattggtcattagttaagttttggtctttgtttttgattcattgttgagtggttagattaaatagaaaccagttacctttatcggtttgatctttgtattcattaataccgaatcaaaagttcaagctttgatcttcgtaaagaatccatttactttgtgttgtgtttatgttgttactattttgcttgtttgatttgcatgttttgttttcctggtatactctatcaattttactttgaagcttcatttctgtaaaatagctactatgaatattcagatttggcttggcttattctcatcatttcatataagtatatatataaagttccatacgttttatgtttagttttttttttgtttaaaattttgtaaaagtagtttggtttatgatctttatttttttaagttagttgattagatttattgattactttgtgttggataacttgtgcatgtttctcgccttacacaatgaattttattgcccagtctgtgcaacagttgttgcatgacaacaaggagctaaagtacgaagttgccaaattaaaatccgacctccaaatgctgaaggaggctagtttagagagggacaaagaactagcctctcatcatgcggaggttattagtattctcttgtccacattgtctcttcaacatcctacacaccctaccacttcgaaagcagcaggtaagagacctactcagcctgagagtggcctccctgatctgaccttgggattgtccaatgttggtcccaaactttatgaatccgcgagcaccatactcgagtgcaaggtgagagttttgttgttttccttgttagttttagttctgttagtttattcatgtttgaattgttataaattatgtcatgcttatttcgttttgtgcaataaacctatatgatcatgatagagtttcttggactctttctttgttggaggcaagacatcggaggtttctggtacatccacctagcacgggagcaattcttaccgttctcaaggctgccgacgaagggtataattttgtttgagttgtttattatcttacattttaaaatgcatattagtttttattgcgacttggtacattattgatttgttagggttgcgtagatttacaattggtagatttctaatcgtaattgactctcctttcaagacaatgggtcctttccaacataatattccactcgtgggcgatgatgttgcttagacagtagattatattttcaaccccagactccccgatgagtatgtccaccgtatttatcatatttatgtggttttattttctttccatgctgtacatgttaactaataaattggcactgtgaatttttatgttaatttaaggcgataaaatacgagggtgtataagtatttattttcttttaagaggaaatgtagtaggaatcaaatcacaacttttcatgttttttcatgatactttcttttttaagttgtagaagtgattag

SEQ ID NO: 61254 - DNA, 749 bp, Cannabis sativa
atatatatatatctcctcatcattttgtgtggcaatccataaatatatacaattaaattatatttattaaaagagtgggctgaattaattcaatcacttgatcatcactattttccaattccagcacaccatacaagtacactacattacatatattattagatactgaataaataatattgaaattcaagatattggaaatatttatatgtggcgtgcactttatttttgagaaaaaattatttattaaactattatttttatttatttaattaaaaatatatttacttaattagtaaacaaatatattattttttcttgattttcaatattgtttttacgattatatgttctaacattcttataattaaaaatatattttttttctttattattttctgtacgtttcttatataatgtatcaaaatcaacagaaaaaatatgtattttttttacaaaaaatttatatataattatatacaattatattataatatatattccgaacaataatattttctttagtatatagtattttgatataatttttttatcgtgtaattaaactctaatataataatttaattaaattattttattctggaaacgataaaattaataatctatttgtacaattttaaataatattttaaatattttaaaaaaaataatataatgtgtgactcaacttaaattttaattaaataaattccttctttattatttttctactgtatatatatatatat

SEQ ID NO: 61255 - DNA, 1937 bp, Cannabis sativa
tatcagaatcaataatattattttatttccttaatattagaaatattctaataaagtgttccaaaaaaagagggttgtgtgtaaatatttaagagaattagtaaaatatgagtgggagcttgaagtgttcggcggtcaagtaattttctttttaaggttttttacatgtgttgtgatgttcaacattttggtccattaattcaggcattagccctttggatttggttattaatgtagtcaacacttttaaaaaaagtcatattggcctagctagaaagttttgttaattcaaaccataaattggattgagttttgaagtagtaataaaatcaattagtagttcaacaaaggtgacattaaaggttgttagaatccataaacactagtgatttgaagtgaacatattttatctcatattagtgttgattattgtagtttaattaatgtgccaaactcaggacctcaagagcacattaaaaaagttaccaatgatcaattttcaaagagttcaataaaattgaaaggctgcaataagtttccaaatgagatattacaagatcaatcaccatccaaggctcatcatgatctccatgaaaagggtattccaaaaaaccgatctttactctacaaggagacggtggcgacacaaacaatgtacgaaaataatcttcgatcgccctcgatttcagctggtaactctctctttagcactattccatgtttttttcaccattataatccaacattatcatcaataacattttgtaatttgttaggtaaaacaactcatcaccaaaagcaaaaaggtgcaactttaaatggtaatttttgagcaattaaatttattgaaaatttggtcactatatattattatgctctttacaagtatatgaagaagttaatttttatttgttatggcacagaaaagggcaagcttggctcaaggataaggaaggaaattcagtaattaggtattaattaaatgttttttttttaatgttaatattgtaaaaaatctaaggccaatatctttttttgaatttccttgtgtttgatgggcctcaaatctttacttgttgataaggtttgattttacaaactaaaatcatataatatgtaatgtataatgaaaattattaattgtacttgtctgaatctctgcaagaaattatgtcaatattattaaccagttctcccaaaagtaatggctaaaatttgacacaatatatagggtcagttttcttcttataataattattgtacatgttatatattcttatcttacaataataatcaagtagtctcatcactcttttcattatatatgattcttatcatgaataatctgatgcagtagtacatatagcacatgaagttttttttggactgatcgatttgaaactcagtctaaaattatctcaaaaataagtttaatatttgacaagaaaaaaagtgcccttaaaaaaagtagaaataaattgatcaacaataccaaaaatagataaattgaaactaccacttattttatgaaattattttcatttttttttttaaaagttacaattttaaaaaggctaattaagttttttacctgaattttgatatattaaagtttaataataatagtttttctggataaaaaaaacataatttttatttgctttagcttggaatttagaccttgtattattgaaaataataaaaataaggtaatttttgataattttttttaatataactaaaatgaagataatcattagcacgaagtataaaatataattagttttatcataacacttctaaattaaattattgtaaaatacacggttcaaaatgatatttaccattttaattttggcaaattacaaactttttgtaaatgtacaattaaataagtgttataaaaataggaggtgttttcgaaatgcttatggaaa

SEQ ID NO: 61256 - DNA, 1367 bp, Cannabis sativa
gaagtagctttagcatgaaagtacttactgttactatcaccttcttgaagccacaactgtttagagcgttgacgccagaacacttctctttgatttataacttcactaagattcattacagcctctcgaaacttctgaacggatatagcatcacgccccttcttccaatactggaattcccgcttgcaatggctaattcattgcttaaaattgcctgtatactcttgcccccacgcttgaagagattccccacaatacgagattttcttcataacatgctgacctgcacagagctcccaactatctttaacagcctggcgacagagcggttcacgaagccaggcattttcaaaccgaaattgacgaaatggcaccatcacagaacgcatcgtcggttcaagaagtagcgggcaatgatttgagacagagacttccaaattatgtaactgtgccatacgaaacctttgaaaccagttaggacaaacaagagctcgatcaaggcaaatttcaacccatgaatcagtgcccctcccacgctcccaagtatacggatactcgactatatcaacaagatcacagtcaaacaaaacttgattgaagccatctagcagcacctgtggatatctatttccacctcttttatctgcatgactagtcgtattgtttaagttgccaataatacaccaaggaagagaagattctgactttaacgatctcattaaatcccatgttttataccgaatagctctattaggttctccataaagacccgttaaacgcagggagaagaagcgactttcaaaatctgaatatctatgtgatgaaaagaatagccaagcaactgcatatcatcattattacgccaaagcatggccaccccaccactatgtcctctcgcatcaacagaatacaatccatcaaaccccaccgcaacccgtagcctttctaacttgtccttccgacaaagagtctcacacaaaacagaaaattaggcttcttttggataataagatccacaaggaattgataagcccatgggttcccaagcccacagcaattccagctaatgacactcataatgggcggtgggcctggatctcagcacccaccataggcccgttttgtgagcccaattcttgattaactcgagccacatgaacatccatactactattatccttctcaaccagatccttacacggcccaatagcatgttggtccacacctagttggcccgatggcactccttccctagtgcgcctttttttagaatccaacaacatgatatcagcattctgatcatcaataaccacgtcattagcatttatcccactatggtcaataccaacatgatatcccacattttc

SEQ ID NO: 61257 - DNA, 1136 bp, Cannabis sativa
ggtaaaatatttccaacagttttagccatggcgtcagctgaaccagctgcaagagcaaaaactgtgaaaaacccgattagcctttacaaaatttaagtcttaaaattttatggttagaaactctaaaatttctattcaaacctaaactaatattaattattgttatatactcatttatttatcacctttagagttttaatgtatggctataaaaatatccctatcatagagacaaaactcatgtacctattatatagacatatccaaaatacatatatatgtgaatagtaaatagtattatagtaaaatatttataagtttgaaagaaataaaatctgtgaattcaataaataatacacattatataatgtacattaatttaaaatacaagtattagaaataagttacttacaataattagtgtaacaaaaaagtaataaaataacaaaatacaaacagagaacgaatgaaaactaaaaagacgtaaacagaccagtactgttgtatgtagaaaaaaaaatacactacgtaaatacttataagaacatgcaaaataaacatcaatctagaatctggtattttacatgcctcatgataaatcttattatttgcaaatatctcaaaagttagtttcctaaatcactcagtatttttaactatttgtcgaaaatatatttcagatatagactcaattatgtgtgtgatttatgaagagcaatagaaagaggggacaaaatatgaagactatataatgacttgactacatgttgaaattagtaaaaaatgagattagatgtaccactccaataaaaatgcattaccatgcccggggtcaccaccaataaaaataataagtgacaattcattgttgttctactttaattgagtcttcactttgcttaacaaacacctgacaatgaacaaatattcagaaactagtttaacagataataaaccagccatcatatgaggatatctagtttcataaaaaagtactctaaacatacataaaaaacaaataacgaaattgatttctttaaaaaatcaatgcatataacactaaggctaattaggatttttaccccccgaattttgacatgtactaaatcatgcccctgaactttgaagaccgttaa

SEQ ID NO: 61258 - DNA, 1245 bp, Cannabis sativa
  modified_base (1202)..(1217): a, c, t, g, unknown or other
attttaaaaaactcttaagaggtcaaaggttcaatccctcataactacacattaaatattttttaaaaaaattaaaaagtagaggttgggaattgatccataacctcttactttaaggtaagaccttttaccactacaccaaaaaaattttgttatatttttttttttatttaacagtttatctatgcattaatttttttttttgtttttacaattttggggccctgagcgttcgagggctcgaggcgcacgcctagcccgcctaccctcagggccggccctgcgtttaagtatcgagtctcatataacataaaaaaaataatttttaaaaaatattgctatccaaataattataagtcgctacctatagaaagtgcaagcactagcaatacttttagagaaattataaactaatttttttatatgtgatggtgtatattataattatagtaggtattttacctgttttttaaaaatttcgaataatttatagtggcaaaaatataattaaaaaatgagtaatttgtacaataaatacttaaatttaaatttcagttggagttaaacacttgagtttaattttttacggcaataatacttaagttatatttctggaacttttgtaagtacctgatcgtattagttcaagttattaaatttttattctttgtttaaaaattatttataccaataaaaaaataacatgtgtacaatgacttgacacatgataagagatattcttatacagttttacatgtaacgatagaaattcaaagagttataaagtatcggttgtatagtattaaaaaatagaaaattcaatacatgtaattatagaatgcttaataggttgttggactgatttggagtctgggtttgtagttatttggcttctaggaattgctcgtggtttttgccctttgattaatgaattctcttttccaccattaaaaaataaaaaaaaaaattacgttattcttactttaaattttgagtccgccactaattatatttatatgaaaggatatggtacatgcgaatcacatttatgatctcattaacgtctttttcaaccattgaatcaagcagggcttccattggtctatgggccttgactcaacggcccaattgtatggacatttaattcagattcaccatccaactaatactatacctaaatttttgaggaaattacactctannnnnnnnnnnnnnnntcctcttttatttttaccctctttttta

SEQ ID NO: 61259 - DNA, 996 bp, Cannabis sativa
tggaatgatttgcgtagtattgctggtccggaaccatggatagtatttggtgatttcaacgatattctctttaaagaagaaagaattggggatagagctaagataggaaactccacggctttctttgattgtgtgaatgattgccaactgactgatataaagagtagtggttgcttctttacttggaacaacaaacaataatctaaagatagaatctattctaagattgatagagtcatggctaatcaatcttggatggatatgtttgagagggctgaagcagtgtttctcacagaaggggcatttgatcatactcctgcagtattgaacacttacaaggatttcccaagtggcaaaaaaccattcaaatattttcgcatgtggacttcttatccgagttatcatgtggaagtaaagaagatctgggataaaaaaataacaggcacaagtatgtactaggtaatatcaaaacttaaagctctgaaggttttctttagaaatctgaacaaggaacactactcggacatccatatagcagagaaaaaagcaaggctggaacttgaaaatgcacaaaccttgttacaccagaacccgatgaatgagcagctgcaataccaggaaaaataagtaagagatcgatttatcaagatacacaaagattactgttcgtttttacaacagaaatctaggctacattggctcaaagagggtgatgagaattcagccctttttcattcgagcatcagagaaagaagacaacacaataacattctctctatcgcggatgtgaatggattcggacatgaagagccagagaacattacaaaagctttcttagatttctataaagaattattgggatctaagatggtgaatagagtgcctgtgaatatcagtttagtcagaaaaggagcttgtgttactgaatatcatagccagatcctgactgctgcatacacaatggaggagctgaaagaagctatctttggcatacca

SEQ ID NO: 61260 - DNA, 10535 bp, Cannabis sativa
atagtttattttaaaaaaaaaaaaattattgaattttaaattatgtttctttatttttttagttatgagtttataaatataagtgagcttgattttttcttcaaaaaaatcttactttgtttaaattatttattgaattttcaataactttaatttgatttttcaagatataattatcaataaaataaagtttaaaatattttttaaggaataatttaggttttttaagtaaatttaatatttttatcaggttttataacaatttttattattttttttagaattaatagaacattataatttttaaaattaattttttttaataaaacatggtaaattttgtattggttaaagtttatgggagtaaaatgccaattttcaacgataaaagaaataaaacctaacagaaggaatataattatgcaattgttatattttagggagaattttaacaaagcgtatattttaggaagcaagatcaggtagtgtcaaaagttcaagagataaaaatagtaattattctttaattaattgctttctgtgcgttcttttatcaatcaaatgtggacacgaccaagagtagaaagaatttagcttttctttaaaaacttttacataatagactgaaaattttgaaaaagaaattataagaatacattaacatggagaaatttttatttttatggtttgaactttttatatttacaaaaatacggacttgagtaaattgttcgatattttttttttgttgttgttttataatttatttatatttgttatgaggttagttgtcttgttgttttttattatattataatttatttataattattatgagattgatatcttattattttttagttgctttcttatttgttgagaaaattatatttttataattttaaaacatgaaaatcgtaaataaaaataaaacataaaaaaactatattattttttaaaatcccatttccttatgtttataaatttaactttgtttttgtttacattaatattataaaatttgtttggacaaataatgagctcaaaataaaacttccacacgctttttttcaagaaaatttccatataaagttaaattactacaatgcattatcaaccacaaatcaaccatgtcaataaagtactaatcaccacctttcatacaaaatacaaaatggtttgagtaatatatacaatacattctctgtttatctaaaaacataacacttcaatatagatacatttgaccaaaaaattatatttacaataacaccctcgtaaaataaaagtttattttgtaaataaaattacttaataaaaaaactatttatctgactctctaaattgtactattaagaaaaccggttataaagagttagcttgtgattgtcctattagaggtgtcacaaacctcaaatggaggtgagggacttcataagtccccttatatttattatttttttcataaagtaaaaaaatgtaatcatttaataataatattattttcacaaatttaaaaagtgaccattagagatgctataatagcttgtgtaagtgtaaccatgtaattttagacattgattaaactatcaaccgtcacaaaaacgaccgcactaggatgtacaacccaccaaagaaatgctgtaaaaacagtagataaacaaagccaaaataagtatacaattcagcctatagaagccaaacgcactaatggttgagtaattgtaaagaaaagaaatatatcacattgtgaatgtatataacatatccaacctctcaaacaggattatccaactgttacagagccatcaaaccctgaacgtacataaaattaaatcaatacatgagaatacatctatagaatccaaaaatgagcagaggaaatagaggaaaaaaattctaagtaacaagaaaaattgaatagaggaattttatggctttcaagtatgccttgaatccatcctcgttaaacagataccataggggaaccagataccgaggaatatcatcgttttatatacacacccttttcttctcatctaaaaggttctactggaaaaatcatgagttggtgctgagaaatctcacccaccatgaataaagtgaaaacatgaatcgtcaatgaatatcagccacccatctaaaaatatttgtgtcctgaagaaccagatggtggtggaggaggtggcaatcggttaggagtgcgacggctggcagagtttggtccagaattaacatcaccattttgtgctggatcactgtaatgacgactgtgaccgttggatgaagatctagagtaatccccgtaggagttggagtcagccgggccattggcagcagcatcaaatgcagatctccagtcatcaccagatgggctgctgctagttcttgggctactttctgtataggacacaaagtcatcaagaggaaagtttagaaggaaagcatcttatcaccaatgacaaattttgaaggacaaacattaaatatcatataggattagtaaaactaaaaagtacatctagccacgtaccagctccaacactaccaccattggaccagctggaggcagcagatgcccggttgtcatgaatgctaagttgacgagttaacttggagagaagagaagattgtttctgataccgttccctccgacgttttacgttctggtcctcttgaagtagttcttcaatttttgctgtgctttgagcactaccaaaccaaaaaataataacattgagtgaagattacataatcacggcaggatcagaatctttataagcatatggagacagaaatacagcaaaagttcagaacatgaattaagaaaaacgattccaacctgacagaactatataactgattcagcatatcttcttttgccttctcaacttggcaaagaacaactgcctgctcaaccaatcaagaaaaattcacgtcagctgttctttttttagagaggaaaaattcaacttttgaactctgtcagtaaagaatccagaattgagaaaacctcaatttcaacatcagaatctaaccttaggtacattagcagccaaactgttcaaaactgcttcaacataaccacgtacttcttgagacatccaccgaagttcttcttctggatcagcaggtcttcgtgtcattgtatccttaaaaagagaataaaaccaagttaccctgtattcactaaattgagtattgagtagaaactaaagaatgcttatcaacctcctaaatattaaaacaaaaaatgttgagaataaaatacaaaagattttgacataattttcaacaactgacagccacaattaaacagtatctagagttgctctaacacaccaaggaaccatcagaaagactttgtcgcatggtagggccaccatcattggacaagcccctcccccctctcgaaggttggataacgtttctgattttatttatccattcaaccttgtcactcatactttcagccttcaaaatgacagcactgtgtgctgcaagataaaagaaaaccaataactggaaagcaaaaaacgcaagcaaagtctacagacaaacttttctaggattactgcccatgttcagatagaatatgatacctttcaacacagttttatatggaaccttgctagtaattttaaagacaagactgccttttccagaatctggtccattagccttcttatcctttgaactctttgaagggggttggtcttcctcttctgacgcttcttcaacattacactcctgaaaatataaataggtgttaggccccaaatacatttcacatattcaaagtacaaatgagacccatctatcagggaattagtactatttgcattttgaagtaaataatattggtcagagcgattgaacacttagactggttttccatgctagaagggtctgttgacttagtgtatatagagaagaggcaactggttatgatggtcgttatatgatattatcgaactaagctatgtaggtctcttaaatgcctagatactcttttctctattgtaattgcctagtaatcatccaaggaaatacacatcattctcttgcttgttatctgctctcaaattagatgatgaattgagtaggcacactttatgtatgacgatgaatatttcagactatacaaagctaatgagatgtaataagttacaattatattattcaggcatcgccagttataaaatgtgaaattttgttggtcaaaagttacttttctttgaagagtttcattaattagccccacaattaagcatcattgaaatctttaaggattgaggcaataattatccatacctccaaagtgattacaccacggaaatgtctttcttcctgcttcttagtgtaaccaagctgtaacagaaaacacaagtcaaagtaaatttacaagcaacaagacatttcaaaatcaatgatcaataagcttaatgtagagcatgaaataggtacaataatatgattcctttccaagacctcaaaacactcaaacatcaaatgaattgtgtgaaaatccattatttacagcacacatgaaggaagcaaacaatagctaaaaaaatctcaatataccattaaaatttatagtattttaagttgcacatagctaaagatgcacaacaatgtaagttgcaaccccaggtattggagaagtcatcattagttcccaatttgaacccagatatatatacatacataatataccatctactttttaaattaagattgccagaccttcccagtcttttcattcaaaacaaaccatcgcttgctccaaccattagtttttgcacttttctttaaaaggaaacctacacaaacaaaatatataattatacataattcatttagcaggctcacatatcatagtaaactcccgccaattataaacaaggtgtacaatatcaaattttatatcatattatatcttaagcagatagtatagttttttttttattttatctaactcacaaacctgctgtaatttctccttcaggaccagcagtcttcaaaccagaagcctctggtgcatctttctcagacttgtcagatttgtcctttaatgttttcaagcttcctccagcttgtggaccacctgtttgtggactagttgcctagaacataccaaaccaaggcaacatcattcaatatccacttccacgatattctttgcaccagttaaagatagacaacctaccctgtttagtattccttgctctgcatcttggcctttttttgaggatcgagtttttagctcctcttctcggcgttgcctctccattctaaagtcaaaaacgaaatgaataataagatagaatgcacattaacatccagaggagaactgatcacggaaaaaagatgaagtggtatttattaggtccacaaggaaattttctgtattaaaaaagaaatgactacaaatcttacatggttagaaataaacaagaacgtgaaattcttaaaagctacataacaaaaagctcatttcacgctgtagactactatatcacagagagtgatcatgctactggccaaataataatgtcaataatacctcctctgcactaaacgaatgaaatgctggggaggcacaaaagctctctccatatcaactagtgcaacaaccattttctttgcttcactcttgaaaacatctaaagcagaacttgcaatggccacaacctagccataaagagatgtttacaaaaatcagtgcaatgacaatgcagttacaattacgaaaacaatttactattgagtggaaactacacacaaataagccaaatacctctctcttgaaaggaggatatctaccaagaccaggtgtagcatttgcagctgcagacacaatatctaccaagacacggtgtaccttttaaattatcagcaggatcagaaaacattagttgtaacgaattaaataaaattgagaaaaaagaaaagaaacaaaatttaaatccaaaaaaaactaaaaagatacaaaagtccaatggttacctcgtcaacacaaagacgagatggctcttttgcaagctctaagacaccttttattagagatcttaaacccttttcaggggaaatgaggtatggctgataaccatcagcttccaaaacaagctgattaaaataaaatagagaattaaaaatagtaacaacaacaaaattagaagtcgtgattgcaagagataaatatataaaaaaaagtgtgattgaacagtccgaaaaacgatacgtactctcttcacgttgtttatatcaaaatgtcggtctaatggaagctgtttaattctattagggaaatttccttcaaaactggcaacaattttccagccagaaccctacaaaaatttgtaacatattcattaaaaacaaaaccagcaacaatattaattcttcaatttttagtttcaatgctctcaaagaaacaaacaataaagttgaaggaaacagaacacaaaccacttgatagaatatatttaagaactttgacagtgagcgaaaacattcaacaatactcacctcaccacttgtaatatgttgaagaaacttatcctcgaattcacgacaaagctccaaagctattgctctggtaccctctgcactttgcaccaattgctcaccaagcctaactaactcatcttgaacaacttgagacttgccttgtaacctgaaaaatggaaaggaatgccaacaatgtgaacctaacaatcacgtcaaaacaatctcatttcttgaggtaggagatgaaatgattcataagatcatatgaaaaagaaaagatttgatgaaaactaagttcaaatattgctaaaaagtaaaaatagtaacacttttaaaatgtatgtataaaaaatagtataacttgagagtacccagataggaggttaggaacccgaactttcatacggttacgaatttgttgggctagagcatcaaccaatgctattctgcccagcttactaggaggagctccagtcaggatagacttaagactttcactctcagccctccatgctgtttctaaagaattctcagagccaactgaaccagattgtgatgaagctattgaaactgactggccgatcaatgcaacccagggcatgtcagatgcctttgatgggccctgattaagcagaagagcctgaactgcagcaagagctttctggtctgaagcagcttgatctattttactaattacaccaacaatcctcgtacctataatcaccattagcaatccatattagcccctaaatcttttaaaacacagaataaagatgaaagaaatgtttaagcgccgaaggaaagtaatgactgcgataaaaatatataaacgcctcagatggggaaaaaaaaaggaaatgataatgcatttaaatgacattttagaacactcacaaaaggccaaaatagaatatgtaaagccacactatttatgtaaaagaaagtgggtggtatagaatagtatagtagcaattttaccatctccgtcatactccttagcaagtctgagagctcgagacgaagcaacttctggagcttgagcagcaggaattataactagcaatattgcatcattgtgctcaccatattcactaacctatgtaaggacaatttagagatttacaaagtaattttttattttaccaaaattcatgacaagatgtataaataaagctaatgcttacctacatattaaaaaataatagtaattgctcccagaaaacacattaaatatagccccaaaaaaagttattacataaccctcaactacaatccttctctagttagtaccttaccacattacataacccaaaaatcttaccaaagattcatccatgctccgctggtccaacccaggtaaatcaatcaatttaaggggtggtgctgaaaatttcataaaaggagcagttagaatctgaaacttaatatcaagtatagaagtaaaaccaaaaattcaaaatggactataaatcaccatgtacatatcgtgcaccctaatgtgcacaaaaatacacacaaatatccacatttagattataatccaaactctgcaggacaagtaaatgtacattatacagtatcattcccttgattttgtcagtgctgaacttcattcccttgttaaccataaccaaattttcttaaattttgttagtcaatagttgttgacactagcgtatatttccaagcatattttcttcaaaaacaccaagctaatgttaatccaactattagtgattcccaagataatatcttaacatattcaattaggaagtcccatcaaacaattattaaaatcaagtttaaagaatttctccttaaaaaagcgttattttacaaaaataactgacaactaaaaatcaaatcttggacatgttacaacaaaatattagtccagaacaaacctgtacttgtccgtagctttagacctatttcatcacggctcttgcctgaagaacccttactcagcctatcttgaagagaatgacgtaaagcacctgcttaccattacaagaacacagcacatcacaaaagaggaaaagaccaagaacagggcaatcagaatgcaatttaccttacagatgaacatatcaaaacacaaaacaacctaaaggtatccatgacatcaaggataccaatcatatactgctggccgtatcatatgttatgttttgatactggcattaacagatattgcctagtaacaaaatagaggcccagacattcttaaaaatagagaaactccagttatagctagagatgtcaaaattagtttgaaatgttgaaaatagatgtaatgaacacaaaaaatctgcagagaagaaataaaaaagacatgcaattactgagtactgactcgcagaaacttgctgagatttgctgtcaatctgcaatataattgatttgctgctcaaagcaccatccctttgtaaatcaatgcttatgggagctcgagtagcaccattttcaccagttggctgaacagcacaaggagaaaaagtcatatcaaactagaagttttatgaggttctactcgaaagagtatacgcccacaaattatattccaagaaaaccttcatgaatcaaacttaccaaaacaggatgtccaattaaactgttcaaaactgctgatttaccggcaccctaaaaacattgagcaccaaaaatcatgtaaaaaatttaatcaacaacagagactaatcaagttatgaaatctgatcatattttagggactaaaaccctgaaatatggtcgccctcatgagtaaaggttcaacttaattcgtaacaaaggtcagtactacagtttacatttataaaattattcacgttgcagcatctaacttatcttataatacggaagtacgtggtcatagtacaataaaaggaaaaagatggaatcggatagacatattcatgcacacacttacatatatagcatatataagcatcctagatcgacataaatactagtgatgaaattatataatcatagactcgcattagttaggataaccacgattataccccctctgcagtcatttttcctaaccaaaaaggctgcaattaaaaacccacctcaagtccaaatcatttatcaatcttagaaatgacgaaatctgtacatcattcgactcgagattcagaaaatacacagattcaaagatctccatcacttgaagaaagaaagccaaatatatcgaatcctattaaaatcaccctaagtcttccgtactgacaaaacctagttacccaactcacaattcaatagaacaaaccggatcaaatccatatcgaacacaaactaaatgagtaaaaataaaatcaaagggtacgggttcacttacaacattgccaagagcgacaacattgagaaaagtggaatctcgtcgcgaggaaccgctggaggtggaattctcatccacatcttcgtcggcgagcagagccgcagcttggcgcatcgattcagagagctgcgccaattcctcgatcgcctccatgggtgatgaaaaaaatcgagatcaaagatctaaaaagagaaatcgaatccggttggtagaaatatggatcggatcgaaaccctagagatttgtggggaaatgaatgagatctgtgtgagtagcaagatttgagagagatttaaaaagagaaggaaggttttgtaataatgcgaagaagaggaaaatgctggagaagaaccctgctttcccactttctatctctaagaaactctctcccccactttctctctctatcgcgttttgaatatttttgccaaacactctcatttactttgaattttttggttttaatttatttaaagaacttggcaatataacgcttatttgattttttttattataaaaaataataattacttcaaaatctgtatataaatctaaaggaatgttcaaacaataactatgtgtcagccatacaaagtttatttgctaatcttcattttcttaagcttctctacttagttaattttttttcttaattacttatcaactaggcaat

SEQ ID NO: 61261 - DNA, 1520 bp, Cannabis sativa
tatcaatgtactctaacagacataaataacatgtaaacacatatgcataacattatactaatcttaccttgattccgaatttaggtgtgcccgcaacctgagttaaatagctgcttgactaattataggcccttaaatcacattattcatatcacgggtgagtgacacgctaaatcactatcttgggacataggtttaaaaccaaaagttttcctaagaaatgttaacatgaaactaccctaaataatcaaggaattatccaaccaaagctttgaaatttacaggaatcgacaacacaaaaattttgggaacccaactgcttatccggttaaccagttttatagtgcctgtaaaatcggttaaccggtttacactaggtaacccaaaaattcaaaaccttaatcaattcaaatcaaaaccatacaaaaccttccagacttgcttaatctacccacaaaaacataatccaagcaatagaacaacctaacattctcaaaatcaaaataaaccattaaagagacaagcttgagttttaaaactcagagcttgctcaaacatcccaacagcccttaattctacctcaaaacaacatgaataatgtactaccttggatttatgaaatggattagcaaaaccctaactagataattatgaataattgaggaattatactgttatataatttaatatatgagaataaatatgatttatgacatgttaagaccccattagtgagccaggggcattttagtaattatggcctaggaagggtaaaataataaaattaatttattaacgtgcttataggactatattattatatagtattcttgtgttgtctcttttaggtgtgttctaacaggtcggtccggtatagtcacaacctggtatttcgggctgaaccgggttcgagccccaaaatgcaattgggattgaattgttggcattttaattgataatgtataatctgaaaatatattgtgtttaaatgggtgtgaaaggacatttttgcctttggtttatggttaggctttatttggcctaggggcaatttggtcttttgacctttatgtgataaatgataaatgaagtgaatattttaaaaaagaacaagaattttctggtttgcctcagccccaaccgaccctctcaccctctcaaaggcttttcttgttcaactttgatttttgaagagaaattgcttggaattgaccttgaattgaagctttgagtttgttcttggattgagtttgaggtaactttccatggttttaatctaagttttattactgaaattaattgttgaagagcatgaataggtgttgtggttgtggttaggggtgttcaataaaatttacaaaccgcccaacccgaataaactgccaaaaccaaacaaaataaaccgataaaaagtacaatctgaaataattcaatgaaaatccaaactgcccaatgaatatattgggtggtttacaaattattctaaaccgcccaattaacctgaataaaccgaattaaac

SEQ ID NO: 61262 - DNA, 1060 bp, Cannabis sativa
tttttttttttttttttctgtagggtgtaatagattataggttttttcctttttttttttgctgaaggtgttataggttatagttagttacgtgtttttcatttcttttaactatttgattaattatattataaataatcatctaatccaatcgtctagtttgactttagaaaggtgtttgtttattattagaatttacaatatttttttttatttttgataactagaatttataatatcttgtttgtttggtgatattgacttgtattgttgtcatcatccataatattatattcttttaatgaaaagtcattaggtattattacatgcatttctatttttctctaaactcatttaattaactgttgataaaatgaagctgttgacttatagtaaaaattgatcttcaatctataatttagaagtaatattaattatctagagaccacaaaataataaagttctaccttccaacctacgcattgtgtataataacaataaagttttatttgcaaatcctagtattattgattttatttatttattttttttttatggaatagtattattgaatttaatttggtacctccatagaggatttggttcgatgtcttcatcagtaacacctgtaacggtgtaaggacatcatcgaatctaccgacacagtaaagctagtggcacaagtgcatacttttaaactcccttcatactacgattaacgcttgatttttttttttttttttttgaaagaacaaaaattcaataaaactaacaacaaaacatatgaatcacaggggagatttctttcctttgaaacaaacctgcttctagactagagattctagctcttttagcaaggctatcccaacaaaattaaaattacgatacaaaaatgaaaacttacaaatattaaactattttaactaaatttaaaattgataaagacacatccaagaagttcaagtctggggacttctattttgagccagactactgatcacaacttgagaatcgaagaagatgtgaatttccttcaaagaagattgggtcgcccaagata

SEQ ID NO: 61263 - DNA, 620 bp, Cannabis sativa
aattatctatatctatatataaaagggagaagtataaagcggtcatgtggcactctaaaatctctttaataggtgttatttcttctatccttaattctcttatttttttaatatttttttattcaatttataaatattaattaactaattaatttataaaaaaaattatatattcaaaaattttaaatttcatatacgatccaaataattaattttaaaaaaatcatatagattcaaaaattttaaaattttatatataattcatcattgtaaattttcaaaaaaaaaatcctcaaaccgcttgaaatttcaattattttttttattatatatttttattttaataattcttatgtttaataatcacactacccttaaatatatatacatataatcatctctctcccccaatctctttctagcgttagcttcttagcagtttttccttcatgtttttctatttttttaatttttaatttttattataatatttgaagatatattttgacttttttctttttgaaataaaaattttatgatgattttctttctaaattttttagagttctcaatagatttattatttttctaaaattttattcttgatataacttctaaaa

SEQ ID NO: 61264 - DNA, 647 bp, Cannabis sativa
tagttagtttcaagtgtcaaaacctattggactatcctatataaagtccttatttttccacttgaaactaagacacaattcaattcattgtataagtattagaaaccattaataaagagctatattcctattattgattcataatcattgtgactagtttggttgtatggcattcgagttgtagaatcaacatattataaccattgaatattgaatgagagagattagcttcaacctttagatatcaagattcttggtgtgtttgtcgattcgagccgattgagccattagtagagcttcaatttctgtaacagtgtacacatcctttcttgtagtaacagaggtgacaaacacatcgtactcagctaataatccattgaagatagcttcaatgtgatcttgaggcgtttgtttgtgatcaatagtagcaagaagatcaactatccctttaatcttgagaagaaaatcatttagtgagcttgtcattttggtgttgagaagttgagtcttatacaaccctatattagcagcattaagagctgtataatactcattaagagcatgccagatttgagcagtggtgtcacaacctatcattcgatttgtagtcttttcaaacatagataagagtaaccaagaaattagaa

SEQ ID NO: 61265 - DNA, 779 bp, Cannabis sativa
aaacaatgtacattataaaaatgaatagaaactatatttataccttaaaggaggttgagattcaatgttttctcaacaaataatggtggtcggagttctagccactatttttgtatgggttcggatgacacttaaatagggaaaaaaaatcaaaactttttaggtgtatgagattaagtaacaaaaatagaagattttgtaacaaaaatgggctcaaatggttgagaaatgggctggcggaggggtggttggcgagggttttctcttctctggtggtggctgtgctatctctggtttagctaggttctcgtgaggagaatgaagaagatgacatagggttagtatatataaccctaagctgtcggttcttatagaataaccgacgacatagggtacatgtgtcaagtttcacgtgtaccctatggcgtcggttattctatacaaaccgacggcatagggttacataaacaaacgccccgtcgtttcattccacaccgactctaaatggtataatccaattttatacctacggtctttataaaaaaaaccgcctctaaaggtaaattatcataggcaggtatttttagaccctttagcttccctttttataaaatggattaaaaaaagggaagctaaagaaccattttctagtagtgtccttttggcaacacacgtccagtacgtacggtggtcctattgtccagctgcttcaacacacgagcacaaatccttccaaggggcccaacagtcagatctttttgcatgtattttttcccatt

SEQ ID NO: 61266 - DNA, 692 bp, Cannabis sativa
tttctccttacggatcacaggactactgactgtcacatttctctaagatttattctggaattttgctaatcttagacattttcaaggtttgaagtctctcaaatcgttttccatgatataagccattatagtaatcaagcttagagggtacatattttttggatagctatggcaaatctttcatagaattaaatgggttatttttaacctattctttatgttatttatgttaatttttgttcgatttttaaatcattcttttgtattaatcttgttatttataataatatatgttcttattctattattgttattttaatctatttattaatttaagtgacgcgaatgatactttaaatttgctaccagttcaatagttcgaaaaattttactgtcaaaatttaagcttgaaaagttaaatgcaagtaaaacgacaattaacaggattgtagctatcaaaaactttattattacatataggaaattaattatattattcacatgtaaattatggttcgtgatgatgatgataatcatgatctttttaataattatctcttttttttgcatcatgttttcgtgtggtgtcaaaaagcgcacttgaatgtacaaatgctatatacatgctataaacatatattcactttaattttttcgaaagacaatatccttattctttttttggaaaataa

SEQ ID NO: 61267 - DNA, 673 bp, Cannabis sativa
tgttatacccaaaatttggctaccatttcaatggaagacacgtgtcaaattgggaaaaatattaatcaatgcgtgtaatggtaatcatatttaatggagtaactcattaaatgcgaaagtaacagagtatatgtataaattgcttactatatggtcttatgcgagataaagatatacaaattgttgcctcatgtattgacaagaaaccatacgacattggatgcggaaggtgagacgtcaacctcgttacgcatgagtagatgtaagcaagatataatgacagtaaaaacacttagtgtataatatacaatattcaaactgagtataacagtcgaatgaacccaagcaaccaatagcgaggtgtctatcttgctataggaaggcacactcttggtactttcactaatcaacgccaagcatctttcaatgagattcacagctctgtcgagtcagttctctcaaatagaagctgacattcaaatgatgtagactattgaagttcaccctgtccccgaagaactgtgattttcagatgaagcgttatgtcttcagtgcaggagcgacggaatttatattgtcaacctcgaaaagatatgggaaaagctccagctcgctatcaaggtcattggaactgggttcttatcgagacatcccagaacgttatgatttataa

SEQ ID NO: 61268 - DNA, 952 bp, Cannabis sativa
gtccaataatcaaattgagtccctacctttcccaagttgttaaactttgttcaaaaagacgatcctaagctctcaagtctcaagctccaattgtttagttcaatcttagacatcactcccatatataccatcaaatgaataaataattatcatcattgcattctacattcaaaaccgagtccaacgacatataacatgactatattatttagagttccgaaacctcacctaaatgatgtacattgactattggtggcggtagaaattggtgtactgaaaatttcaccaaaaataggggtagtataaatcaaaacaactacctcgacgagtagatcatactcatgccaactatttttcaaaatggtacacgatatcgctagaaagtcatcagaaaggagcagagctgcaaaaacatcaccgaaaaaagtagcgggctgggtataatggcttagtgtagattgttctcctcaacgaattgagtctagtggtgaagacgactcgtcaaacagacatcagaggtggtcagaaaatctgttcaaagtttgaacctccaaactttgacttgcgatctcgagctaacgttggcgaaaggggcagtgctacttgtgattaagatcatcggcgcctggggtcggatggtggcaggagagtggtcttcggagttacgccaacgattggatttatggggttttttttttttgtggtctggagagagagagagagaggaaatgagagtccgtttcttacttattattatattatatatatatatatatatattttgtttcttttaacttggtccaaactaagtctttacagtactatgaaccaagtttaggggttttaaaagtaaactaatgtgaacaattttttttttttttttaaatatcttggttatataaaactatggactaattttgggaattaaaaattgagaaagaaaaatgtttga

SEQ ID NO: 61269 - DNA, 808 bp, Cannabis sativa
gtattctctatcccagtacatgtaatctctttttttttattattaataatgatcttatatatatctaagtgcaatttaaaattttagagattaatttgttaattactaaaaaatcaatcataaaagctctccaactgaccagtattgtatatggtacaataacatagataagtatatattatccaagagacaaatcttcataacaaaagaagtattgagctaagagaaataagtgtgttgtttcccaaaaaaaaaagctataatactcaaaaaaatgacaaacaagattaaaagattacattatttatctaattcatgaaaatagatagaaggtatactgatgaatatttaattaccatcacaatatttggacgtgttaactaatataaaatttatttttctaaaatccttatgactaataagatgtgatactatgtttgagttcactaaagactattacaaaaccatgtttcatttatggtaaatatagatgttgctttaaaagaaaataataaatcttgatattgggccttgatacatagttagactacggtccaaataggccaagcaattgattagcctatacacatttatatttaactacaacctatatattaaatttaatttttgtgttagtttcataaataactacaccaatcacaccacctacaagtttacaaatatgaggacctcacaatggcaaaattaaacaactaaaagtaagtacttataaaaagctattggtctcactctcattcaacttctttctatagtgtcatttggtagagttttggtggatgaatcaatc

SEQ ID NO: 61270 - DNA, 1155 bp, Cannabis sativa
ttgtcagcaaattaagattgaacaccaaagacctgtagggttgttgcagcatttaactcttcctaagtggaaatgggtggatgtcaccatagattttgtgattggattacctagaaccacgaatatgtttgattctatatggataagtatggatctgtttaccaagtcagcacactttttgccagtgaaaacaacgtatacagtagatcagcatgcagaattttatgtaaaagaaatagtaagattacatggggctccaaagtccatagtaccggatagggatctgaagttcacttcaaagttttgtgaaagtcttcagcgagtcatggggacaaagttgaagttcagtacaactttccatccttagacagatggtcagtccaaaagaacgattcagatactaaaatatatgttacgagactatgtgatgggttttgaaggctcatgagtaagtatttgccattgatagagctttcatacaataatatctatcaaagtacaataagaatggctccttatgagatgttgtatggcaaaaaatgtagatttctaattcactgggataaaaatggggaaagaaaatacctaggctcaaaatcaattcagcagaccaatgaagcaatagagaagatgaaggccaaaatgctttcctctcatagtaggcaaaaaaattatgcagatccaaaacgtaaaaatatagagttttaggtaggagatcatgtattcatacgggtatctccaatgaaagggtttaaatgcttcgagaaaaagggcaagttatgccctagatttgcaagaccttttaaaattctcgagaaggttggattggtagcttaccgtttagccttgcctccagctttattagcagtgcataatgtatttcaagtttctatgttaaagaaatacctttcggatccaacacatgttccgagctataaaaccctagagctccaactagatttatctcacaaggagcaaccagcacatatccttgacaaaaaggataaagtccttcagaataagaccatagtactggtcaaggtactctagagaaacaataaggtggaggaagccacctagggattggagtccgatatgaaggcttagtatccagagttattcgggtttgattttaaagacaaaatccttttaacg

SEQ ID NO: 61271 - DNA, 1195 bp, Cannabis sativa
atatccgtatgaatggaaggcagatgaatgaagtgtgaacctaaaaaagaccatctttcaagagcgatcaatacaatttttattattcaaaggataaaaaacaattaaagactattataggggatcctcaaattttgaagaaagtacatatctcaagttttaaaaacaaaaatataaaaaatgggtattgctatctattaaaaataaatattatcacctcgtcccccacttgatagcataagacaacatataaatatgtcaaatgagataaattagatcccttttaacttcatgaatgggactgggacgaatagtgcattaaaaatgagtactgactcactgaaatgtctaaatgacagaatatatttcacatcattttttgttcaagcaataatataaatctctttcctcagtaacatttttaaattttggtgtagattaaatataacgaatgctggagaatttctcaatgcctgaaaattcaagttgtattgtgttgctttcagtcaaaagcaaccgaagattttccttattatcaattataaatttaaataaatcttaatatatagttgaattcttccatgactgtctctatgcatgagtgatttacttcataaaagttaaaaatgtttcatgcacactccaatttataaaggtcttttcaatcttacttgaaaaagaaaaataggatatataatatagtatatagacaagtcttacctctgtttccaccagctctaccaccaaatccacccctgccacagcctccaccagggcctttaacacctccatcatctagtccatagcaagtccctttaggttgccttcctcgtccctatctcttcctctgccacgtcctactccaggtggtttcctatctaaaaacatagaagatgataactttgtgtcaagtaaaaaataatctacagggtccaagagcttgaaagttgtatatatttaggcgaatataggataaagtgttgtagaactacttattacaatcacataatcatgtacctgatggctgatcgactcttagtttcttcttgaactttgtcaatcgcctgaaaagcaacgacaattagagttccattaatcaaatcaacaaaaatttctttttaaaaacataaaggctacaagaggagaataaataaagtggggaaaagatatcaaaaagcatgcctccttcaaagtt

SEQ ID NO: 61272 - DNA, 894 bp, Cannabis sativa
aaacctacaaactatgtttttgacaacaaagtcgcgaactttcttgcaggttatgcaaactagaggttcagcctctgtccatttagtaaagaaatcgacagccacaactgcgtactttgctcctcctcaccctgtgggcagtgccccaatcagatcaatccccgatattgcaaatgtgtatggtgaggtcatcattcttagttctgttggtggtacacgaggtatatgtgaaaacctttgacctttatcgcaccttttgacaaattcgtgtgtgtctttatttattgttggccaatagtagccttgtcgaattatctcctttaacaagctttgccaatctgcatggtctccacaaaagccttcatggatttccttgataatctcgcttgcttctgtggggaggacacaccgtaggagaggcattgaatagcctattctgtacaattttccttctactatcgtgtagagaggcaccgtatataagagttttcgtgcctcgtttttgtcagctggaagtttcccgttaagaagataattgactatgggtttcatccaggtaggcgagctgactatcatctcaacttcttccctttcacatatacttgactcatttaacatttccaccggtaccaagttaaattcatcaaattcgttctgtgaggccagttttgctaaggagtcgacattagagtttttttctcctggaatttgttcgattttaaaataatcaaacttttccaagttcttctgaaccttttctaaatacttttccatttttaaacccttagcctggtatttccctaggacttgattgacaattaattgcgaatcactatggcatataagatttttgacctttaacacctcggctatccttaagccagcgatcaaggc

SEQ ID NO: 61273 - DNA, 696 bp, Cannabis sativa
agtgctcatataattttgcattgtgttgtgcttgctgtttaagattactttctatatctttatggctcattttattgacatatacatattagcttattgagttttacataatcaacatgtcagtggtactaaagtttctttcattttttttttttttgctaataacttgctcaaataaagattattattttcactccacttacaacactatcatgatagactttcttttgcactattttacaggaagaagcaaaatcagtcggtccactacagaacaaagttaattctcttcaaaaaaagtatacctatatattatcatatacttatagcagacaggttatcactttatagaggtaaataagagctatgaagacagattagtgaagcaaaaaaatatatatatatataaatatataattcaaaatagtaattttttgctaaaatttactgttacttgacttttaaaagaagtcttcttaggtgcagattggtgcagagaacaactattggtatctttgactctcattaattacctctataaatcttattgttcattttctcatactgtcactttcctttgaagattgtctatacaattgcttgggctagttttccaatcttgtttatgtgcaattttggagaagcttaattaatttcaataaatgagatgatcctgttttatttattttgtcatgg

SEQ ID NO: 61274 - DNA, 619 bp, Cannabis sativa
  modified_base (576)..(593): a, c, t, g, unknown or other
actaagtcctaattatttgctaatttcaaattaaagttaagcggtctttagattttgattgttatcagccattgaatatggatagatttttgtttttaaggagggatttttctgagttatatcagtagggctctcaatgaaagtaccaaactgttaatgcagatttttcgttaaccaaaattaaatagccttttagaaataaatattcaagagaaattaataaataataaaagattctctgattttggttaaaatctacatactctacgagcccttcttattagggatatttatttgtgtactgaatacactctctgattttgaataataaagagtctctctcaattttttgtcatcccctttttccatggattctgtccttatttataggagtataggttgacaattattcttttgggatagatttaaatataattgttcaaacgtggataatccccacgtttcatttaaattacatgtgagataatactaaataactatctaactgttatttacttttatcctttagatggttattgctgacgtagaaggttatatctgttggaaatattttannnnnnnnnnnnnnnnnnaccaagtatgtttgattaacatccta

SEQ ID NO: 61275 - DNA, 752 bp, Cannabis sativa
ggctagatgtagtgttaggtgcaggaccaccacgttgaggagggggaccaccacgtgccatagaatactgatattgatgtccttggttgctgaaattaggaaaatttttattaaagccaaagttgtagccgttgaacccaggtggaaccgtaggagcaggaaagttagaatgcccataagtgccaaagccattgtttcgagcttgagagagattggcttcagctttagaaatgtcaagattcttggcattcttctcaattcgaaccgattgagccatcaataatgcttcaatttctgccacactatagagatcttttcttgttgtaactgatgtaacgaatacatcatactcacctggtaatccattgaatatagcttcgatgtgatcttgagtagtttgtcgatgaccgatcgtagcaaggcgatccaccaaacctttgatcttgagcagataatcgttcagcgaccctgtcatcttcgtgtttctcagttgagtcttgtaaagacttatgtttgcagcatttaaggtcgtgtaatactctgtaagttgttcccagatttgtgccgtggtatcacatccaatcatcctattggtggttttctcggacatcgaagaaagaagccaagagacgagaaggttgtcttgctgttcccagtcctcatattctggatttactttattgattctttgatctgctggtgtcaggaactgtggaggagcatgatcagcttcaagaaatttctgtagtttg

SEQ ID NO: 61276 - DNA, 1732 bp, Cannabis sativa
  modified_base (1425)..(1445): a, c, t, g, unknown or other
tcacgtccaaatcaatcactctaataaaacaaaaaaaattaaattttgatgtggggagacacaactactcattatttcctatccctgatctcttttattattattattattataaaatgttttagaaaaataattaacacgatagagaaaaaaaaaacagtacaaatgtaataataaccgtgtcacagtagaaaagtaataaaatgggaaaagttagcaatgtatgtaaatttccctatttttttttagaataaaaactgttatgtattagatgatccaataaaatacaatagttcaaagaagaggtgttaccctcaactaaacacaatctgtgtctaccgaaagaacatacttagcaagcttatgtgcataagtattagcatatttaagaatatgagagatctgcactactcctggaaaatgtcacaagattacaaatatatttattggaatatttttcaacttatcccatcaggtttctctcatccaaacattgctaaggaaaaaaaaaaatctaggaaatttactaactaaaagtgtactttgcttttagtaaaaattacactaaatatgaatttttataatttttttataaaatatgttacttttaagtttagttattatacattttgtagcatattttgagttttaggtttttttatggtatttataatgccaaatttgtaagcttgattttaaaagctatgactacttataaataaatcatttagaaaatagtaatttacaaaaataaaacaactcaaaaataatcataaaacaacttaataattaacatggaaacaactataaaacaacaaaaatatagctacaaagtaacagaaaaataatataatattgacctaattacaataagcaaaataatatcaactcttcaatatgtttttgtattacgaattttttgtaattagttttgtcaacttgatttatctttttgtactattatattattttttttccatggaatttattgctacaattttattctttctacctttttttttttctcttttcatttttgagttagtgatagttaaaaaacaactataaactgaaaaacaactaaaaaaatagcataaaaataacaaaataaatgcacatatatcttattaatttctcataactccaccatagattcaaaattgcactcctaattatatagaatgctctatatattccaaatatagatacactattcattatcaattattttaatccaaataattaatgaccatctattgatgatctacatcgagtagggataattttaccgatctacccttcagtgttttttatccttaaaatacttaagctccttgtaaataatgatatttctataaactaacataattactgaaatgagtactccaccatttaatctcgtttagccaagctcgaagaaaatcnnnnnnnnnnnnnnnnnnnnntatagaagctatagattttatattcatgattagtaatttcactcaatcgtactatcatgttctcaagatgtaagtatttggaagatccatttggtcaactttaacgaacaagtcaaagaacttaaataatacacttgaaccagaacttaaccatctcaggattaggatcattgctctaagatcaactaagtgatatctacttagagaagacattacatgaaatatctcaataagtctaatggtaaataattagagtttatatttacattatgagttaatcaggtaat

SEQ ID NO: 61277 - DNA, 1436 bp, Cannabis sativa
aaatttgatcatactcaatttcattacgtataccacaaattcactcttgaatattagaatgtctaacaacatttttgttaattcatgtgtaagtgtaacatcctgagtgcataacattttatgttatttaaaaacaacgaataaagctgcctttttgcctttgattaagttaattaatacgtaaaaggcactatacgcatatacattgaaattaatacctgggctctactactactagagataaagaagcaaacacgagagagtctggagatatacagtttaaggaggaatgatgttttgaatgttttacttaataatgaagccataacgtacgatgatttagcttcctaatgatgaacctttcttgcagtactggcacaccgttagcctctcatttgtggttttatagttataaatatggaaatattgtacttaacgagttacgtgttagaaacgagagagaccagcgaacgaagaagaatttattaggtgactcacacacatcatgcatgtcctttggggacacgtaggcgccacaacatttttttttctcttctaaacgaatgtagattagaaaattaaagaaatacaaagcgcaaaaagaaattgcagcatttatcacaacaacgcctaatgcacatttggtctgtaagagcttcaaaatttaatttttcattactacatattaaatatttttttaattaaaaaaatagaaaaatagaaattgaaaattaatctattgatctcttaaaagtaatatcctttattactacattaaataatttttattatatattttatctatatatatagaaaatgatacactttataaaaaaactctgcatatatatatttacaaagtagtttataaaaaacacaaatgtattcttaaactaaagtatatatgcacataatcatttagcatgatgacatcttaaactataaagtaacaacccattgttttatctttaactatttgtacaacataatctataaataaacctactaatttattagtgtatacatatcataataaatcttataaaatataaaatgcgcccattcttaaaatagtatatatatctacataataatgtagtatattaatattttattattttataaactactttgtaaatatatatgcatatatttcatttaatcaacttattggtttattgatgcatatcgacaaataatacattaatgcatgagagtatacatgtagggttgtacaaaaaaaattgtaaaccgcccaagtcaaattacctgcccaaactgaaccgaaaaactcgataaaaattacaaaccgaaataacccgaaaaaattacaacccgcccaatctgttaattgagcgtgttgaaaataggtccaacccacccaattaaacggaataacccgactaacccgatttcggcttttttttttttttttt

SEQ ID NO: 61278 - DNA, 1052 bp, Cannabis sativa
caaaatgtttccccttttgagattctcaagtccaaaccacccaattatgatcatttaaaagcctttggatgtttagcctattcctctacatcacttaattttggaacaaaatttttgccaagagttgcaccatctattttcataggctatcctactgctatgaaagcttacaagcttttagatttgaattctaacaagatgttttgttcaaaagatgtttactttcatgaaactgtttttcccttttacataaatgattctctttctgctgaatatcaggatttattttccaaaactgttgctaaacctactgattctgatgttcaacatgaaagtgtttctaattctgatgctcatcttataaccggcctgttagaactacttataagccttcatatttgcaagattatcactattttcttgctaaaactaactcctctgttgtgtctcaaaatccttcattagttacctcttactctatttctcaagtgcttgattatagcaggttggcaccacacttttgagaaaatattttccattttcagccactttgaacctgagttttttagtcaagcttgaagcattaaagattaggatgattccatagacattgagattgatgctcttgagaaaaatcatacatggatagttgttactctccctgcagagcatcatgaaataggttgtagatgggtctataagactaagtacaatgatgatggttcagtggagagatttaaagccagacttgtggataagcgttacaatcaacaacatggcatagattacactgacacctttgctcttgtgacaaaattggtaacagttaatcttgttttagctcttggagcattccatggttggtatcttcaccaactcgatatgaataatgatcttttgcatggagatttacaagaagaactttatgtgacccttcctctggggtatactccaagggtgaacttctctcaaatgcagtgtgtaagcttcaaacatctttatatggtttgaagcaagcattaaggcactggttccaaaaaatttccaatgcc

SEQ ID NO: 61279 - DNA, 510 bp, Cannabis sativa
  modified_base (231)..(246): a, c, t, g, unknown or other
caaaacggaaccagggtttaggtagttatgcccctaaaattttagtttttgtgcttattaattgttacaaaccataaagttcaggtagtttagccgccaatatcccttccattttactctttatacttctgtcataaaatcttagttaaatgctacgtggactgcccacgtacacgtatgtacatatgtcaaatttttattgggccacttaatattaattttaaaaaatannnnnnnnnnnnnnnnaaattaaaaaatcagaaaaaaataatttaattttttttgtaccttttttttttcttattctttcttctttctttcttaaattttttgaaacctaatctctcagccctccctccctcccaggccctatctttctctctcttgtcttgccacccaggacctcaccggagctggagccggagccgaagcacccaggccctcctcggactcgaacttgcacttgttaggttttatgccctaaataaaactctttacaatctgattagt

SEQ ID NO: 61280 - DNA, 3715 bp, Cannabis sativa
aaatttaaatattaattatttataaatattttttcatttaaaaatatttttattttttataatatataataaataattaaataaatttttagcaaaaataatttattatagtgtcttttgatcaaaacagctttttctaaaagttgggttgtaccaactttagcttttagctgtagctttttcataaatttttcaataagttgttttttaactgtttactaaacacttttttgtcacagcttgtttgaaaaacagcttttaacttttccaaaaattatgcgaaaagagccttaagttggtagattcaattagcttttacaaatcacacaacagtctatgaccaacctgtaaataaattaaaagtcacttattttaaatttttaataacataatgggtcctgtgttagtactattatttttgcacgtgtttaattttctagaataaattgtataacatatcatatcattgaagggtccacacattttgcaaatgggattgtgtttttattttattttttctgacaagtgtgtccatccaaattaaatgaatctaatccttatctgtttatgcgggtccaaactgatttatagaaaattgcacattagagttcaataataatacttgctacaaaattacaaaatgtataataatgtctttacattttgattacaaaaaataattgctattaaaaaaaaaccaaacgcacacaatttatatgaaattgtggaagatgatactattgactgaaggatgttccgtactaaaattggtccacccaaacccgaatttaaattactccgggtcaaataacaagtcaatgagattcggaaaaaatctaaaacatgatccgaatactgacccgtaaaaaaattagatagtatctagagtatttcttttcttttcctttgttttttttttataattatgtatattttttcagaaattccacagatatgaatcctgaactagaacgccatcgaaggaattatcttcataatcgatagttggcatcggcggtgcgtaaaaatcgccagtcagatcatcaaaacccggaaacaacccgtaatccgtagcgtaattacccgaacccatattcgagaacaaatccatatacgacacgtcagtcgccacgtcactgtcgaagtgagccattccacttccatccgacactgatggcgatggtgactccatctgtatcagctccggcacggttcgatccgaatggtggtggctgttcgaagcctccgagttcgcgaacctcgccgcctcagcctggatctcggtcggcgtgagagacctgccgccggcaatctccggcggattgtcggggaagttgaacttggctgacctgccacgcaagcaaaaaagagcagcgtcgaatgcacgcgccgccttctcggcggtgtcgtaagatcccaaccaaatcctctcacggctgtttggtagtctgatttcagagacccatttcccccacttcctcttccttacgcccttgtaccttaaatcatttctctctgattcgggctgattcttctcaatagtgttttgtttcaccattttttcgtttttcttttgtttgatttagtaaagttgttgtttgtattggttaaaagtaacaaataataataataataataatataatgaataaatcccgtgatgatgagataattgtgatttagaacagaagagtggctcgtgtgtggggaaacaaaagaatttgttatgatcagtattgtgtttggtttggtggtgttatgaattgaagtttttgcggctcgcgaatatttatacgtgagggttattttagagcgtgtttttagtgtgctgggactgagagctttcaattttgaaaatgttgactgatgggtcaactcttaataggcgcgttgggacaagaagcagcagccgtaaagcatcagaaataggctatttaacaaaattaaaatacaagcaaacacgtgtaaaggactgagatactgtgacgtggcttacgcggggtgggggagcctttgatccacgtgtgactttgtttttcctttctaataccctttcgatcttatttcatcagtaaattttacactctcctttttgtaaaatctgctaaaatattaatattaaaatttacaaaataatttaaatttattttatgcaatataaatttaggatcgttttgagatagaacaattgtttatggtcttacactgcaatttataactatttttacgagcagttatttttgctaataataaatgtttttataaattctatttttaactcttcctatttttgataagtataaatattaaactatttttttttttataaacaaaatgattatattgttataaatcatgtatgtgaatgtagtgtagtagacgtagtacagatgcttttattgatatcttttttttgtttgggtcaatggtttaaatacaccgtaactcttcatgagagagattatattgacacgtgattctcagaattgtctaagctatcaaaggaatgaggaaagaatttgcgccacgtaattccctttttgttaagtaaaaaaaaaaaacttgtaagtgttcttttttatccaccccttacaacataaaccaatcaaccaccattagccactttagaacaacctatcaaactaaattcaatcatttctgtgaactctcgcctctgcttatgacaatatattttacaaatttgactaaagaatgcacagtttgcatctacttgtcctaaaaacctttcttcgttattcaaagtggacttcactcaggcattgaagaccaaaatgtatatttctttcctcaacatgcttttcttgcttcttctaataatcaagttctgcacacttttatacttgttcttttaagttccaacccctacccaatgtagatattgcacttacttggatatttccttgattaatctgccattactgtcttcaaaactagctaggttaaaaatattttctagcaataataaaaaggttaaaattaaaacatacattatacaatttataatttaaatcaaatttatgcattatgatgatataatttttaaataattatatagtgcgtatcaatataaatgtttgacatatataagggtatgtatataaataatatatattggtaattaattgaaagaaatagatgatattttaaatttgttaacgaattaatagtttagagagatttatattgtcaaaatttaagcttaaagaattaaagaattaaatgtaagtgagattagtcactctatttttgttgaaaagcgaagttccactttcaataatagcatgcaattggatgttattttttttattttttttttttacaaaaaaggttaatcacttatttatgttttaattaaggttatcaattaatttaccttacatagaatcttaccatttgtcttttatttttatataagaaattaagtaactaaaaacctataaaacttgaattataacaatttatgaatatgttaaatatagtttgactatataatagttttatttttagagaaaatgcttaaaagtattagtggtgcttagtacctttttatgtgtctatattgctattggtttaaataagtatcagactctatatagttaaatataataattttttaggaagtatcactagtcaatcactaagcgacatatctagaggtgctagacaccactaatcactacaaaaaatcttatttt

SEQ ID NO: 61281 - DNA, 840 bp, Cannabis sativa
gatctaagaagaagataaaacacatgttgttctgaagacactctttatcagttcctaatccaacttggacaatgttatgagcaaaattgttattgtctcttgctgtgaatcgagcaatagtaaatatttacatgtatatttatacattataaaaaaagttactgacaatttatccagttagctatatttcaactttataacaagttgtttataaaaaaaaaaaaacacattattaaaagatgaaatgtgattagaattctcaaaagggtggtaactaaatataacttttaattataataaaaaattatttatgactaatacataatattcaaatataatttaatcacaataaattatgattaatacttttaatcactaattttttagtcacaacgtaaaaataataatttataattaattataatttttttacttttaatcgtaaattttattgccattacaaataaatttttttgtagtaacatatactttaatttcgtagacttcatgtataaacaatcaaatgaaataaagaaaatatatataaataatgaaggaaagcagaaagaaacagctagcttagctggggcctcacacagaagagatataattaatgaagcagaaatatcaagctagagtccaagaagttacaagacttcttttggatgatatgattgactgtttccctagctaatactgatcatttctgaattatgtggccaaaaatttgacagtactctctagattctaaagcttatgatccatggatgcagtggaatgaaaagtcgactcttgtgtgaaattttgtgtagcctacactaataatggtcccattttgat

SEQ ID NO: 61282 - DNA, 1100 bp, Cannabis sativa
atatcttccacttatcagggttacagaaggtgctgtaatacccagaagctctccctgccagcaaaggcgaaaaggactctgaaattctcatcaatcctattgctactggaagtgaacgaaagtcgcacatgctccgagatggtagcaaattagttggtccaggaagaccttagccagatctttttagaactccataatgcctaatctggagctaaacccaacagttgcatatcttctaataccaaatcagatcttgtcccccgcatcagactttggtagtgcacgtacatgctctttagctcatttttgccaacagtttgtttatacaccaattttgcaaggtgaaacctttggaacatgtgtcgttagtcctacaaattgggatgccacagttgtctatctcacgattaggaggtttcctagccaccaacagccagatcaccaagttataatcactagctagagaaacatgctaagtacgaaaccctaagtgggtaaaggaaatgcccttacccgcatgtatgcctataaatactcctatttttcatgtacagagggtgaacattttttacttagaaaacttttgccaaaatttctaaaaagcttttttcttcctcaagagaaacaaaaggaatataaagttaatattgtgaacacttgtaatactcaaacactcgccgacaaggctaatacaataaacttgtggactagggattattaacgcccaaacaacgtaaaaattattttgtctattatttattattttgcatttttcttaagctctaaataatcagttttccaaaatctcggtaatatttcggtgctttcattgagagttgaggaaattttactggttgttgaatcacttcgaccatggtgaatacccaaaagaatacaagcaacaaaactctattggacactgttttgaaggaagcagattcccttgcctccggccccagacgggcggtgttagagaagaaggcatgacccacgtcaagaactgaggggaagatgccgagaacctgttcaacggcctcaacgatgaccagaaccttgaaggtggggataaagaaggtgatggtgatgactacgtaaaagac

SEQ ID NO: 61283 - DNA, 1639 bp, Cannabis sativa
  modified_base (594)..(598): a, c, t, g, unknown or other
ttttaggtacttcctccgtcagcgctttaggtatttcctccgtcggcagggtatctaggtgcctcttcgggtcctggtatactatttcacttgtagttaatctttgatccgttgattacccattccttcctgttctttcttctgtttccgtcggcgctccctttactcgtttcttgtcatttatcgttttcctcctttttctctgtagtgcccccttatagactggcaacccggatcgatagtttggccataccgagttgggcctacctttatattcttgggcctggatgtatttattttgatgggcctttttaatgtgggcctttttgtagtcctttattttgttgggccgtttattttcaagttcgattttttccccccaaacagctatggtaattttgtattgcgtctttttttttaacaagtaatatttaggttttgatattaagaatattaaattttaaaataaaataataaatgtaatgcccctccacgtgtctatatttattattagttaacggaagtggtagtaatggtgtaagagaattgtaacattaagtatttttgcctcaaaaataaacattaggtatttannnnnataaaatctgaaacattaggtatttatgccgcaatttaccctaatttataaccattgatttaatctaatggctcaaataaattcttgaaaactacaccataactaatatatttatttataattaatcttgaatattattaattatagatttaagtaacaaaactccaaaccataattttttttactttttatgttacatctactaaatatgtaattttaattatatatattttttaattttaaatttacataaaaatatattttaattaaatttattttaaaacaataattatacttatagaaaattataacatgttcaacttataataatcaatataaacattgtagtttatgtaagagaattttaccacttacactatgattatattattgattgtattgattattttaagattaaataacttgaatattttgtactcttttagctataattattgttgagtagaaaataaaattaatatataaattcaaaattaaaaaaataattaattaaaattataaaaagttataaggtaaataagtaagaaaattataggtttggagttagctttggagtattgttagttggatccaaattaatatttaaaattaattataaataaaaaatattaattatggtgtagtttccaagagttaatttaagtcatttgattaaatcaatggttataaatcattatacctattaatagttaaaaattacaaaacctattattagctccctatataaaaatatgatatataatccaatttaatataatacagtacaatatgacctaatacaacgttccaaacgagccctaagtgatatgtataagcccggcccaagctcaagcccaagcccaaacccaagcccatggcgaaatgcctcttttcgagtcttttcttctcacttagccaaaccaacaaataagtcagacacacttcgtcgtaggggtgtacgtcggtcggtttagtcgggttatagcatatttttatcaacccaatataaatatcgggttgcaaatatttaatcgtaacccg

SEQ ID NO: 61284 - DNA, 576 bp, Cannabis sativa
ctattaggtaccagtagtgcctagtactttatcgatatgtcgctgcgattgactagcaatattctataaaagctattatattaaattatgtaagatcagatatttaattaaaccaataacgatattgacacataaaaagttgctagggggaccaggcaccatgagtgccctcttttctcttccatataatcatatatcacgtgtgatagtcttaatacaaaaagtgaaagggcaatttcgtccatataaaattacaacagcatcgtaaattgtaccaacttccaatgagaacaagttgaaaaagaaagaaatctcagttattaaacaaacaaaaaaataaaaccccattttcaatttcaaatctgaaacggtcacacaaccacatttatcatcaacaacactatatatacaactcagctccatactattattctctgatccaaacatggcccaacaaccctatcaaagtatcagtcttcttcttctcttctccattttcctccaatcttctgtttcagccatcagaccaggcttcctctacaccagaaccactccaagatgcactcccaagtaagt

SEQ ID NO: 61285 - DNA, 2897 bp, Cannabis sativa
  modified_base (2798)..(2806): a, c, t, g, unknown or other
tattaattagtaaatctgattacattgaaataggttttatttagggcagacaacccaacaaaagcttgggggtaaatgttattcacgtttctggcattggacacgtggcctccaagttggcatttaagacttatcagtaggaccctcatcagggatacggtgggccaagaccacttggatgagatcttctgggagttatctcggttccgtgctcacagtaccttctaccctcgatagatcgaactcagaagatagctccggtatcatgagcctggagggaaaagttttgcgttctcggaagactcttccaatttccctatttgttccctcctataaataaagaatttccagttttcagattgtgccataatatcatattacaattgaagaggaaacttcccataacaagcgcatggcagttattttagaatattctcccattataattggatacggttttgacctaattaactcaagcctgattttcctagtcagcatattatattctttatgggatggacttcatgagtaagcccaacgccattgtttagttgtaaactcccttgtagagggaaaatgggaaaccctaatgtaattctccaactacaataaatacccaactaatcttatcgattaggaattgaattctcttatgtacttttgctcaggcaaacatatgaatatgcatcctctatacctttgagaatatttacaagtaaatgcattactgaataaaattgactcgtggactaaggctagttaacaccccaaccatgtaaaaaactgtttgtctcttattatactttctctttcgattattgtttcttcagttcttattattttattccgtttctgaaaatctcagaaaataataattaataataataaatataataattataataattaagataatgataataataaaaaaaaaactttattaataaaagtcatttaccatttcttagacactaataaatctttaatcttatggcactaggtcaaatctcaagtacctctaattaccccaataaatataatatcaacttatcttaatattcccatcaaagttactcatttaacctgttatgatattttggtccccgatcgagtctccaaggtcgccaaacctaaaaatactttattccactaacaactcatattatattcacacatgctatataaatctccgtaattaataaattacacttatttatctacttatgccaaaatttatgttttatgctaaaatagattagcaggatcataatctcactcattacatgtgtaacaccctactagcttaggcatgttacatgatttttaactcaactatgcagctcgttgctaatcaacgagctaattgaaaatcgtgaataattaaaattttatttaactaaatataaatatcaaaataacatacttgtattaaactaggatcctatttacaaaagtatttacaaaatttttatagcgcataacacaaaagtttgtcgcccagggactaagcaaaataagtcctgttgtcccaaagaccgtacgctccaagcctaaccgcctgacatgtacaatctccatctgcttgctctcacggctactcaaccttagccttgcccttgcctacacatggaaacaatatctgtgagttgacaaacttagtaagaaaagtataatcataagcataaacatataatcagactgcaaccaggcgcccatacacctgattacaatctactaactgagtcaggaacgttctcgacaaagtatgacaaactgcgaatccagcctatactcgatactctaatcgtaataatgtggtagtagataacacacactacctgatagcctggcatatatcaattggcatctcggtgcaactctatgtacacctcaccaatgccctgatatgctaatctgatggctatagattcctgacggcaactaacatgtacgctgaacatgtatacatatatgcaactattatactaattttaacttgtttttgaattcatgtgtgccaaccaacctgagggaatagctgcttgacatattacaggcccctaaatcacattattcgtaaaattagtgagtgacacgctaaatcacttttcggtgacttaaacttgaaacaaaaagtttccctattgataaataacatggcaatactctaaatattaaaaaaaatgagaaaaactagggttcctaaaaatgccccaaccgatagaccagttcccaaccagaattctggttctacatgatttccttgaggaccaaccgatcgaccggttcctacaggtccccctgaaccggtcgactggttcagtgtatgaaatcttaataattcactactctctcaaatcaattccaaactttaccaaaccttccagacctgcttaatatatcataataaaaataattcaagcaacaaaacaactccataagctcaaaacaaaaaattaccattaaagaccaaagtttgagttctaatactcaaactttgtctaacaaccaaatcaagtcaccaactatcttccaaacagctcaaataatctaatcttaacctcagaatataatctcaaacaacaagaattaccgcagaatctaacccttacaaaaatcataaaatacttaacttgaaacttaaaaaaaacaacaaaggatgagctagaacattaccttgggttagaaataactaagagcttgctagaaactttgaattcatcaaaaaaaaaaccccaaccctagctggttctagggagctcgagataaagagagtatttatagagagagagagagannnnnnnnnagagagagagaaagaaagagagatttttgttttcttcttgattttttctaatttggataaacgaaataaatctaatgttttatcccaatta

SEQ ID NO: 61286 - DNA, 1380 bp, Cannabis sativa
aagcagaaattgaggtaggctcttaatggccagcaggccataagggaggagtatgctaacttgttctccgaactcacttatgagttcaagttgcataacccccgagctagtatgtcattgatgggaaataaggcttttgtggagagaatgttggctcgtggaaaggtgattttttagagtcagatggaggcaaacccaaccgctgcctatcgagagtggtcatcatcagagactcatgtcgaggggctggccgacccaccacctatggaggtggtggtccgtaagcatagtgacgaccacgccggccagcatgttgatggtaaggctggcctagactttgggtatctcgatcttgcgacttcagattcagctcctcctgcccttgcacacatttaggcagtacttttattagtagtaatcaacattatatttgcataacatagacaatattttcatgtttcgcatagcttgtggctttcatggcctgtggccttttatctttacaacactacttactttcatgttccacgtggaatgttgcatttttagaacatgactttattttcatgttccatgtggcctgtggcctttttagaacactactttattattcacccaagtccttcatgttcatatcttttgcctataggacctctgtttttgaacactactatcgttttgccctaatgctttttatcatggattgtgtgaccaaccaggcgatctataatcttggctatcttcttatggccttgacaagtaagggaccatatttacttagccaagccaaagtatgcatgcacgacttagaggcaggttaagcaacgtattctaaacattaaaatttctctggttaagttctttgtgctagttcaatggcttgtacagtatgggtgcccccaagtgaccatgcagacaagtctcttggtgatggggctacccctacttgcctcgcataataggggccaccgttgaagaatggtgggagaccacgtcaaaatggtcgtgggtactagctcttttttactctaatgttgagtaggtagaactgtggcaatggagtaatgtttgtaagttggtactgatagtagttgcgaaggctctctgcattcgattatcttggtaggagaatgagctccattttctcgttgtaccttcccagcttgtagactcccttactagttatctctgtaacttgataggggccttcctagttgggtctgaacactcttgtgctaagtctttagtttttagtaacactcttcggagcaccaagtctcctatggagaatttcctagtcattacttgtttgttgaagtgccctactacctttttctagtaggtttgtagctttaggtttgcttgttttcttcttttttc

SEQ ID NO: 61287 - DNA, 611 bp, Cannabis sativa
ctttttataacatttggggagttatttgttactatgagtaacctccaccattatcaccaacattaagagtgtaaaaagtgttacacatcttaataagctttggaagaaatgtgcaataccttgtttattaatagaattatattacatgtgttgtattctttttcttctacattttatatatataataaaaaattattttgttcataaaaaatattaatttaaggtttaaatttaacaatattaaaaataaagataaaacaatattaactttgccattataaaagggacaaaataatatcatgtcgaaaataagagggaataaaataatagtagcaacaaaagtgagggagcaaatccactaattattttattaaatatttttcatcaccattatttttcataaaaattaatgtatacaatgaaactatatttagttttgattttttttttttaaaggagtttagttttgaaacttaaatccaaaattaaattaaattaaaaaaatctattagaataattcaacattgaacgtaacaacggcctcaagaaaaggcaatgcataattaaatcactaaatagaaggaattaaagtaacagatttatttgtaaat

SEQ ID NO: 61288 - DNA, 696 bp, Cannabis sativa
ccgacatagacctatttttttttgtagtgcttcctactacaaccttaaaaaaattgagacatagtattggaatgtgtcatctacaacatctatgagaagtaactggtaatgttagtgtgagggggagtttattcagctgtaatataggaatagtattcaacttgtagtagtaaagtataatgattatataaattatacatgcatgtattatatatctgtaacttagtggaagcaaagtgaagaacagaaaaaaaaaaaaaaatacaaagtttattactcatatttatctaaatttataacaatatatattatttaacagattttataaaaatttataaaatttgtaatttcttaaaaaaaaaaaagtataatttgtaatttcttaaaaatagtgtaattactatattacaaaattacattaaaaatatggatatattaataaatttttttattaaaaaattaataaacaattgtttttttggtatataattaaaaaaaaatattaaaggtatataattaaaaaaaaaacttcgggagaagagagtttacaatgtagcaatagtcaacggttgtttgacttcataacttaaaaaattattttcggttttacatcttttaaaaattaataaggtgtgtttggccaatttttttaaaaatagttttctcaaaattgagttacaaaaaatctaaaaaaaa

SEQ ID NO: 61289 - DNA, 730 bp, Cannabis sativa
attttctacaattgattgtcaagatagattacttatgtgtacgcttttatagacacgtttatactagtacacctaatattattatttaaaaaatataaaagatttcaaattttataatatttttattttttaaatgttttatttttattttataattttgtttaattttaaatgaattttgaaaataatttttaaatgataatattcagtatactaatataaaagtgccacttgtacaaaattatgcacataagcagttcatggtagcagttatcggatgacaccttagcaagtagtttagtagtttggagggttttaccatcaaaacttgagcttagaggattaaatacaagtaaaataataattaagagggtctaaccgccaaactctaaaataaaataaaaaccatattttaacactgaatacttctaagaaattttaaacaagtgaaaaaatttgaaaggcaccacagtgataatagttcaaggtcagggttaaaaatatcttaaatattttttattttatctcatggttgtgatttattttgtagaataaaacataatttattataatatttaaatatatatataaaaaaaaaaattaatccatatttcttttttaaggaaaatgaacctttacttagtaaggcaacataaatgggattcttacaaattaggcaacacttaaaaagacacacataacttaaaaagaagaagatgagttaaatagt

SEQ ID NO: 61290 - DNA, 748 bp, Cannabis sativa
caattttgagactagaaaactaaacaattattatgtaggcaaatcacgttcagaacatttgacttacatgctttgaacgttccttggtcgcttcttaggtcggcgaggaggtttgtgacctaatagagagatgaaatcttcttcgatctctttcttcgcgagcttctccggtggcgataccctctgagatatagcaaatgagtttaaaaaccctaaaaagaactaataagaacacgaaaatgataataaaagcactaaaatacattgatgatgatcttccaacaatgaaagagaactggaaaagtttttggagcctgtttggagcttctttttgatttttttttagctgaaagtgagtttttgtttgtgaaagtgaagttctttagaactgaaaaagttttcttcactttactaaatgggcgcgaaaaccaaaatgtttgcaaccggttacaaccggatacacttccaattttcaagtcaaatacccatctatttatcaaattaaatattatataaaaataatatatggggtatctaatattagcctttagatcaaaattaagacaatctaacagctattaaaggtgtgcggcactagtcactcaagaaacctatgcgcgacaatagccatgccctatataattatttgggaaaataacaaaagtaattttaattggttacaacagtgttagttgtacaaaaatataaataatatactaattactcatattttttatattgtgtcatt

SEQ ID NO: 61291 - DNA, 929 bp, Cannabis sativa
cccatgaaacctgccaccgtaaaccaggaaccagagcctttgaacgacgaaaacaacaaacccaaccaccatagagcccagacgaagttcgaacaactagatccacaaagaccttcaaacaaaatacacctgaaaaaatcagagatatggggagagattttaacccaaaaaaatatatatcgagggagacgagaggagaccatgggcatttggaggcagagaatccgtcgatggagtagagggagacgagaggttccatggcagttgaagctcgcctgggcctttggtggttgtcgtcttccatgacagaatcatcggaggaaggagatgaggagccttgttccaccatagaagctaatctgcaatgagtagaagaagaagaagagagatagttgcgatggtttaatgggcgaatcttgagagttgttgagctgtgtaaggttgtagtgttagagaaatgaaaggaggagggttagagatggctggttttggagagagatgagaaaaaagaaaataaaaaataatctgagagaggcggttgagaaaggagagagagagatgtttggtataagggattcaaaataatctcattaaggagaatattatgaaagagaatatgattatctgtaaacttattactgtgtttggttattcatggtaatattaattagattattgttaattaaattatggtgtttagttgagcacaggaatcttatatactattttagaatagtgaaataaaataaaataataattagtatatctctttcaacataattataaataaaaaaaattattatttgtaataacaaatatatttattaataaataaatttaattgcaatgtatttgtccaactgatgagccagcaaccaaagttgcagcgacaagagagcgatgcgttgttgaattttaacgaaaaagtt

SEQ ID NO: 61292 - DNA, 1137 bp, Cannabis sativa
tcgacatataaatttgacaaaaattaaattatttatttggataatgatagatcgatcgatgacatggaggaatcttttcatgagaaaaagaacgatgcatattgcttaataataaatatgccggttctacgtaaaatatatggcaattgtctttttcttagtctatttaacatatttttcacgtcatagaattaaactacatttgtaatttttaaaataattattggctgtgcaatcaaagacgtttgactaaaaatagaatgatcgtgggtatatgtaaagatagacaatatttttatgaggaaattatgccgattttaaaagtttttagataaatatagcacatttaagttgactaatttatatggtatttttttttttttatttttaggtctttttatggtatttgatatgccatatatatatgtaattaggttttcaaatcccaatttaatgtttttatttgtttaggaagttttatttgtcactgataccggaaaacttgtcggagtagcggttggtgccggaaaagtcatcagagttactgtcggcgccggaaaattcgtcagaattggcattttcgccgaaaaatcactgaaaaaatcactaagaaaccgatttcttgatgaagaaactaccttcttggtgatttttccgttgacaatgcaatgtcaattcggactccggcgacttttccggcaccgacagcaaacttcaaaaaagtcatcagaattggcatagtcgctggaaaccagttcttaatgaagaaaccaatttcttggtgattttttcagtgatttttctaacgacaatggcaattctaacgacttttttggcgttggtagcaactctgatgactaatatatcagtagctactccggtgacttttttggtaccgacagtaaactctgggaaattcgtcggaattgacattgtcgctggaaaatttaccagaaaaatcaccaagaaactggtttttttttatcaagagaccagtttggtaatttttttgtgatttttccagcgttaatgccgattctgataacttttttagcgctggtagcaactctggtgactttcccggtgccggcagcaactccagcgactatgcctattttgataacttgtttcagttaa

SEQ ID NO: 61293 - DNA, 899 bp, Cannabis sativa
  modified_base (206)..(221): a, c, t, g, unknown or other
tctctctctctctctcgttctctgttttggcgtacgaaatctgaactcaaaaacttaatttctaacgtgtttaaacctaaacaaaaagatcgctctaaacggaaattagaacgattctcattctacaaaaataggtcctcctataacgtatcatacgtatatacaatcggtttaaagtttcatacaaaataataataataataatnnnnnnnnnnnnnnnnataataataataataataagtagtgtgtcaaatatatcatttaacactataataatatttaccaatattattttaaaaaaaacaataatcacaaattttattatattattataagttaacacatttcattattattattattctcccactaataataatatgtaccaaaatcaaataaaccacaaagatttaatattcagatatatatatttattaggcattatgcacatgtcaagaaaattaaccattatatcatcacgaaaatttcatacatatttaaacccataaatatgtaaaataacaaaaatactctcagctggaaaaatttacaaaaatactcttctgagttcgtggatattacaacaatagaccatgttttatttttcttgagtgcaaaaaattcattatccatggctttcaaccattgggtaaatttagatgcctgtctgaaagttgttggttcgagttcagtgtaagcatgaaatatggcatttttaaaagcaacacttaacttgtcatagttaaggtattttaccaagggatgattagttgaagactgacaagtgtagtcttttagatgagcaggtggaagagtttgtcgacctgctttggtgattgaggaatgttgtatgaccttagtgttggggattattttaccaggatctagatttactgcca

SEQ ID NO: 61294 - DNA, 1201 bp, Cannabis sativa
gcacaagacctgacattgctcatgctttaagcatattgagtaggttcatgtcaaatcttgggataaaccattagagggcactcaaatgactgcttagataaaccatattaaatagggtatttgatccctaatttcgcaggagaaatggggcttttcattagggaacttaggagacaagaaagttagagagaaaaaaagaagattttcaagcacaaccatcgtcttcattagttcttctctttcatcatttatttgatgttttcaattttttatttgtaattttttagaatgattattatgagcgaaactcatattcaaagtttttaatagatattgtttgatacttttttatggttttaatgcaattctagtattttttttccttaatttcttatgtaaatctatttcattcgtgcttaattcttaaaattgcttgattactaattatttattttatgattttaatgtaaaatctgaaaagtgagttttaattatgttatagtataatagacatagatttagatattggataagagttcctgtatagtctatgtagcatttaggattttcatgtttaaggaaaattgtatgactaatttatcacaaaagtataggactttaccatacaatttaaattctatatatcctaataagaatatagattgaaatagttaattgactatcacatagaaattggaacaataacttgattgtattagaccatgggagattgatacaaatgaaattaactgtcttaagattgatcattgttattcgttctcgctttaattgtttttttttaattaagttttcttaatttaaaaaattcttacaaattattgccacgaaataaaattaggttttgaattatttggtacttcactacagtccttgtgggaacgatactctactttcacaattattacttgtaaatgatacgtggacttgcgtattagaatttccacaacacattataaagttaatcatgctaggaacatttagatacactactatgtagctaacacagaaaagccttatttccactgttctaccaatgacaaatgctagaccaaaataatgtgtttatgtaaaggaagttagttatgttcgttgattggtttagttagttataactcttgtacaacaacaacttttggttacagaattttagcttttaaccattgtatataagcatgtattc

SEQ ID NO: 61295 - DNA, 917 bp, Cannabis sativa
agaagaaggacgttttggacaacagctacatcaaaaagtctattgatatttgtgaaacaaaattagctcacggtgataatccaaagattaaagctacgggagcactcatggcgttgactgattggaggaatttgggattggtttcagatgagtttggatcaggatggaatatagagaatgtgacatcattgccatgggattgttttgggtctgtggatttgtgtacctttttgcctgctccaaaatctgacccttcattaaaaggtggggttgggatattggtctctcttcccagacaagccatgcctaagttcaaactggaaatcgattctcttcactaattagctagtatatattattatttttatattttcttttttcttattatttaattaatatagtaaatgaatgtaatttttttcccaatatattctctgctcgatcattaactttgtaattaagttgtatcaatattaataaaatattcatatttcaatcgtaaatgatatgcctatttttttctcttcaactacgactgtgctaattttcttatattttgttaagatttataggccagattatgtagtcttgttgctgctcctttaaatacatcttttaaatgtatttgctctccttttactttctgtttccttggcgcttgttacaaatgtctaagtatgtagctcaactaatcagtattgtgtaatttatatgttcttattaatttcatcatgaagcacataacaggtcacgaaaaagaacttattgtgtgtataataggtcatgaaataaggtctcggtgaaaaaattcatatatgaaacacgcgtagctatcttgaaatgaggtgccataaagactaatatttcatgacgcggaatagtaataaatgagacttaaaccaaaatcacaataataa

SEQ ID NO: 61296 - DNA, 1375 bp, Cannabis sativa
ctatacaggcacgaagtaatatttgcctattacagtccaattgctaatgcttggaaatatagcactatttatattgtataattacgcttttcattattaattaattttgaaaaagaatccacatattcatcatatattttaacatggtatgttaagcaggctgctaatgaaaataaaagtggaatgatattactgaatgaatgaaatttctgggtgggttgagacgcggactaggtcgctctctttaagacattcgtgaactgtcgaggaatgtgcaagcagtcaaaaattgctggtcatgtcttcaggataaaatagcacagtcgtatactgtatcggatccccgttgcactgtagaaatctgtcgaatatatacaccctcaaaattaatttcatagatggaattttttttattttatttttttttgaaaaactgtgtttttttcttttttggatcacgaagaagatacttcaataatcaacaagcaaaaataccctcaaacctcataaatacaaaactgcacccaacccaaagacaaaaagacaaaataattactttgtattctattcaagtagtctctttcctaactagttaattttttgttattgacaagattcaatctatataaaactgtactcttcacttcagctacaacccaactgactgttttggaactaccttaaaaatcacctgtttctatttaaccagagacagtaacaagtggctataaggatggctatattaatgcttcttttcaaaccagaaatcttagtagagagccactttttccagtcctctagagtgtttagccaagcattgtaaccaagccaagcaaatattttggacaacactctttgtgagaggctacaagtaaaaaggtggtcatgagtttccaaatgatcaccacaaaccgggcagctccaagtaacaagctcaaacgtgaaatttactgagattgtcacgagtaagaagatgagagagttcacaatatgccataacacaaatcggtgtttaggaaaattcaagtagttccaaatagccttatagtagctatcacaattatgctttaagaggctattataaagtaaggccgccctaaaattacctgttttgcccgccttcattatgtcctcacttgagaatatacttctcagcttgcaaaacttcctccaatactagctcgagtctagttattagaatgtgcaaccagaaaggattatctttgagatgaatgagattgatccattaactcaaattcagaaggtccttcttgtccatgatggcccaaatatacttgaatagcatagcatagttccacttggttccttctttaaagtctaggcctccataagctttgggaaggcaaactttctc

SEQ ID NO: 61297 - DNA, 1017 bp, Cannabis sativa
cttactatttacaagaatgagatgggtttgcataataaagagttatttaaagtacaatttacatgattttaaaaatttatttgataaatattgtatgtaattcataataattaagatgagaaatgaatgaatttttaatataaaataattaaaataatattttaatatattgttaggggtgttcacggattggtttcatttgaattatcatattttttaaactaaaccagtataacggttttttgaatgaacggtttggtttggtttgaaaccacagtttaagtggaatttatacttattcataatttttaagtcattgtaatatttttaccaaatttttaattgtatttttcaaagtatatatttcacatataagtagtagtaagaaaacattctcaaagtcaaacataacataaaaatctaaaatttatgcaatacaaaactgacacaaaaaagtttaaaattatacatatattatacatatagtcatatataaaatatataaatcaattatttattataaacggtccggtctggtttaatcgttaactatttattacaaactgcaaccgaactattacgcggtaaacggtctgcattattcctcatttgacgagtcaagatattctaaacatggtctcactgctgtataggatgtgttgatgttacttatttaaagtaaatttacaacacctgttactaccaaatcgatggccaattttacagtaattgaccgacacttcgcttataatgcagtaataggtcgccccattttgaaagagatgaaaatagttaccttgatctaccacctcaccaaggaattccccaccccccgcgggtgtgggatcgatgcaaggagtctaggcagatttgagggaatgctacaatactgcattaaaaatcacagtaaagaaaaagtcagtgaatgttatttatttgctcaaggctcctcctcctcaacatgagtcttttagaatcgaagaagtatcgcatgtggagaaacctgatctggaccca

SEQ ID NO: 61298 - DNA, 1102 bp, Cannabis sativa
agtcccagtgcctcagtgaggaaccgcgatagcgccagagggtcaggtacctcccggagggatgcttgattagcaggcacctggactgccacctcggactaacggagagtttctatgatctccagaggttctcatattggaggaaccactagaaatgagctaatgcattatgatggggccctaaacatgataaaaaaatatgggaagttactcaactttcggctcaaaggcccaggctcatggatcaacccattacctttattgaggaagatgcaaggtcagtgcgctttctgcatcatgaccccctagtcatcgagactcccattgcaaataaggtcgtagtcatgatattagtagacaatggaagctccgtgaacttgttattcaaagacacattcacggccattgggctcactaagagagatctctcccccagcaatttgcaagtcacaagattcaataggacgaccctcatccctatgggaaaggttgggctctcggttaccttatgtcttgacaccacccagagcacgttcaaatattgcacctttgtagtggtggactgtcccactccctacaacaccattctaggtaggttggccttggtcgacttcagagtaatcacatccatccgccacctgtgccttaagtttcccactcaggaggcaggagtagggatagtgagggggaatcaaggagaagcaagataatgctggagtacatttgtctgtcctaacgatacaggggtcgggaccaatgttgacagcagagtaggatgaattggaccctcgtattagttttgaagcagcattagaacccttggaggatattgaggaagtgagggtatgtgacctcgatccatctaaagttattcgtctagggaaaggactagaactggaggagcagagtaacatcatagacaccataaaggcatccacggacgtgtttgcttggtgtcatggggacatgatcgagataagtccccacgtgatcactcatgtcctaaatgtcaacccagatatgcctctgatgcaacaaaagagacgtctgctatactcggtaaaggttgatgccctggaaaaggaagtggataaattactat

SEQ ID NO: 61299 - DNA, 1020 bp, Cannabis sativa
  modified_base (401)..(402): a, c, t, g, unknown or other
tgcatataaagtatttcaggactcctttactaatgaacaaactacatacatttaatatttctcaatatacaaaaagaaataaaagtatgttcttcaatcatttctaatataatcaaaaattcttcaacagcctatcacaacatataatcactactacaaaaaagggctttagagacattaattgagagactctaaaatattttagtgacacttcactgcgcgtcactaatgtgggtgactagaaagacaatatttagtgacactgaatcagtgtgtgtcactagacctttttagaaaccctcactgctcgtcactataagcttttagagtcatgccatgtcacactgtaaaaataacagctacacactctgcgtgtcactataactatttttttttttttnnaaaaaaatatatatatattttttcttctgatatcacctactcttaaagtgtgtcactatatttatttgaattaaaaactaaatcttagtaaaataaatgtgtataataaaatttatttacattatattctcttttaatggtaggaaattaaacactaaacaaaatatttatataatattggatataataaatgcaatataaaaagatatttatagaacaataacagttattatgaacactcaaataaaaaaaaccaataagaacagatctgaaaatattaagaacctaaaagacccattaaatatgaatacacaatttttttgttaatatttcattttaacaaaaaaaaaaataaataaactccatacaagaagatacaataaactaatagagttaacaaatacattaaacacaaataccttattttttcaacagatacaaccgaaaaaaatagttaactgtacaaaaccaaaaaaagggcaagaatacatttcgaaaataaacaaattagactagggaatcgcacggaagtctagcaacgctgggccaagcaggaggcgttctcggctgggctgcatttgatttcgtgtataaagaagtgagagagaccgagagtgc

SEQ ID NO: 61300 - DNA, 1376 bp, Cannabis sativa
gggcataaaacccaacaataaccaaggtagtggaatcatagattcaacatgtttacccaaagtattggaatcttaagattaaagtttgactcttgcctattacaaggaattagggacacctaaggtagtgtacctattactctatgttgatgatatgatattattattaaagaggaggcaaaaataaaactcattaaggataagctcaattacgaattcgaaatgaaggaccttggagcagttagaaaaattcttggtattaaggaaaagataagaagggaagatgatcataactcaaaaaagctacatagagaaagtagtcaagaagttaaagttggaatcatttaaggcaacatgagtacctttagctggacattttaagctgtcaaatgagtaatgttttaagtttgaaacagagagagaatgtattaagggaatgcccatatgcaatggttgttggctatttaatgtatatcatggtcagtatttgacctaatatagttcaatccataagtgtattcaacagattcatggcaaatccagggtcagaatattggaatgcatggaagtggttaatgagatactcaaaaagaacaacaaaggatggcctgatctaccaaagagactcatcaaatttgagattagatggctatattggtgtagattatgtatcaaacttagacaatagaagatctactacaacttatgtattcatggttaacaagagttgcatctactgtaaatctcaacggcaacaagtggtggcacttgaaacaatagaatcagaaattatggccaccattaaagctttcaaagaagcaatgacaaaggaactgtatattaagatagtcttcatcaattcacttgtgtaagaattttgtttaccatgagaaggtacacacaagtgataattctacagacataagaacaaagattctcactttcagcaagttgatgcattgtcttaacttgctgaatattggtacttgttgaaacttttgagagtataacatcattaaggtttgagtgaaaaaggcttgatagtctacttttgaggatcaaggtaaaatatgtagaagttaatcctccaaaattagcctataacgaactcaacttatttaaccaattattacagttagttaagactgttacaagaacagttgtaaagctatgtttataaatagctcccttttcatttcatgagagagagaggttgtgggagtttagagatcaagtcctttgggattaaggacttgagggtgtactcgagattgggagagaagggttgagattgtccactaagatccgagtttagagttttctaagctctgtcattggtgtttgtattctttcttctcctccattaatgaaagctt

SEQ ID NO: 61301 - DNA, 780 bp, Cannabis sativa
gcgatcttgaaacaaggtatcaagccattcattatcttcatgctgacatatttcaatcatatttttccagctcttttcaaattcttcctctgtccatgaattgtaaacataattatcaaatactctcatgaaatttgcattttcttttacaaaatgcccaatcttttcaggaattttctttaatatatgccataaacaaaaacgatgctttgaatttgggaaaacaattttaattgcagcttgcataactttctcttgatcagttaaaatagcacctggagcttttccacccattgttctaagccatgtttgcattaaccaaacaaatgttgaagtagtttcatttgcaagcaatgcacacccaaggattgtagattgaaaatgattattcactccaataaatggagcaaatggcattttgtatttgtttgtaatataagttgtatcaaatgagacaacatcaccaaaattttgtagtcatcacgacttttagcatctacccaaaaaatatttttgagacgttgttcttcgtctaaatctattgcataaaagaaatttggattttcttcttgcatatgcataaatagctcaagcattgctttggcatcaccttgctcaagtgctagccgtctttctttgtccaagggattcctaatatctttttccatgtgtctaatattttcatatccaccatgtcgtttggccattgtagaataaattttgcttgtgcttaccccagccgcatgtaaagcatcaatgtgatatttatcggatgaagta

SEQ ID NO: 61302 - DNA, 3337 bp, Cannabis sativa
caggataagccctaccttcgagaatatatgtatatgtattcgcgattaaaatttttattgtcgagttgtattgtatatggatgactactttttcttatagtaatatatattatataaatgtatgtgaaacggaaaattgatgtgctatacataatattatatgtatatgacttcagacttcatctaacatattgaattggacaatttatttaatgtattattatttgatgagtcatcacgttattatcacattatatctccaaaatgcatattaccatcttactctccaagagtccaagtacacatctgttctctcaccaaatacataatatattatttgtgtatgcatgtaacagataaacaaatatgtaagataattttcttaaacttttatcattaatttagtttttggaatgcatacatgagaatagggttgtgaatattgtgatcgataatagacaaattattactttttctctctcaaatatatataaagatggagagacaattaattgacatatatctcattgtcatttctattagtattaatcaagtcaatgaactgaaggacctaattaatttataagaatgaataatgttaaagtataaaacacttttcttttttaatcttttaattatacataaaataaaaatgctacaagttacaacaccgcccgaattagggttatccaaatagtagaactaaaaaatcaaatccttaacttttatgtttttaagtcaaccatttgtgtccttctcaatctcattagtactcatcactggttgttataaccaacgacataaattaaggacaattaataaaaatataaagctatatataatataaactacaaataaaagtgcatgctgtatatatcggctatatattaagatacgtacgcagatacaatataccaacttattatatgtatatatatatgcttaaattaaaatatatctatttgcattttgcatgtatatacaaagagagaaaatgacatttcaccaacgtacgatatttaatatggactataataatatttcaatgtacattattgttttttcaatgactaaatggcacaaggacgtgtatagttgttgaatacgaaactacgtatgtaatcttcgtagctcattaaaaaaacaatatatatgtctttccaattaattaaatcatgaaatcaatagtgttattgtgaaaaatgtgtctccgcgtaccaaacaatgaatttcatgcataatttcattttcatggttcatgacgttataattaagcagtaactagtatacgaagtttcctatggtactcatgtaatatataatatagcttcaatatattttaattatactaagataatattaagtgtaatccacctacaattagttattataaaaaataaaagagatatataaatgtagtaaaagtttaatttgaattgtaatattttttttaaaaaaaaaaaaattacggtaattaaattaaaattataattaaccatagattataaaaataattttatttattgaataacatttacaccaaaaaaaaatttaattatacaactaaaaaataaaaactaaaaatataactaatgatcaatacaccttaatattaacttctagtataaaaatatgtatatattatatatatatatattatgcatggcttgcatatatatatataattgcatggttgtagcttttaagaaagccaagattttatatatatgttgggaattgttttttgtagctaggagtattaggctatatgcttggtaagagtagtggttttaattttagtacatatacaaaattataattccaattatatgatcgtgtatattatagtttttatttttctagtaattttgaataatttatgattcaaaagaattatttttatgcatgtatataaaaaaaaaaaatttcaaaataatttattttatgtttttgacacgtttatacattttttttttcctttttaaagatgtcatcacgtttatatgttacaaattacaatttaatttattttatataacagcatacaaatgtttgaaaatttttaaagtgttgaaaataataataaattattttgaagtgagtttttaaaatcgtaaattatatatttataattttagaaaagttagtataaaattttaattaactataatatatactgtttaagagaaatattaaatattggtttccatacgtgcttacatgtcatattgctattggaatcctatttatttattttaataataattataaaaaattattaattatttataaattatcaacttataataatatatcgtaatttctaatcataatatattttttttaatcattagttcaagtgatcatataaaaagtattaaagtcgtgtatttgtaagaatcatgaaataaaatccttaactttgtaactcaaaaatgtaatttaaaaacgcttctctaataaaaaaaaaaaattcttcattataaccacaatgctcctaggatcctataccaatggcaaaagacattagtggtatatagtcaactgcgtgaccaaaatgtacacacgctttctgtatagaaaggctttaaaaaataaataaagtatagctacattataacataaaaaaaaatagttggatataaaggtgggaccaatatagaattgttttttctatatgaaatggataatggatatgccttgggactagttagaagccaaacaaaattataaaagtaaagtaggcatcttctcttaacattcttgttatcttccctttattcccattggttaatatcattatctctctataaaaaaacacgtgttttcagttttcattcttttggttccatatttttgctcttataaataaataattgtagcattaacattaacgtataccttcaattattcaaaaacacatattccttctatttttctttattaccttcaattattcaataatgcagtttggattggagatgcctaattagaaactaaatactttctataaaatgtatgattatacatattttttagttctcgtaaaaatgtgttaataacaaatgtataattagtaacaatataaaatatataattatattgctactaatcatagaattacacctactccttttaacttgaattgaagatgtatggtccaatttaaaatcataacacattgccaaatgccaatttaagttaaaaagaataagtatgatttctacacatatatttaagtagtattcggtaacaattaaaaatttaattcctgattaattaatcaaaatcaatgaacaaatacaaaattttgttaagagaaattgaaaaaaaaaaa

SEQ ID NO: 61303 - DNA, 684 bp, Cannabis sativa
tgaactgtttttttgtcaaaataaaatttaataataatctgatctaaaagtgttatgacaaaactatttacattttctatatctattcgtgttatggattttcttcaagttggttgtattaaaaaaaaattatcaaaaattaagctcaaggtcctatttttaccattttggaaaatacagggtctattttgttatttagcaaaatagagggtccaatcgataacttttgcaaaacacatggtctaaaatagtatttacccttatttttaactaaatattttatatgttatttgaagagccatgcgtcagattaacttaagacatttggtgtgcagtgttccacacgtagcttagaccatttctaatagttgcaccattttgtgtatattcttttactaatttactacttttaagtacaacaactataataattaactttgttctagaacattcgagtctcgtctaagtttcttattgtaatattccgaaaatttaattatgaataattaggatttattatatgttatgaattaattaggtagtaatgagtaggattatgatcctgctaacttaatttaacataaattataaattttgctataaattgataaataagtgcaatttattaattacatatttgtttagaatatgtggatgtaatgtaagttatttgtgaaataaaaa

SEQ ID NO: 61304 - DNA, 1321 bp, Cannabis sativa
attaagctcatgattaatttttactgttataatcagatacatatagatagggtggtttccagaagtcaaagataataattattttctcactgttatattgccttttagtgatgttaaatatattgttttatataaatactatttggtttttattttttaatttggactattggtagggtactggtgctttaaaagacagggttgttgacctaattaactacgaatcatcaatgccaaattcatctatccgttaactatttttgaaacgatccataaataataaattataacagtttccagcccttctttaattatttgttgttttaatcatctttactgttctattgaattcgaattttgaattcttctctctctctctctgtataaattttgtttagactttataaattttactgcaagaaaagaaaggaaagaagaattaaaagtgttgaaaagtaggggtcagagaaaagaagaaaaacaaaaaaagtagagccacaaccatgtggcctaccatgatatatatttatattgacattgagtactatatgagtattgaattgatgacctagctaagctaactactataaatatagttgttactaatcaataaacacaacaagccaaataattactatatcaccataatttattaattagtgtgtgtatatatatagaatagcagaaattaataaatgcagactaattataacccataacacactttttgcgatttagttattaaccattaaagcattaacataaaaaaataacactattgcataattatgatttaatagacatatgatatacgaaagctatttttctttaaatacaatttatatgcgtacgtacaattgaagtaaagtaatgatgatactggggcttttcataaattaataagtgttgtttttgataaattatttgaattgttaatttaggaccgggttgttcatctgtggcatatggtgcatctgaagaaatagggccatttagaataaataaaaaagcctcaggactaaatctaaacaagttttcatggaacaccgtcgccaacctcttgttcttggaaactcccgccggtgttggcttttcttacaccaaccgctcctccgatctcttcgatactggagaccgccgcaccggtacgtaattaattaattaacatactattatttataaaagtatattattaataatatgataatttgcgatgaaattttcttatgttttaatttttatgttaaatttgtgaatattttttttttggtgaatatcccataattttacttttttatataaattagagggttagtgctaa

SEQ ID NO: 61305 - DNA, 871 bp, Cannabis sativa
gagaagaccctaggttggtccaattgtatgagttggatatgtgggttcagcttcatgatttgaagtatgggtttatgtcggattgggtggtaaaacatgctagtaattacattggaaagttcgttaagtcggaccccaaaaacttcattggaatatggttggattatcttagagttcgggttacaattgacatcaacaagcctcttaaacggcgtatgaaactgattaaaaaagatggtacttggatctggactacattcaagtatgaacatgtccctatattttgtttcatttgtggtctcattggccactcggatagattttgtccctggagatttgattccaattttgatcaaagtgttaagccttatggggaatggatgaaagctgctactaggaaaaagaactacctcataggtgcacaatggttgcgttcaggctgtgatgaggatgacagtgcggtggctggtaggggactgtccagaagcacggaggaggcgatggatattaattatccaattagaattcaatctgatggagataattctggtgtcaatgggggcggtaatcaagctcctaattgtggagtaaatcaagggaacacaaccatggcccttaatgaaagtcaagacaatgaagatgtacagttggaagatcaaaatgatgattctgtcattattttagataataagaggaggcgtactaataaggaaaatatgaaggagattgaagaagctgatagtaatatgggcagattggaaaatttgaatgatgtgccaaaaaacaattttcaggtgggccttggtgttcaggcccaccaatcattatgagcatattttcttggaatttccatgggcttgggaacccatgg

SEQ ID NO: 61306 - DNA, 1214 bp, Cannabis sativa
accaaatagtaagacagtatgttgtggcatgagtaagacttttatatttagcctctgtactagatctaaaaattttcctttggttcgtggaggcctaagagatgagattagaactcaagaaaatgcaaaaccctggagtgcttcttctgtcattagggtccaatgtccaatcaacatcaccaaatcttgttaaggatagagtaggtgctgttttgagatgtaagccatagtcaaattcaaatagccttagtattttcttgacaaatttctaatgttcctcaagaggggtttgcataaacgagaaaccttgttaacaacatagaaaatctaacgtcgctcttacaatactctgataaaagtacaaaaacgagtcccgggaagctctctgaagagcacccaactcccaggttgacatgtgaattggtgtgttctctgcttatccaattctagcttcgtctcgagcatataactatttttcctagtaaaagagagctacgacttgtgacaagtaaaattcacactttaattttgtaccatgtttgcaaagtggaatatctgaaaattagtcacaaatcgagaaatttcgagtctaccagattttgcagaaaagtggcatctccaaaaactagtgaacaacttcaccagaactaagaaagtgactaagtaaagtcaaattataacttaggcttcaaaattacaaatccaacacgtttttccactcatacaaaatccagattgacgttagaatgtcaacttaggcgttagatgtcaacatgggcaatgattgctgaacaactttcagtaaaacaaccataactctctaattattaacccaattaatgcgattcaacttgtgcttgaaagctcttttctatttcttttagacatgtcttaaaattattttgtaatttaaatatttcaagtcaaaaattcatcctcaagccaagtatgatttatgtctgcaaattaaatgcctaaaaatgatccaacagacgcgatttgagttccaaaaattgacaatcatcatccgaagtcatttaaccattatttttctattttctttttttcttttttttttccctttccttttcttttcttcttcttattcactaccaaaccctagcaaaccctaacaccaacaaccacccccgacccctttgtgcgacgtcgaccaaccccagcgaccaccacgaagaaagagagagagagagaga

SEQ ID NO: 61307 - DNA, 4795 bp, Cannabis sativa
tcaaacatgttctttttacctaccgaataagaatgttcaggatataaatctatacataaaaaaaccaatgtggtaattaagaaccttcgcaagttgccattacttattcaagatgtttcttgaaatagacgcccaattaattaagaggtgtatttttttgtaaggattaagaggtgtatttgaaaataaaaataataattactttgtttttatgtgtttcttcgtatgaagctaatgacaacatgtatacaactctattatttttatttttttaatttaagccttccaaaatcttaaatgacttgtcaaattattgactaattggtgtataataatttcatgaaatttataggttaagttttattttttcagtgcatatttattaggtcttatataataaggtcattagtcactcctcattaaatatagaaacacataatacacctacttctttatttaaattaccgaaaagggattatgtaagtctccgagccaaaaatagtacccatcaatctacatcaatcccacctacttgttttggcttcttttggtttaaattagaaaaggtgacaaaggtaagaaacatacattcattcactcttttcatggtaagaattaaaatagactttacattaccttattttcctataattacttgaatatgtatatgtatatatcaatgtagatacacctccacatgcaaaatttcttgaatgttgaactgaatcacatctaaagttaaaaaagaatcctcccaaataaatattttcatttagttgaggaaaaattggtaagcatctcaaagaaagttgattatccctattactactagtattaaacaaaagaaagttgtattgttcctttatgtaaacggcccatgtgggttggtgggcccaattataaaaaacaaaacaaaataaaataaaacggaatccacaaagacttgctttttaatttcttaatgacatgtacaccttgcaattatcaataacaattctccattattgcatctttcacaagagagaattttgatgaattatgggacccaaaacccaaaaggaagaactttcttccatacccttttgtttcttggcttgcttttttggacaaagacaccgaaatggtgggggtggtggtgggtttttttttttttttactttctttcttgaaattaaaaaaaaaaagaatatatatatttatataatttttatataataaggttgaaaggaatgaataattaggacccaaatggagccctatgaggtatgccttttcttcttcttgcactagaaggaggtggagaaggcgtggggggataaatgtcttgatgtgagccttcacgcaactcttcttcttcccttaataatcctcttcttgacgatataccttctcttcttcccatttcctcttcattctttccctctaaagtaaagtttgcatcaccatttctctttattcccacaagctacattcatatataattaaaaaaaaaactatattataaatttaatattacaaattttaagtcaatccaagaataacccataatttctataacatgggtgattcacattcacattcatattcacaatctcaatcgcattggttatatatacatttacattatatgcacaatcacatatgtggtggtggcttatgataatggtaattatcaatgtggtgggttacaatgacattgatggagatgggtttatagagagagttcataataaaattatttaagtgggtgaagatggtgataatgatgatcatgatgtatgagttttcaatacaaaaacggcgacgttttgattgtgataattttgtatttgtatatatagagagaaagagtagtagtactagtactcatccaattgaggtaataaggaaaaaataaaataaaataaaataaatgctaaccttacaaccaagtgaacaaaatcgaaacgggtccagtagacttctcccacagatttcacaaatgtgagccacgcccttaccggtcttaggctgaggtctctcgttgaggaacaaaaccctcgcactgtttatcacatatgtctgaaccccactaatatccaacactttctgaatctcagacactctcaccacatcgtgatacgaagatcgcctaatctgataaaaaaaaaaagtacagaaataaaacataaatcaaaaagtcaatgtaggggaagaaattcaaattcttgataatgtacaggactgatttcgttaattacgatacaataacaatatttactattattaaattgatatatctaatactttacctgaataacttgatgatctttatgccgggaggagcggcaatagaaccaaaaggcagtggctccgccgccaccgccgccgttgttgttgcaatccaaacagtacatgttacattcgcttctggcggcgtcaccgtgagtacggcaaacggtgaaaaacgacgtcgtcagtaatggctcaagccacggagggacgagcattttgttgtcctgttcagtgatcagtaatcgtacagtgcgtccaattagaaaagagagagaataaaaaatacaagcaggtgatgatgaaacgggaaagagaatttcaacgacattattaccataaggtattggaagagaatgaggaagaagtatttgttgtgtctgaaatgtaacggttttgataaaaattattctcttcctggaaatggcctcggattaatcaattcgccatttgtacggacagaaaaaagttgcagaggaaggaaagagaaatggttagagagagaaagaagaagagaagaaagaaaggggaagagaaagagagcctaaacgacttgtaacttagaattcaacaacaaaaacaaaggcttagactaggggacacgactcgtaaaacaaaaaaaaatgccgaagctatgatattggacggttgagatcttaggtagtggctggagtcaattatgaggcgttggattgagttttggacagggataggtgggtttggcgcttacgctactttttggatcttctttgcgtctctacgtaggctccagctcccacaaggtttagcccactaggctacgcataagccgattactccttccaattccctctttcgatgatcgccacgtggcatacggctaatatccactgtagatctattattaatcacccaaccccccatattttgggttttttctttttcctcttcttaatttttgaaaaattattaggctatgatatgaaaatttgagttggggacccaaatgaaagaaattgatcaatttcttcaaaatcattttcgagaaagaatcgttttatttttgtagttgaatatttcaataaagatctatacaaatttaattacattcaattaggtcattctcacatatccatttattctcatataaagtaagcatgtttttccattttaaaaaaaaaaaaaatatatataagcatgattttataataattaattatgtttattttttttatcaaaaatcaatacaaatagtaaatatatcttattttataatttcacccctagttgaaacaaattaaaccttaaaatctcttggtagccaatcatttctttacttttttttttttcttttcatatgtattaaagatataataactaatatggttgacgttttagcttggtcatgaaacgctccatatgcataatttttaggcagcatgtcatgtcggaagggatattttgattttattataataagaacttaaaaaagaagagacttaaataaataattaaattaattaatcttttaaatttatatttatattaagaaatagttttgattagataaacattatttttttttgcaaaattattgtggccggcaatactacttagttggtattaaaatggaatccagcattgcaattaaagaaccctttggaatcaaatttgtagtggcagagtcattaatatattgccaaaaatacttttaatgaattcatatgcaaatctttagtgctagcttttcttattatatacaataattaataattatgcattctcaatggctaatattcagtagtgtaaattatgtgtaatcttcagctattcaaaacttcctatattaatagatttaaaattaataattggataatacttggaaaatcattaatcatgactttagaatttagaaatggttgagttttatatgaattgaatattagaatgagattgctgtttttgtcataagtattgttattttgtttatttatttatttttttaaatggtcataagtatttttttagggtaaagaggtagcacaaactaaaaagaacaattgacggcgcaggcttcaccaccaatccagcagattgtttttcaaacagaagacttctttgccagtcatgagcaaccttatttgctgttagacagatgtgacgaaaaaagacattcgaaaggtaagaaagaagagcccttagctgagacatgagatctcaaaacacactacaacaatcttgttcattacctatatagatcatttataataattttacaatctgtttcgataaaatgtattggaaaatcttcattgcagaaccactgaagggcagtaattagagccttaagttcttgaatgtgagattcacctattctaggagaagggattacaatgatagcaatggttttcccattactgttacaaagaataccagtgaaacccgatctgaaaaactgtgtttttgcaaatgtcaattatatatacaaaaatgtaaaactgtatgcatttgcagaagcagaaagtaattctgttactgcagaaac

SEQ ID NO: 61308 - DNA, 1599 bp, Cannabis sativa
tccatttcatatgatacatcttcatccctccttcctagataggaaggactacttaaagtctgtcctacccctcatgatgcttttccctttgatcttttcaagcaaagtctaaccttgagtttttaaaaaacttcagccttccttcccgagctaaagtttgttacataaaaattcaacatgactcttgcatggacgttattttttgtgcaggaaagatcactaggggtacgatacatcctcagccctccttcccgaagaggaaggactacttgaagtctgtcctacccctcgtgatgcttttccctttgatcttttgaagcaaagtctaagcttgaatttttatacaacttcacccttccttatcagaagtcgaagcttgctacataaaaattcaacatgactctcccatgcacgttattttttgtgcagtaaagatcattggggatacaatacatcttcaaccctccttcccaaattggaaggaatacttgaactctgtcctaccccctatggtgctttctccttttgattttttcaagcaaagtctatgcttgaatttttatacaacttcagccttccttcccgtaagttgaagcttgtttcataaaaattaaccatgagtctcaaatgcacgtatttctcgtgcaggaaatatcaataagggtacgatacgtcttcaaccctccttcctggattggaaggacttcttgaaatctatctcacccctcgtgatgcttttgcctttgatcttttcaagtgaagtctaagcttgaatttttatacaacttcagccttccttcccggaagccgaagcttgttacataaaaatttaacatgactattgcatgcacgtatttctcatacaggaaagatcactgggggtacgatatgtcttcaaccctccttcccggattggaaggactgcttgaagtctatcttacccctcatgatgttttttcctttgatcttttcaggcaaagtctaagcttgaatttttatacaacttcatccttccttcgtggaagccgaagcttgttacataaaaattcaacatgagtctcacatgaacattgtttctcatgcaggaaagatcgctaggggtacgatacatcttcaaccctctttctcagattggaaggactgcatgaagtttgtcctacccctcgtgatgcttttccctttgttcttttcaagcgaagtctaagattaaatttttatacaacttcaaccttccttcccagaagcctaagcttgatacataaaaattcaacatgactctcgcatgcatatatttctcgtgcaggaaagatcactgtggtacgatacctcttcaaccctccttcctggattggaagaactacttaaagtctatcctaccccacgtgatgcttttccctttgatcttttcaagcgaagtctaagcttaaatttttatacaacttcagccttccttcccggaagccaaagcatgttacataaaaattcaacatgactcttgcatgcacgtatttcttgtccaggaaagatcattgggggtatgatacgtcttcaaccctccttcccaaattggaaggtctgcttaaagtctatcctacccct

SEQ ID NO: 61309 - DNA, 1003 bp, Cannabis sativa
  modified_base (834)..(839): a, c, t, g, unknown or other
aaagatattatttctacatgcttactaattttaattctaacttttaaattattaaagaaaatcaaaacaaataaattcaatgcaaagcgacatcaataatatggatcaacataaaatttattaacaagaaaaaccacaaagttttcaatctatttttttattattttacgagaattttttcatttgttcctctcagaaaaatacacatacatattgtatactatctataacaaattgtcatcaaattaataataataaaaaaaatactatcatcaacttattcaattcattataatgggatcaatcatgtctttatatatttttttttaaatatttatcaccattaatattaatgcaaaaaaaaaaattatcatcaaattattcattaatgggatcaataatgtcttttcatgttcttataaatatcacaattaaaaaatgcgcatacatattgtaaactgtgaaaaaaaataattcatcatcaaatcatattaatggggtgagggtgaatattaatcaaaatattgaaaacattgatctacttttttaatttatatgtataaaatgtttgtaaaaaaaatataatatacatataaataggaaaaattacatgtgttacttaataattagtattattgtcataaaaatttaaatgaaacaaaattaattactacactactttttttagagtaaatttactacgaataattgtaattaatataattcaattttattttttattacatttaatctacttaaaatctaactattatatatgagaattgtagtttttgtaagtatttgatgctatataaataacattattattattannnnnnttattattattattattaactattctacttcatcccaatcaatcaatatatatatatatatatattataaaagaaaacacaaaataagtataagtggcatcttagattttttttattctatttttaaaattttgtgaaatttttttattttgtttaaaaaataa

SEQ ID NO: 61310 - DNA, 1171 bp, Cannabis sativa
tttaacatagtattatataaaaatatgatatataatccaattaaatataatacaatacgacctaatacgacgttctaaacgagctcataattttataattaaaattttattatacctataactttaatttaaaattatttcacttaattatttagttttttttttatttaaataggtggaatggaatgtattttccaaaaaaaaaatgctaaactcctccctcctttcttttttggataatgagacatttattgaaaaaaccaaactagagttaaaaaaaaataaagtcaagctcccccagaaaataaagcaacctcaaactcgaaaagaaaaactcctccctccttgcttcgacttgttttgtacaaacattgaaggaacctttcacacttgaagacccttcgttagtaatcccctatatatatacatattaagttttcagaaaaatctgaaagcaatttctaatttcaaagaaacaaaaatcaaacatcaaaaatagagaaatttatcttcgtcgctctctgctccccactgctttctctgatttttgtcgctgtcttcaatttctcaacaacacaataagtctcagtagtcttagtagccatggcaggtaagttactccaaccctcactctatgtatcataatagttttaattttttttctgtttttttttatgtcactctttctcttaattaacttttgttttttgtttttaattttgcattgcaataatggtaatagtggtctagaagtatctagctcttaagttttgtctcttgctttgaattgattactgaagcttgaaatttatgtcgatactataacgagagaaaagttttgatttctttcatcactcgctctgaattgattctaaagcttgaaatttcaggaagatgtgcttgaattattgctataaaggtaagtatgtacgcacaacgataatgattatcatctttttcatagatttataaaatttatgtatattattaaccctagtttgtgctaataatttgaacaacgtagtgtcttttaattaaaattgaagaagaaaaagttatattaatagtattaaatgtaatttacccaaaggtttaaaagtgttgtaagactgaagaacaaaacggtgtagtattgtaggcataattattactctagtccaatggtatttga

SEQ ID NO: 61311 - DNA, 2220 bp, Cannabis sativa
ttttttttttttttgataaatacgatcaatgcgtttctctatatcgttcaaaacagcctaacgatcgaaattaggatcctgatcataagatttagacaacattagcagagaagatacagcgcttttcattttcttatcttcgtttgaatggtacttcatatggccccccaaactctgtttacgttcaaatgttcttgggcaaagagcacaactataaaccttattcttcgattcctccttctgtacacgatctttatcggcaggtcctttgtttttgtgtgttctcacgtggccacccaaagctcttccagtctcaaatgtagatcgagtgcgtttgttatttttcttagtttctttccccttttcctgttcttcatgatgttcttctagacagtagtcttcgtcttggttttcttcatcagatgatgaacttttaggttgaacagaggttggatcttggctttctttattcatgattcttgaggaggaggagatatacgatctctttgagtagtaatatttagtgaactctacctaaaacccttatagcaacaaagtgagacaaacttattattattattgttattgttatatatatagaagaattccaaatattcttgaagtacatagacacaatgaaatgtcagcatccgaaactattaagacatattccaatcatattctatgttacataagacatactaaatcacaatcttctttttttacatataactcacaaattacacgtaacacaaaaaaaaaatcattttttcattaacaaattcaataaaaataatttatttaattaactaaatgtgataattaaaaaaaattaaaacaaaaaatatatatttacatgaaatacttctcaatgggcaatacccattgacggttactaaatgtttacccggaatttagccatgatcacatgaacatcattttatttgacacgtatcaagaaggaaaatatttttttgtagtagtattactcatagttgtcaatcgtgggaagagccctaggccctgcgcccaagttaacatcatgggctccagaatgggtgctcagatcccaccatgtcatttccaataccatcctttaatatttcgcgccaacaagtctagaagactctgagtcttaaccttggaaactcacatatgtcaattttgcatctcagaagtcaacccaggcacttagggtttcacccagtccctaagttgacatttggccctagggttttagtttctggtcccatcttagtgcaaaccatgggaactttttaattagacatgaataagacatgccacaaatatgaaagaggcatcaaaattaactttggaacactttgaagttggagcactggagcacccgatgcccaggttcacatggagctgttctagagcctaagttgatatattttcaacatggggcacttcaaagcctacttctaaagatgttttttaggcgctttctctgtctacctccataatgaaaatacaagtgctttggggaaacaaacagagcctcactatgactagctaaactgtggtcgcgaccactgtaatgctaaaattcgagcctctctgccacatcctctagtcgcaaccatataattagtcacgactacagtgtttgtggtcgcgaccaatgaagcatatggaaaaaatattttttttgacaacacttttcacgctttgcacaattcttaacattacaaagaaaatacttgaacaatttttaaataacaaaagaaaaataaataaaattgaaattgtctcaaactaattaaaataattgtaaaagcttggggtgcctcccaaaagcgattaatttaacgtctctatccagacgctcaacctcattactgcttcaaattggataaagtccactttttgcatctactagagccctcgtatcaaatgaataaaattgtcctccaatattactaatgttggagctatccacaagattaaattcaccttcataatttccacacactagtctttttaaacgacgtttaaaattgctctttaggcttcctttatttgtacctacttatacatgggaatcattcaccaactcaatcttacaataggtaggaatgttagttgcagcaaaaatattgaaactcattttttcatcttgcactcgcaatgttaactctctcttttgtacatctattaatgctcgctccgtgaccaagaatggtcttccaaaaataa

SEQ ID NO: 61312 - DNA, 738 bp, Cannabis sativa
gtttctttgtcgttgattgggtttctaaattgtatttttctgggacaaatttgtccctgtcgtttctaactgtaaaattgagttggtgtaggttaaacttggaatttcaccaagccaaattcctacaagggagatgagcttgaggctaagagggggtagcctttggagtaacccaattcttgtcaaacctgtaatgacaaatcactgttgtatggtcatatttcatacaaacttgacataatgagcgactgagattaggattaggaggtttggaatatccacgaaccggaacctgtcagagttgttataagaatgatatggaccatttcttgaaccaaaagtcaaattaacatacatcttagtagaaagatttatcatggagttgtgatgttctagacaagtctcatgtgacatgagaagagcgtgaacttcttcaaaagataagttgtcactttaagttgtaatactcgagaccacatcatcaaacttaggaccaagactattgaataaatgcaagataaaatcaaaattactaatagggtgatcaactacagctaaagaatcacatagagtcttgattttgttaatatagtcaaatatttgtacctttttaaattgtggacaattgacttttgagttggagccattggactttagattgactacaaaatttttgcagaagagttgttcaaatagagttggagctggtgcaatgtgagatagcgccaagaatacttt

SEQ ID NO: 61313 - DNA, 1267 bp, Cannabis sativa
tgtataaatgttgattgggccgacccatagtaatattgtaatattttaccctttttggaattttcctgtttttttcccttttatttttaatagataattttcttttaataataacatgtaattagataatataattttaatattaatgtatagggatatgattttgttccgttattgcactttcacggattgtagtccgtgatgtacgacagatgtcagatgagagagttatttgatctgatggctgagattaatctaggggtaattagggttaaaaagtagaaacgtatcctgacacccatttaatgtacactgagactcatttaatgtaccacaaaatacattccgtgaaagtacatcatgagacaaaatcgtgtcccttaatatatattataattaattttttatgttattatttattatattaataaataattatttttattaaaatactaaaaaaaattaaactcaccacgactatattgcttagttaatactgaaagtagtttgcagtataaatatctaagtttaactttcagttacaaataaatagctagattatttttagattatttttagcggtaataatacctaagttatatttttagaactttgtatatactagatgagatttacgtggcaagccacgtaaatattagttttatataaattttagtggtttttgtttaagaatttagtaactaagcaacgacaataataatagtagatagatctatttaaaattttcatatttgtaaagattatttcgtaaaacctcaatgttgtttataaccagttttggctgcccaacatgatacaaaacatcagacgatcaaaattcaaggaaaataggcaagcactaatctgaacaatacaaattcattcaaattagcattgcttattctccttcctcttcatccaaattgttcaaacaagcattgagaattatgatataaatcaaatctagccaaacggggttacttatattacctgaaaatgatcaatttcagcaaccattgacaacaattccaacaagaggcaaagccagtcagtacacgagttagctaaagaccttgaaaacccacctgtctgattcaaatgggcaatggcattggctctccaatcttgctgaaccttaataacctcctttgccaatctcagagccacaactgcctccctatagtaggaagcctcttctatggacaaactcttcactttctcgtccaaactcaaaaccccatcaatctctttggcattatatcgagca

SEQ ID NO: 61314 - DNA, 3354 bp, Cannabis sativa
  modified_base (1441)..(1445): a, c, t, g, unknown or other
tgtttgaaccctattttcggcacgttaaataactataacgtacataaccatgagaaaaaatttgattaaaaaattattttgggtactaaaatagatagaggtgcatcgccgcattataatattaagagtaaataacggcataagtacttaaaattttaagtttgtaagccgcataaactcaatatttatttttaccgatataagtattgtaaaattgtaatttttttccaattttgtcaatacaaaactctattttgaattttttaaaagaatatttgaaagtaattgatactatatatttttgtctagatccaatgatctagaatctgaactttatatgtgtcttgtttaagacaataatatagtctatacatactgacaaaattagagaaaaattacacatgccgctatacaaataaacatttagtttataacactaaacttaaaattttaggttataccaccattaaacctaatattaagaatgaataagtaagtctcccaaaaaaacaaaagttataataagtaggtcgaagagtagattccatctacatagactacacatattattgtagtagctagataaccatattattattcttaaaagagaaattaattaaattaaatattgacatgtcacatgtgttaattaattagctggttacccaactaggtgtgttactaatcccaatttagaaatcaataaaataaatatatttttaaattataaattctaaattaagactgaaatgatacgtgcaaaaaagataaatatactattttaatactttgttatttttgtcttaattatatccaacttattcattaaaaacattaataaaaattataacaaacttatttgtacgtttaattaatgcaccatttataatatggtaaatcagtccaaaattatatatttttattccattagtttttataaacaaaaatttgtaaacatgttttaattaaattatttcatttataattttttaacaaatataaaataaaatatagaataggtggaaaggtacaactttaatcttatttactgtgcatatatacatggtattaaaatagtatatattaactatgctacaaattaacaatagtactatagaggatactatactttgtgaaaaaattaaaaactatagagaatacaataatgaataatgtattaaaatatcatagggtactatgcaactctcttaaaaggatacactgatgtactttttatttatttaatttttaatttatttttttctgtatacgttatagttaagacatcttataattttttttaaaaaattcagaataatttataatagaaaaaatagtattcaaataatttatttcacatatgcataataaaaaagttacgcgtgcgactgactgtttgaattatgtttttagtatattaattttttttttgaattttttnnnnntttacaagatatcttaaataactacaatatatataatcatgaaaaaaaattaaactaaaaaattctaccgaataccaaaataaataatttagagaacgtattgtagaattttgtaatagtatattaaaaaaatatactagaatgacatagacaaatgaaaaattggacattttggttaattaatgcatgaatgaagtgtctcaatcaaaatataataatctcatatgatattgctagctttttatttatatttttagttaatgtaaggttattggtcacatgcataaagagttagaaataacagccacagatctcagctgctatattgtcattattttgaaacacctttaaaattattttaactgatcatcccacacatatattattaaattaaaaaaaaatataatatacaataagtaggacaataaaatcaaagaatactagaagatattttatgtggctcttaagaacaaaatatatcatttttctttaaaataatattgaaagagaataagagcataattgtttactaaagtaaaagatataaataataatactcaattttcagatactaaatcttgaatagtttacaaaatatataaccaaatttctatatgagtaaatatgtgggagacaacaacaattctattccaaatatataaataaataaaaaagctcataagactctatcttaggtgaatggtttaatttaacaaaataattaattaatttattgaaagtcaaatcacatgaaatcacaaaccaatttagtcttaaaagaataacaaataaaatacgcaaaagatttaaccaattgatttgtgaaacacccctacacaacaagcaacttttaactcatgaatattcaaaaaaattaatttgctaaagaattttaagaaatagatataatatatatatagggatatgattttgtcctgtgatgtactttcacggaatgtattccgcggtacattagatgtgtctcagggtacattaaatgagtgtcagggtacgtttctactttttaatcctaattacccctaaatcaatctcagccgtcagatcaaataattctctcatctaacggctgccgtacatcacggattacaatccgtgaaagtataataataggacaaaatcatgtccctatatatatatcgagttttatataagatggataaaagttataatttcaagaagaaaaaaataaagcaatattaattaaagaccgcaacaagaaataaaagtatgactttattatttatatatacacaaattaggaatctataaaagtaagtgcaaacggaaagtaagattattactttatttattttttaaagtttcaaagtagtaagcaattattaattaaatataccaaaatctaaaaaaatatgacacaataaatggttcccaattttattttatttttctgtttaaaaaaaacaatcaaaataataactagttactagtttgtaacagaactgaacgggaaaatgttagaacactcaacactgtgcactaaaaaaaatgacaaatttatcacatgttggcatacgtactatacattatgtccaaaaaatatgagttaataaattaatgagttgactatttttgcattgtgattagctaattatattctttaaaaaaattattacataaaattacatgtgatgcgctacataattagatcaataacaatattaacacgtaagagatgctaagcatcgattatctcttttaacatttttcttattattaataagaaacaagtagtgttcgacatctttcataagtgacacttcacaattagttagtgatattgcttaaaagctattttttttaagttatatgagagtcgatacttaattacaccaataacagtatgtaacgtccccgcttcaagcctcca

SEQ ID NO: 61315 - DNA, 750 bp, Cannabis sativa
tgtcgaaagcctaatgtatgcttaagtgtatactagacctgatattacttattctattagagttttagagagatttcaaattaactcgaggatagaccactggaaagctacaaacaaggttatgaggtactttcagggtactaaggattacaaacttatgtttaaatgaaccgacaatctataagtagtcggctactcagattcaaattttgctagttgtgtcaattcacgtaaatcaacgtctagttacatgtttatgtttgcttgtggagttgtatcatagaagactaacaaacaaaccaagactgctacctctactatggaggttgagttagtttcatgttttgagactacatctcatggtgtatggctaaagagtttcatttcaggccttagtgttatcaagatcataaagaatgttctgtgacaattcaaatgttatttttttggctaataacaatgaaagtagaagccgaagaaagaatatctacattaagtacttagctattggagaacatgttaaaaaaataaagtggtcattcaacacattatcactgaattaatgtttgcaaatccaatgacaaaaggcttgccacctcataaatttaaggatcatgtagagagcatgggacttggttttcatttgtaatttgtaaaaataaaattattattaatgaaactcttatttttatatattctcatatttatgtgcatcttactttttacttgagaaaattttagaggaccaga

SEQ ID NO: 61316 - DNA, 710 bp, Cannabis sativa
tgaccttgctgctataagtaatcgagggttgtgagaggcctatgggttgtaagaggcctcgctgctgcgagtggccaagggttgcgagaggattcactactatgagtggttgagggttgcaagaggcatcactgctatgagaggtctttgtgagtgattgaaggttgcgagaggcctcactgctacgagaggctttgctgctgcaagggtcgagggctgcgagaggcacacatgcatgatgtcgagaggcatgcatgcaaggtcccaccgaacgaccccattgtgacttactccaggagtgaactttgttatataagtgaaagatgaggaattgttgtggaaatttgcccaggagttgagcacccattcactcacacggtcgaagctagcttggacgtcataatcctcgtctggttaagggtagagaagtttgaggtttagtaactttgcgtccggaaaatgggttgaatgaagttctaagaaatgttggatcaaggagttgaaaagttcttgcattcaccggtggaaacgagcgcaagagcaaagttttttcttgggataaaagctctagttcgaattttgaaaataaggattttgaaaagtctaaaatggtaaagaagaggaagtgggtttgatagatctattgatagtctgaccaaggccatacagttcaaaatgaatggtctagatggaatttaatatctgcttag

SEQ ID NO: 61317 - DNA, 934 bp, Cannabis sativa
cagcaaaccagtttctaaggcaccatacagaatggctctgacagaggttaaagaattgaagattcagctttaggggttgcatgacctagggttttcacagcctagtgtgtcaccctgaggagctcccgtactgtttgttaagaagaaaaacggatccctacgcatgtgtattgactaccagaaactgaataaatagactatcaagaacaagtatcatttacttaggatcgaggaccttttcgatcaacttgaggggaaggcagtcttctctaagattgatcttcgattaggctattatcaattgagaatctgagaggaggacattctaaagactactttccgcactaggtataggcactatgaatttttggttatgttctttggactaaccaacgctccagcagcttttatggatctaatgaatagggtattcaaggatgtcctcgatatctgtgttattgtatttatctaaaacatccttgtgtactctcaatcagaagaggagcataagcaacatcttcggatggttttgtagtgactacgagaacataaactatatgccaagttcaaaaggtgcgagttttggctatctcaggtgtcttgtcttggacacattatcagtaaagatggaatcaaggtggatccagggaagattgaatctgttagggattggccgagactgaaaacaattacaggagttagaagtttcctgggtctggctggttattatcgtcggtttgtttagggattttctaagatctcaacacccttaaccgaactcactaataagaatcagtggtttttgtggacagacaagtgtgacgcaacccatttcaatataatcctatatgttattaatagaagactagaagtcatttatatttacatgtattattcatgtttatggtttaatatacaatttttattaaatcca

SEQ ID NO: 61318 - DNA, 1003 bp, Cannabis sativa
tattacaatacatgttatatgctaaaatttgaacttcatcacatgcaatgaattaaaagaaaaaaaaagaaggaaatattagggaaagagcatcaaaacaggttatgggacaaaatcttcatggccactattcattcattcccttcaagtgtaaagtccgtgacttaaaactagaagttggtgtatctttttctttctggtatgattaatatcagaatcacccataaatttcatgacccaaagtattcatgagtcatggccactccctttttcaatctttctcaacttcaaagatttcacataaattatatgacctcaaatggtttgtatttggtacacaattttctagaatatgtgtctagtttctttcccttattcaattccataaccaaatatttcatctttttgttcaatacatatcaatccacaacaagaaaacgaaactctgtctaaccaaattgaacaacataaaataccattttgtaagaaagaaaaaaaaaataatttacaaactagttatgtggtggaacttccttcacatgggtccacgttgcctctttcctaacttttgcttatttgcaatgtatttccaatcttctacgacattattatcattttttttaataataaaaatcactaaaaagtcataataaagtaattatggttgatatggaaacgatttgggttatacttattcagataatgaatacataataatcctttgttatataaaaaaaatgaattcattctctgctctgtttcagtaagtttttcaggggaccccaggttttgtctttctccaaccgccattcaaaacatctgaaatcccggattaccaaaacaaaaacgacgtcgtttcgtacctttttccacctttaaattttaatactgttcttattcaatatcaattactatatttctttgtttgatgagatcgtgccagccaccttgagaagcctaaaaagagaaaaattcaaagaaagaaaagctagtcatttcatat

SEQ ID NO: 61319 - DNA, 1048 bp, Cannabis sativa
gcttaaaacccgcctctaaagggtgtttttgtagtagtaactgaatagagaaacattcatgtattaaaattaaaatagtatatgtagtaactcataaattacttttctgttttttaaattggtcttgtattgcttttaaagcaatgataatagggtttttttttttttttttattatttaagcgtttatctattacaacatgttttatctggactcgaacccaggacctccaacactcacacacacatctatggctacttgagctagcctcaagtggttatagttttttagaagttaattataatatatagtttattatttatttatttatattttatccaaacagagttttatgtatgtatatataaatatgtggtcttgcacttattacatttctatttgaatgccaataacaattcttgtagcagtagaattgactctggctctgcgctttgccatttcttaaaaatattactatattatgcttaataactttaacaaagaaaataaaaaaatttcttacacatttaatgaatttatcaaaaggatcaattattaattatagtatacaagactctttcattttcattatagaaatggtccaaacttaataaatgatatgatttgaatataaatcatatgacattattattaaagaaagctaaagtcttttatgctttggatataagaaagtaggaagatcacttggaaattggaagggtaaataggagaaattttagtaatgaaaataagattgattagagatactagattgtaaagagtacgaaatatgttctaaaaataccgaattttgaggaggatagagaaaacaacattaattgaataggactattatgatatatgtattgtatgtacgtacttttgtttttgcacttttagctattcgaccaaatatacaatttttcatatcactacttttattcataatgcaacttttcaattgtggtagtatcttttgcagaaattgcttgaacgctagcttggaattggtaagctactcaaactttttgttttgttttgttttgtt

SEQ ID NO: 61320 - DNA, 576 bp, Cannabis sativa
ttagttttactcataaaaggcaaacgatatgcttggacccagaaaggtgagaaagtcataatttcaggagaaacattcagcaacattgttggttgtaagagaacaatgtgatgattttgaaaatgtcatggttccttatccaaagcccgtagaagatcaccttcacaaccaaaataaagaagaaacaaatcagagtgatgttccttaatattcactttgaaacggccctcccaatgctctgcaatttgcctttgaaaagtactcaaccatactttcttattagtcagaattcttgccacaagaataaactcatgagattcctcaacttcagttccatcatcagtaatggaaagaacaacactctcatttttagtaagagatattttagacttcattttatcaacataaggattcatactgacagaaactcaatcaaaacaaagaaaggagaacaagaattgaatgaagaaatgaaattcgaacaagaaagaagaagaaaactgaaagaaatgaacacaaccgcaaatgaaatatcacaaccgcaagggaactgacactaactgccacagagcatga

SEQ ID NO: 61321 - DNA, 623 bp, Cannabis sativa
tattctagaagcacctcctctaagaagatctgaatgacaaaagaaatcaataaggtgtgatgataactttgtttaccttggagaatgagaatatgatattggtcattttgtggatcctcccacttaagtgaagcacttaatagtccatattttttaaaataaatagaaactatggatgatgagattaagtcgatggagaaaaataatgtatgggagtcagttctattacctaatggttttaaaccaataggttgtaagtggattttaagaactaaaaagggatagattgaaaggtataaaacacgtttagtggaaaaagacttttctcaaagagagggtaatgattacactaaaattttctttcctgtttcaactaaagattcattcagaattattatggcttaagtttcacattttgatctagagttgcatcaaatggatgttaaaattacttttctgaatgaagaattgagtgagctagtttatatgtcttaacctgaaggctttaagaaaaatggaaatgacaatttggtttgcaaactgaaatgatccatctatggtctcaaaaaggcatcttgccagtggtacttgaagtttgacatgttgtgacattgtttgtcgtt

SEQ ID NO: 61322 - DNA, 1017 bp, Cannabis sativa
gtaaaacccttcacaacaaaattttgcttgccaaggtaaggcactacagtactcaccttctatatagcaacgattacttggaatgagagtaacactatgtgctaccctagtcccatagcacagccccatgttattaaccattgttattatcacaacaaatagaactattgacctcttcatcatcatcatcatcattagctatatataaatatatgtgtttctatgttttcttttcttgatgatatatgtatttagacaagtgtatttataggagaaattatagctactagctactatctaaaaaaagatagaaataaagaaataatgatacaactactacttgggtgtgtaataatgaagataataacaatttccaactactcatagtaaattaatatattactactacaatatttttttcatttaactaattttttgagctagtgatgttagaattctttataatatgtaatatcaagattattattttatatatatatatatattcgagtcttatattttgtataataattaatatatatatattcaataataaataatgtgttatattttactttttgtgaaacttatttgatatttttatacacttaaatttataatatgtgtttatatttttccagtatattagtattatttttataatgttttaagttatattttgtataataatgagtatattgaacaataaataatatgtaatattttaatttttatgtaatttattattttatacatttaaatttttaaaaaagctttatttttacattatgagatttttcgtcctgtccccaccctattagaggattctatgccctgccccgatggggacaaggggaacactccctaccgatttcttgctccatgtgcatccctatgtataacatcaatattattctaaaattactctaagtatttaagggttatctaaaaaaaaaaaacaaaattcttataaaagtaggttaaaagcatacaattataccaaaaattatatacttg

SEQ ID NO: 61323 - DNA, 1334 bp, Cannabis sativa
  modified_base (585)..(585): a, c, t, g, unknown or other
ttggcatttatagggttgaaaatgtaaaaagtggtatttatgaaaaatagataaaatagttgagaaaaatgacaaagcccaaaccaatgtggggcccattaggtggccgaccataatgtgcttattttgctctattttatcaattttttattacaaataattcaaccttaaccctattgaagatagtataaaaggaaggctatggtctcttcatccaaactaatgtctccaaagctaaaaacctagctttttgatgagacctcttcttcttcttcctcttgaatttttgaaaatacttagccttttttcacaaatattattcagccattagtgatagagtgagtgcccacacacataaagttggcctcaatcatagtatgtaagactgtgaagaatccaaacacaaggaaggagaatcgggcttggatcttggtgatactttgctacagaaaggatacaagtgttagagatctaagtgaaatgagtcatttaatttcgccgcgcccactataatgtttctcataacttttatgtgtttaaattacattgttttagaaattcatattaggttgttaaaaacatacntggtagtaaatctagatcctgataaaataattccaacacttccttgattgatatgattgttcatgatggagtcgtcacttacatccttgattatcgtgtaattgctaaaagattggtttatggcgtctgacacgtcctctcatacgcgttcctagacgcttcctcgatgctagctgacagttcacttccggtaccacaaatttggaagagttaaacgctatccagctcgtggagataaagtgaagtaggaccccttaggacttggacctagctcccggaatagttactgaatcatctcgaggggattggcctaagtgattattcttctttaattatatctgggtctgagagcctaacctgccacgtttcccataacgagatggccacgtatattgggagaaaatcgggacaacaaattgaaacatagtaaatgataaatatctattgttatatatttgataataatgaaaaaatatttataatatttattatatgtgaggaaaaaaattttaaaaaatattacgagtaatttttaaaaattatttaagagtacatttatcattttatggggtgtaaataaaactcccacccctattagaataaactattgagaaaatttttattcattctctcattctcttcatctctttgtcttttctcttgtcctatttctttctctattttttgaaattatcccaaaaaatatattgcccaacttttacaaagtattgataaaaaagccataaaaa

SEQ ID NO: 61324 - DNA, 969 bp, Cannabis sativa
acaattattaaaaacctattaaaaaccggtttcaatacaaaacataaaacatactttagctttacgtgaatttttttttggtcgccctttagcctttgtagcaggctcaatcttttcaacaatggatgggactttagaatctgattcactctccatctgataaaaaacaaactacaaaataaacattagacacaaacaacaaaaacaatcatgataattaacatgaaaaccagtttcacacaaactaatagtaacacacctcaaccttaaccttaaaaccacccacacaccaaaaatcaccgaatgcacacataacacaaatcaatctctagaaactgatttttgacatgtttcaaaataggtatgatcaaagaagttttcaaaaaggtatgataaagttaaaaaaaaaacacattttcaatatgtgcattattttgcaacctgaactttaaaacccctcacaaaccaaaaatctgagaatcccaaacaatccctgcatcaattctaactaatttttaaaactgctaccaaaatatagaaactggttttccatatgatatttattttgtaacctcaaacctcaaatccactcccacacccaaaaaaaaaggcagtaatgcccaaacaaccaaaatatagaaactggttttccatatgatcatcactggtaacaccaccataaactacaaaaactcaaccatgacaaccattaaaaccattatcaaaaacaaccaaaaaaaaaaaaaaaacaaataaacacgaactatatactaaaaatgaaaactcaaactgaaactgaaatgcttaatacatatacccaaattaaaatcaataaaatgctgaaaccgaaacaaaagagtgtatgagtaaataaatggattataaattgaaaagtgagtaaaatccccctttaaaccaataccaatgccaaaaatctcataacacaaaaatggaatgtctttaacttta

SEQ ID NO: 61325 - DNA, 758 bp, Cannabis sativa
  modified_base (661)..(668): a, c, t, g, unknown or other
ttttctaaaaagatgcaaaaaactattttcttcattttgaaactgacacaaaaaataaatgttctttataacattctgcgtcaatttagaagtgacacaaaaaagctttgtgccattttaaaactgacacaaaatacttataccatcggttcttaaatcaccttttgcaaatatttttttttttcacttattacgtcggttataaaatgaagcataggtgtaggtaaggaaaaattacaaattttcatgcaatttttcctacttgtacttttcagattttagaatcgtttatataaaactaactataactaaatacacgatcgaaaaaaaagtaaagaattataattaaataagtcatgtaattactaaataagtaagaaaaattatccccaaaaaattaaccagctaatttttgcattaatacataaaattatataatttttgctaatttttgcattataattaaaatattatttctaagaaaataaacctgcataacaaagtgtaagttcaaccaacgttagtgataaaaagatacaacattaagtaaaactgaaacaaggtaaaaagaaaaaaaaataccaataatgtagaaaatactttagtacatgaagaaaataatatacatgtaatggcaaggggtgttcatccgatccaatcnnnnnnnntttggtcaaacaacatccaatccggactaagtgcggatttcatattttggatccaatccaatccgcataagagtttaaatccaatccaat

SEQ ID NO: 61326 - DNA, 1320 bp, Cannabis sativa
aggaaaataaaatagtaattgaaaagaaaaggaaagggatttagttaaaaaagtacatatttgtaataattaattattattattattattattattaaataacataccaggtttgaatgtctctccctcccctgcgctgtacccaactctttctttctcaaaccacacacacacattctcaatttctctctcttcaccttcccaagatctgctttcttccctaaaaataatttggaatctaagaaagagaagaatagagaattcaataaaatgggggcttacagaacggacgacgactatgactatcttttcaaggtggttttgataggagactccggcgtcggaaaatcgaatctgttgtctcgcttcacccgaaacgagttcagcctcgaatccaagtccaccattggtgtcgagttcgctactcgcagtattcaggtcgacgataaggtcgtcaaggcccagatttgggacaccgctggtcaggaaaggtatcatcctattcctaattatctctctctatatatatttaatacatatatatccctgtgtgtgcgcgatcaaaacggtatgtctgtttcgttgtattcttgaagaatttgatggttgagaaatcgcaggctttccattttacgaactgggtcgttagagtagagatttgtctttataccgtgtgaagtctgattttgaattttaatcgcatagtggtttgtagttatatatatatatatatatattcacgttaccattttgtttaaggattctggatttttgattgtttatttgtgatttttaattctagaattattgtttttccatcagctagatcttgtcacctgatatgctactattcaattaatattgataaagttgctttgtattggggtattaacgtgaggaaatctttgaactttctcgtatttatgcttaagatggctgaaaaaaagactagctagtttgtactctagcttgaaatgtcaggtttgtttactcatgaaggttaggtaggttgagtggtcatacaattaatatgttgtagttactttttttaaacggagaaaccgtatgatgaagacattgattggaccaacgttattagatttgttgaattaatttccttcttttggtgaaaattgttgggatagatttataacagacacaaagaagctctaatttagttgacatacgttataaacattatgcacttttgttaaactgtgtaacaaattcaattagttacttttttctgtgcatatacttttgctatccttttttcttacttgctgtaaaatgatcaatcaactacaaatagcaagattg

SEQ ID NO: 61327 - DNA, 696 bp, Cannabis sativa
ttattattttaaaaaatatagaaattttgtatggaaaatttagtttagtaatgtaaaacatggtgttttaatataccatctaattaaaaataatatatttatacgtttaatatattttcctcctaaaatactcttacatttaaaaaaaaagaaaaaaacttctctctctaactctctcactctccgacgttgaactctgacctagaatccctgtcgtcgaacacaaacccaaaacctcagtcacaagcccctgtcaccgtgttctttcacggcctctctcattttttgcgttttttttcttctaattttctagttttttacgataatttacgatatttagcaatgtatttacaatgatatgcaaaatttgaggttagagataaagtttagcgatatttgacgaagttttacatatttagcgatgtttagcaataatattagtgatgtatttgtgatatgagactaaaaaatgcatagtacatcactaaacatcgctagttatcgtgaaaacttgagtgtgatttcgcgatatttagcgatgtgtttagcgttgttgtaaattaaagacatttagcgatgtttggcgatatagtaatacttcgcgatatcgtgaaaaattagaaaaaaaaaaaaaaaaaaaaagagagaaaacgagcgagttgagaactccagatgggtagggggtttcgaggtggt

SEQ ID NO: 61328 - DNA, 732 bp, Cannabis sativa
attctttattaattttataaaatttttttatatatatttaaaaataaaaattatttagatattttatataagaaaatttaatttaaatttaataaacttagatattttaaaccacattttaactttattagtttaatttaaattaaaataaaagataattccaagtcgtaatagctaaaaaaaacctgaaagattaaaatctcaaactcaatttcaaaaattaaaaaaaaatattacctaattaaaaaaaattaaatatatatattgcacttaacatcgcctatttacacctaataaaaagaaaactaattatatgcgcataatattaattttaaacttacttaaaaaaaaaactaattatacgtgatattaaaaaaatataagagaagaagaaaagaaaagttaccttactatctttagtgaataaaaaataaaaatatctaattttgtatttgattgatactcactcaaattttatatatataaatttttatatatttaactaatagtgtcttttttcaattatatatataaatatttataaacttaataagaaattaaaaaatatataaaaaaaaaaagagatcataaattgatgtattttaagtgattttatataaaaattgatccatatctaaaaaattaaagaatgaatgatgaaatattaaaaattgacaaatttataaagaactcactcaaaattaaagaatatctaaactcaaaaaattaaga

SEQ ID NO: 61329 - DNA, 1011 bp, Cannabis sativa
gtggcgaacgaccaccttgaaacaatcaaactattactttcagtcgttgattgtgaactcttgtgcacgacttgggatgaagaagggagaaaccctcttcctctcgctgccatgagatggcgaattgatgtgttgagggagctactcaaagtagctcctaaggctagtgaagtcggtttgaagggtcaaagtgggaccattttacatgtttgtgtcaggcataatgatcagttggaagctatgaaacttttgatggatgttatagatgattaccagtttgtgaatgctaaagatgattatggtatgactagtttgcatttggcagtaacaaataaacaaattgaggtatgtaacttagactattttaattaatggacatacataatgttcagtgcattttgttaggaataatcaaattgaatgaatgaaaattagaaattgattttaattttattctttttattctattgtattactattctcatttctatttttttgtgctcattcctattacaatttgaatcattaactagttttgttttacttctctttattcatacggtaaaatttttgcttacaaatactaaaattgaagttgatgcggtcaatgcaaacatgtacactgcgctggacattttagcacaatgtcagagaagcgagaaagactttaacattgtagaatctcttcgatcttatggagcttcacgaaccatagatcaacctgtacctatgaaaaggcctgtcattcgagatgccatagctagccatgagattcgtcatgatcatgttcataaaatacaaaaaattcaggaggacaacaataaagaaacaaaaaatccagaaaattggctagccagaaagagggaatcgttaatgattgtttcatcccttattgccactatggcttttcaagccggaataagtcctcaaggcggtctttgggaagatcacggcaccctcatatgaccagtcaatttctaaaaatgtgacccactctgcaggagagtcaat

SEQ ID NO: 61330 - DNA, 2278 bp, Cannabis sativa
ttttaaaaaaaaaaactaaaactaaaaaaatgttatgtttacttaaacaaatttatatttttttttaaaaaaatagactaagtttgttcccgtaaaatttaaattttacaaaaaatgaattttaaatatgttttttttaatatctaaatgaattttttaataaaaagaaaataattttttaaatcgcttaattaattttaaaattttaattttcttaatcaatcaaaatgatttttttaagatttaaattaattttttaagttttagtaaaaaaaatgttaaatcttttctcatttttattttacgggggtacgatttgataattgtcaaagtttaaggggtaaaattgttaatttacaaatacatgtcaacattaaatgagataataagacagaacctaacagaaggactaaatttttataattgtaaaactttaagaaaattcttaacaagtcgtatattttaagtggaaaaattaatattattaaaagttgaaagaaaaaattactaattattcttctctttatatcattatcaataactaataccatatctacaatattagaacatccaaataattgattgatgcgttgaacaagcactctagctaattcaatttgtttttactactacccattaaagaaagagaaagggaattaattaaaaagaaacctaaccataagctaagaaaaagtatacaatatgagaaaagtgaagaaaaattattctaaaagaaaataaataaaaaaaaaaatgatgtgtgtaagtgtcattatttttgtgtggcaaattatatgaatactttgtgttcattttactaccttagtatatttcatatgtcatctaagctacttttagtttcatctgttatctttatatttgttatagttgctatgtcaacttttttgttatttcggtttgagtttttctgttagtgtcagctgtcttttgttgggcagatagttaatcgagttaattctctctcaacaggatatataacattcggttgtccctttatctaactaactatcttctattaaaatcgttttcttgattcttgctctgctagagcaaaatattcttttgtatttttttggtttttatgcagttggaaattcagtaaatcttcaagaggttgaagaaggagtttggatctgcttagtttgaggagagttcagagtgaactgctggaggttcttcatgtggatgcaaggcgaccttgtgttcttggatctaaatgtgtttatatctcttaacttgagtgtgttcaagtgttagtaacattgtgtaaaaatcattttcagattacattgtttaatttgtaaaatcggaactagtatttgtaattgatttgattttatagtggatgttacttttacccggttcatgggaacccaagcactactcggttggaatgcgtttccaatgcagaggaagcttgtaaatttggtgttctttaattatgatttctgtttcaatccatagtaataaccaatttagatctatcacttagctatcgaagaaattagaactttcaatgtgaatagtaaaaaaataaaaaaaaaataaaaagaagaaagtaaaggaagaaaaaaaatacgtgggtacattataaaataaataactactaatgtaccgaccaaaatttaaaagatgtttttttatatatatttttacggaattccacacaaaaattatagcaattaatagagcaacctaaatcgcaactaaaatctgtatagcaacccacataaaaaccatcagagaaaccaacatagcaactcaaactgtaaaaaaaatagtatatagagtaatttctcaatttaatatacccatattttattatttaataacttaaataatttattttacggatttgttaagtagttaacaatacatatttattagtgtaaaaatacaaaataaaattaattctatattacattttcatgaaattaatgtaatatatttttatttgaaaatattatagtgctgagttaattttgtaacaaaaaatatcattttatggcataatagagaaaaggaaataaaaagttaagaaaatgcattatttttatgtaaagaaataccaattaattaggttttaaataaatattttctttaaaattattgtgatatattttatgttgaaaatattttgtctggatttaattttctttgttgtttgaattaaaaaatagcattattaaaagaaaagaaaagaaataaaaaaatggcaaaaataaagcccactcataaaaattggtatttttgaagc

SEQ ID NO: 61331 - DNA, 754 bp, Cannabis sativa
aaattatgaaaataattatatgaaatttttgtatatgtgtatgtgaaaaaacatctgtgcagagtatgctttggttgtactgcaatacaaaaaaatattttttacgtctccaaacataactggttttagaagtttgtgttatcttcgagttatacatatgacatatcactaaacatttatagagaatatattaagagtgctttatgccataactgcttctagatatgttttgagtgataagtattacttgagttgatagggacaatcctttattaaaagaattaatcagcctgtccaaacaaaatctcatctagtatgcataatttaaccattctttagcaaaggagagagagatagagagagattacagggaaaaatcaaagtatccataatgtaattaagaaggttaaccaagatagaaacaacaaaatgatgattaactcaagaaacttcttcatcataacaacacccagaaatcaaaaaagtgttataaaaattggatttagagttttttatatggtcaaagttatacgtacgaaagcatatgaagattaatagcaagatccaattaaagataacaatggcataattgagatttctattaaacaacataatgataataattgaaaatcccatttcataacttagaacacccgtaagtgccaatgagaaaacccatccatctataatttaacaaaaatatcacaatgccaaatcaaaaatagagattggagtgccaaaattcacaaatttt

SEQ ID NO: 61332 - DNA, 882 bp, Cannabis sativa
tctacttcgttgctatgtttcaccctcttctcccttcttctctcccacgcttgctttgctcaaatagagcaaatgccgcaacgaagccagcgaggcgggcagcagaggcagcagcacaggtggcaatctcagtgccaattccaacgcctcaacgcccgccaacccaaccgaagagtggaatgcgaggccggtgtgagtgagtattgggacatccaaaacacagaggacgatgagcttcactgcgctggtgttgagactgctcgccacaccattcagcgcagaggccttttgttgccttctttcttaaacgcacccatgatgttctacgtcattcaaggcaacccaatcattcaaattattatattcatatatatattttcatacatatatattattactaacctgaataaatacataaatgattattctaggtagaggtatccatggagccgtgatcccaggttgtccagagacattcgagagaggaacttcttcaccatcatccagaggatacagatccgagggagcatcatcagacgaacaacaccagaaagttcgtgaaatcaaagaaggtgacatggttgcaatgcctgccggagtggctgattgggtttacaacaacggagactctcctcttgttttgattgccttcgttgatgttggtaaccaagccaaccaactcgaccaattctccagagtaaattcactcttcactttacttatattattagtcccacatcgataatgtacacaaattttgaagcacttaataaacactgaattgcagagattccacctggctggaaacccacaccgagaacagaaaacacagcaacaggttcgtgtccgaagccaaagccgaagccagctaagaagagaatc

SEQ ID NO: 61333 - DNA, 1629 bp, Cannabis sativa
tgtgtgtgtgaataaaggtggcagcaattattgttttttttcaaaagttttaaaaaaaatttagttacattatttattattttggctcaaaaattataccattataatttatttttttatgatgatcattttgatatgtggaaagtatatatttttttcctgctacaaaaacaaatgactcgaaagaataacttttaagtttcttttctatgtatttagttaacaaaaataatcaaattttcaacttaaataaaatttaatatatcaaccaattttataagttactaatatacttttacatttagtttattttgtaacaattttgatatgttcttaaaataaatatatggaaatcacataatatcttaaaattcaatacaacaaccaacatcacaagttactttatattttttagaattaattacatcccaacagataaatatcaaattatttaagaaattgttgttggttattaaaatagcagctattatgtaatagttttacacacatgtaacagtgatttgttttgaaacccggtaattttgttaaaataggctaacacatatatcaatatactagtgactctcttctaaacttcagtgcctacacgttttttatttgttgattactttttttttgtctttacgtgaatcatgacatatagagtaattttttttttaataatgatgataaacttgtcaaatattctctttcttcttcttttcctttttttattaaatatttttttttaaattttgttaatcaataaataaacaatatttaaaattaaataaaatttaatgtatcaaacaacttaataaatctctaaaaaaatatattttttttttatttttatatttaaacattacacaattaaataaaaataaatttatttttataaaactattttagtaggtttacaaaataatttgtaaataaatttaatagtatgtgaaacattatatgagttacattaaaaaaaataacctcaaggtatcttaaacaataaaataacataatatagcctaaaaatattaaaaataaataaaaaaagttttttttaatattagtcgtccttttttagagacagaaaatagatgctttccacatattaaaatagttatttcattatttatatatgcttaaaataattttgaatgaaataaataaaatttttttttaattaatagaaaagtaatcaattgatatcgcattcacgtcaaaagtaactaaatggttgcttttttttcaaatctcccaaaaaacaaaaatttatggaaacaagatttttccagttttttttttttttttttttggtaattgttttaaatttggtatgtatgctgacatggcacaacgatatttgtgcaaataattttcttaaaagtatttttgtaaataaaattaattttaggtataatattaaaaaaaaaaacctctatattatttgtgtttatttataatttaatataacaatataataataaaaaatgtaattttattgtaatgtttagtgttgtgattggaataaacaaaaaattagtattcgaattttattatttttgtgttaatttaacaccaaatttagttacatgcccttaatcttcaaaagaaaatattatatatata

SEQ ID NO: 61334 - DNA, 1060 bp, Cannabis sativa
cctagttttttctatttttgtgatctttagggtattgccatcctattcattgatagtaatatttctagtttttattttaagtccccaaaaagtgttttagcatgtctctcactagagttacaaatgttgatatagggccctgtaaaacgtcgagttccaattccactcaggctgaccggcacaccttagcacggaaatgaggtgagatagcataaagtatatatatatatatgtgaatgtatgaatgttattaattgtttacactactaacactaacgaaaatgtagttttaagggtattagtacagtgtagggttttagggcaattatagtgttgccaacacgagtaccagggggtacgtcgtacatgtggtacaacactcagtaactcccagaggtacaatagtggcactattaacacaagtacggagttggttctctagtgcatatggtacagtggtcgtactttcgttaagaacgttcttaattatttggtgagcctagtaaatgggctcgagacggcttaagcataaagtcggtgttgcattatttatatatatgttgtgcatatattactgagtctgtcgactcatcagttttctaccctgtgtaggtaagggtaaagctaagctggaggagcagtgagttggagcttggcaaggattgtacatattgcggcagtgcaaccaggacggtttggtctttcaacattttgagtggtattttgtagttgccctgtagttcgtaaaaaaaatatagtgtgtaactttatatataatatttgtattttcaataatgattttaaactcgggatcccaatttacgatataattatattataattaaatttttttcgaatgagcaacttttaaaagtcaggcgttacatgtaatgaccacatatcataatatagattagaaaaagtcaattagtactaattattagtatttttatagttatttgtgtatttatttaactgtaggtcttattattagaaagggcattagagttataatttctcaattcggagattttgataaactctaagagtgttatttgta

SEQ ID NO: 61335 - DNA, 2119 bp, Cannabis sativa
ggagtagacatttttagcacaggtgttggcattcgatttatgagataggcagcagtgcgaaaagcttcatcccagtatttcaaagggagagaggcttgagcaagtagggtaaggcctgtttcgacaatatgtctgtgtttacgctcaacaactccattttgagcatgagtgtgtggacatgctagtttgtgagtgatacccgaggtctctaacaaactagtgaatgatctaaactcacccccccaatcagattgtagggcttttattttagtgccaagttgaagttcaacttgggttttgaactttgtgaaagtaggaagagcttcatctctagttcttaagagatatagccaagtgtgtctcgaaaaggcatctacaaaacttatgtaatatctgtatccatttgaagagttgatgggggcagggccccataaatcagagtgcaacagttcaagaggtgcagtgtatgtggtggtagaattgggaaagggcagcttatgagttttgccaaggcaacatgctttgcacacattgaaaagatttttattggaaacaggtatattacattttgacagagccgttgtgacaatcttagcagcagggtggccaagcctgctatgccacaaagaaaacaaagaatttggtacatttgtttcatggctattacattggaaggaactaggagatgaagactcaggagagacaggttcagattgatactttggtgtggagttgaatttgtagagaccttgttcaaggttcccagccaacaagatcttcttggttgcaatgtccttaacacaacaagaaagaggataaaactcaaagaaaacagagttatcttgagcaaattgagagacactaagtaaattcttggtgatagaagggacatgtaatagattttgaatgttgagctgagtagaagtaaaaggagagagaatataggaattaccaatattgtctatgctgagaccactgccattgccaacataaacttgttcattttcctgagtatgtgctgctgttgtgaaggttggaaaggtcaggggtgagatggtgtgttgctccagtatcaggataccaatgttcatcacagatggattctggtgtagcatataatgcttgtatctctgcaaggttagccgtaggcgggaaattgttgaagcattctggcccagtgaaggatttatcaaaacggtagaaacactgcttcacagtgtgacctaatttatggcagagctggcactgtatcttttgtccaaggttgggagattggccacggccataggtgttgggaccacttcgaggtgttgaattgtgagggggaccacggctgttggggggaccaccacgtgtcacagagttgttgtagggatttgaattgttgctgaagggtggaccactggaactacgtccaaggccattgttgaagcctggtggagctgtagcagtataatactgattgcgattatacgagccagaagcaggagttctgaactgagataaatttgcctctgctttagtgatatccaaacttttggcatgcttttatattcgaacggattgtgccattaacaaagcttcaacttcagcaaccgtgtaggactcttttcttgtagtgattgaggtgatgaacacatcatactccgacggtaagccattgaaaatggcttctatgtgatcttgatttgtttgagagtgaccgatcgtagccaatagattgactattcctttgatcttgagtaggtaatcattgagtgatcctgtcattttaatgtttcggagttgagttttatagagtccgatgttggcggcattcaaggcggtgtagtactctttcaaattctcccagatttgagctgtagtatcacatccgatcatgcgatttgtggtcttttcagacatggaagaaaggagccacgagacaaggagattgtcttgctgttcccagtcttcgaaatcgggattgattgtgttggatctttcatcagctgctgttagaaattttggaggaacacgagtaggatcaagaaatttctgtaggcgactgcctttaatggatgcaagaacctggtgtttccagggaagataattgtgctcatcgagcttgattgatagt

SEQ ID NO: 61336 - DNA, 1692 bp, Cannabis sativa
gaacattgtcccacatagattaaaagtaaaacatatataagtataagaacagaacatgggctagggctattccactcattgccaattggctttgagatggaaccccatgattctcagcatataataatgtgatatcataattatagcatttttaaaatgtattatactattggagtgtttttaagagtaaaggtgccaaaaatgatgtggaagaaaaataaaataaaatattatattttggatgatgtggagatatagagcatcttcaaaaaatgctaccattggagatgctctaaggtacagtgagatttttttcacgattatttgcacttgtgtttctaatctattttgtgaagttcatttaccacctatttcttttttttttttgttagttttttttacaaagttggtgccatatttttttacttatctgtatttatacggttgcaaaagaatcaaaaatcttccattttcatatgaaataacatataatgtaactaaattttcacttttgaagaatagccattagccaatactgctatctaaacaatagttgctagtatatttttccatgggcacaaatagatactgaatagaactttatgtcttttttaacctttgtgtctaatatttctattatatttgttttttcatgtgattcgttattattataaattttttttataaattttttaaaaatttcaaataattacaatattaaaaaaaagtttgaaattctttgaacatacctaataaattaaaatatcataactctgttgtcaatattgtaaattatttgaaaaattttaaaaatttacaataatgttataacgataacaaacactcatgaaagaaaatattttcacgtgtgtttttgaatgcgaaaattgagaatgatattgtttctaagccctttgattgaaagtcattgttttattatcaaactaagattgagctttctaatacaatttacaataatcttagaatatttgatagaaaatacatacatattactatattagaatgtaattaagaaaagcttatacatgcatgattttaaactaataattacaaactccctaccttaaaacttatgatcaattctttatcttaagttcttatcaccaatcattatgcaataatgttttgtggtgggatttttttttagttaaggaaattcaaagtagtaatagacaatattttttaaataattaaatagactttacacgtaatgtatgacttagttttcaacaaaattaaagtcagaaagcaagaaaaaaaaaaaaaaaaagagaaaggtatagactagctagtataaattaagtctagggtatctttttctctcaattcatatttgatacgatttttcttttcttttctttccaatgtgtgttaaaagttatttttactaaaaaatatatgttttaaagctctttacataaagtatagtcttgcttaattaacaagtttcaatcatgtaataaatagcaataaaaaatacaattatgtaaaaatctttcagaaaatgtaaacttaaccttgcttaacatatttcttttttctcagtttcatatctatatatcggtgcaattttaatgggtattaaccatgaatgggtaaaattaaaaaaatttgagttttatacttaattttttttatctaattaaaaaaatatctcatttttatatcata

SEQ ID NO: 61337 - DNA, 847 bp, Cannabis sativa
gtttcggtttcaccctcaatgcaagagcctaaaaattattaacctttattttgcaaatgatctcattatcttctgtaaagctaacaaaggctcagtgacttgtgttaaatgtatttttgaggagtttagtaacaagatagggctcaaagctaatcttgctaaatctcaagttttctttggtggaatttctaggtgggacaaggctgatttacttgagatcttacaaattgaggaaggggtgtttcccctaagatatctcggggctcctatgagaccaacaaagtaaaaaacggaggactgtgaggttcttctcaagagaatcaaaaaccaggttcacacttgggctagtaggcacctctcttatgcagggagatgtcaactaatcaactagttctcttggggctgaggaattattggatgaatattttcttgctgtctcaaagcacaatcaaggatatagacaagctttgtaagtggtttttatgggataacaatggtataagaagtaagttctatcttacctcttggaccaatgtttgcttaccgaaggagcaaggtgggcttggttttggtgaaggtgctaagtggaataaggctatgattgaaaattatgtttgggcaatcaatcatcatccgaaagctctttgggttcgatatattaaccatgtgtacttgaaagggcaaagcttctggttgtatcaactaaaaagtgacactagttggtactgaaaaaaattatgcaatattagatcgatgttttctcagcaggaagtggaggatgcaacttgtaaatgtaaattttgtgtcaacaagttatagaagggtctttgtcatggtgagcaatttg

SEQ ID NO: 61338 - DNA, 581 bp, Cannabis sativa
tagtaccatttatagatgattcttataaggtagtgcttggtttagataaatgagtgtaggaatgaaattgctattatcattcaagtgtttagtttgtttattgtcattggaaaattcattctataggaattgtaattcatgtaaactaaggaattacttttcctaaataaaatgacttgaaaagtcattccataccaactaagaattaatttttctttatttacccttcccataaataaatgattaaacttataattatatggataatatttttttatcttaaaacatatatctacaacatttaatattacaataatatgtttattatatttttttttgtacataattataggaaagcaatattattattataattatatggataatgatgtgtgatgattataatatatgaataatatttatgttgatacttaaatattaatataaattagactatttaattaaatatttaattatattttattatttgataattagatctaaaaaatacaatttgagagtgatgcataaatttatatatcatttttttatttataccataatggtaattttataaaaca

SEQ ID NO: 61339 - DNA, 1586 bp, Cannabis sativa
ttcattttaagagatccattagttctccaaaaatgtcacatgttgatattaaattacagtaaaagttcttaaaaaattcactttgatgcaaataagttttcaatctttaaaatttgtaataatagcctcaagctcaagattcttgtttgtctgtaggtacccaatttaattgctctgtttgtttctcctaaaaatgacacgtgttgatattttattggtccaaatcataatttcaatttaaaataaatataaatgaataattaatttccaaaactaattaattaactttactttttttttttttttatcttttctattgttttttttttttttgtttcttcttcttcttcactcccagcccaacctacccagccctgatctgctctagtaaaacttttcaatttccattagctagaggggccaccctaaaaaaaagtgtctatgtaaactttgaaccagaaaaatcaaggtcaaagaatcggccaccaaaactcaccactcaccacccaccaccacccatatctctttttctctatcgcatactccatccatatatctcggtttcttaaaaatataaagaaaaaaaaaacaaaaaacttcatctctctcaaagatctgatcctaatcctagtcacatctgttctttttcgtttgcttaattttttctgagatagtgggatggacgaggaagaaggtggagatgaaggaatgttactggtcgacactcgacagtaagcctcccccaccgagaacgagaagggtaggtggcaaatcgtagaagtttgtaagaaaactttattttttttatatataaagttttttaatctttaataaaaaaaaatgaaaaataggttattaaaatttttaatatttttttattgtttaaataaattttttatgacgtggactaataaaattttaacacgtgaacattttaagaagtataaataaagttgttaaattgtgtatctatggactaacgggaatcttgagcttggagacttttactataattttttgagattaaagacttatctaaattaaagtgaactttttggaggtttatataagtgatatttttggagcaactatcgaatctgttaaaatgaggaccaatagacttataagattttcgagcttgaggagtgaggactattaccgctattttttaaattaagaatttatctacataaaataaaatttttggggacttttactataatttttcctaattgattttgaactatgtaaaattatattaatgatgttcaaaataataaatttaattttttgaagataaattgttgatattaataaatttttaaaattattttaatattattagattaaatttctagatacatataggtagaataaaaaatatgtccaattgccaaaaggtatttattgattagaagaagaacatgagtttacaaaatatagtacaatagcataaaagagaatgggtcaccaatttctattgttacattgcccttaccttttggttaaggtcacatatcttagcaatagtttattttttggaatccaatggctaagatgtattgtggtatgcaattcctcaaaaa

SEQ ID NO: 61340 - DNA, 776 bp, Cannabis sativa
aaatgaaagaatgtggactaacataagctttgatttgatcagaggaagttcttgcttgttttagagtgaggatttggttctttagattttatatttatgggcagtttcctctttttttgtgaaaaaatattcgtttcctatttgtttgttacttatattatttttttatcttttttaacaaatatattattaatgaaaactaataacagtttaaaagaaataataaaataaaagatatttcctattttaattaaatttgaaattaaataaaatattttcaaaaaaatttaattagttaatatttatccaactatccgaacctataattatgtttctcaaaaaaaaaaaaaaccctacaattatgtcttgcgaaagaaaaaaaaaacatataattatgaaaataaacttttaaattcatgtatatgcataagtaaacctaattaaatatctaagcctgcttttaaggaaataaataaataaatatctaagcctatttcttcgaaacttttaaattcaaacaatcaaaattagagctaaatttttgtataccgcttaacctaataatacacttaaactaaatcgagataactaaatgaaaaatgtaaactgaaaaacttgcgaaaatataactcgcttaatttttatattgaaccaaccatattaaattcaatctttatatttaaaccaaccaattcattaagtgaattgaaacttttttcttaattataacgtaataaaaaaatcaattaaaaaataaaatgagtgttttaaaacat

SEQ ID NO: 61341 - DNA, 1981 bp, Cannabis sativa
tttaatcttttggttttagtcaactggccccctcttcattactcacccagcccacttagttccagcctaatgctcataaccctaccacattcatcatcatcatcaacttcacctcccttcaccaacctgaacctagccaccatcatctcccaactcgccctaactcagcaatcccctcatcctacaccgagccttcattcaacctgaatcaccaactccagtcgacccatcacgcatccatcctcacgcaccagcaccagcaccagaacccatcttaacaaccttcggttgtctaccaccatagcctccatctaacccgaacaagcaacactacgaactcacccctgcccacaaccctaaccactcatcatttccttcacaccattccacctgacttcgaagcacccaagcaccaacccgtaacctccatccgaacaacctacacagccagcatccatctccattcagttcaccactgtagcttcacttcgccccactcgactgagcttcaaaccaactccgaaccagcttccattcgcccaaagttgactgaacccagctgctaactcgaaccagtttacaccagcaagcacccatcgacttcaccagttcaaccaagcttccattcggccgagccactcccagtcgaccttcactcaactcagccgctccattcaactcgattagcacccacatcacacgacccgaacaatcctcatgcaccagaaccacgaccaaattcagcaaccgcacatcacttgaaactccacacttcctggtttctcaagattaagcttttgatttttaattttgtatttggacaactttttggttgacgtatatagtgtttatgtgtggatgttgcgatttggttaatattgatattttgaaatttgttgggaggaatctgactgattggagtaatgttgggaaatttttttttttttttgatgtgatttttgtgcgttcaaaagggtgccatgatcaataggtgctgattattggtatgaaaattttcaatttgaattagtgatcaattgtggagtgatattgaagttttgctgtggttttgaacggtgaactgcttggttgtcactatttcatttgaattggaaatttggtgtagtattggaagtgttgtggctattggacagattattgttagaagctttgatgttgttgtttgagtagtttcaaatggaaaagaagtagggaacttttgttgtgactgttgagggtgaaagaatttggtgtgagtgctttgaattttagttggtgtggttcggaaagagtggtgatttttgaaaaaaaaattggattgtggacattgaagggtattgtaagacttattattgtgttgaggggcagcggttaagaagacaaagcagagaagaaatttgtggtgttggggtagtgtgaaagtgaaaaagaagagaaaatgccaaaagttggttgccaacaagaaaaaaaaaagaaatcacttcatgaaattgctaagtttcattgcaaggcagccgagacaaagtactacgataaggtggacagtcgggaattttatatggagagaggattagtggcgaatatatagaagacattgacgagttacctgaacggattagtgaaatgattcataagaggaattggggactttctgtcaagctgagaggacaggcggtcatggaagttgttaaataattctacgctaattttttgtcccaagaatggcctactgaagtggttgtgcgtgaagtactagtggaattctccgctgaagcaatcaacaacttgtttgggttacaatcaatcgaatgccattactcttcccaaaaagggcaagtgagcgacgagacattgaatgatatgatgccctaagattgccaagccagagtccaaatgggatctcgataattatggaaatcttcactttcggcgcactgacttggagcacgatttgaaatgtctttacacgttcgtgcaaacc

SEQ ID NO: 61342 - DNA, 734 bp, Cannabis sativa
ttgttagttgaacctactattaataatattaaaaattaattataaataaaaaatatattaattttggtgtagttttcaagagttgatttgaaccaatggattaaatcaaggggtataaatcaatatccctactgataggtaaaatactcaatccctaccataatagacccctttacatattatttaaaaatataatattttattttatttatcttccatatcatatttgatactcttactcttttttttttttttttgaataaagcttcttttatgattacatcacgaatatgaggagtaaacttataactcctaatgacacgatcagcaacccaagatgaagctcgagcaattacatgagcaacaattagcagatcgtttaacaaataaaatagacacatcattgacatgttgcgaagagcttgaaccacagtaagacaatccgtttcaatggtaacctgattccaacctttcctctttagccagcttaaagcctctctcacgcccatagcctccgctaattctggagtaacactgccttgtttgcagcatgaaatggcttccaaaatttgacccgtgacccaattcatcctttgcaacacatgcgaagctatacatgtttgcacctgaaaaaaaaaattgcatctacatttatttttacctcccctgctactagtttctgccacagttcagcaccatcaactgctgtaaaaaatgcagcagtcgaaacttga

SEQ ID NO: 61343 - DNA, 1134 bp, Cannabis sativa
tggttcaatggggatatcaatgcaatcaatcggataacagtctctttttctctaaaatcaatggcaagttgcttctcattttaatatacatggatgatattttaattacaggtgcagacaaggctgctgtccacaacctcatctcccaactacaccaaactttttccctaaaagctctcggttcagtaagatactttctgggattcgaggttcatcgcactgattctgcaatctacctaacatagcaaaaatatactcgggacttattggcaaggactcaacttctagactccaaaccacagtcaacacccatgtgttccacatccaaactgtctgccaagtcagggactctattggataatccaactcactaccgaagcatcataggggctctccaatacctcacaatgtcacggcctgacatttccttttgtgtcaataaactcagtcaatatatgcaagctcccactactgaaccttggggagcctgcaaaagagtcctcaaatatttagctggctcaattacttctggtttagtcttcaaaccagccaacaggtttgacatctcagcgtattcggatgctgattgggcagggtgctttgatgatagaagatctacatctggctactgcatttttcttggaggaaacttaattagttggtgttcaaagaagcaaactgtggtagctagatctagcaccgaatccgagtatcgagccattgctttggctacatcagaaattatgtggatccaatcgattctttctgagatcagcatccctattcctcaggctcctatactatggtgtgacaatcttggagctacatctttagcatccaaccctgtgtttcatgcccgaacaaaacacatagaagttgacatgcattttgttcgagacagggtcctggcacaacaacttgacattcgctatgtcgaaaccgaaaaccagcttgcagaccttctcacaaagcctctaccaacacagtcttttcagttctttcttaacaagttaacacttggtcttaaccagtgtcacttgagggggggtgttaaaacaactgaatatgactaaggtcttttactctgtatgtattttactgttttattgtttactgtgtacttaggtagttaaa

SEQ ID NO: 61344 - DNA, 1234 bp, Cannabis sativa
gttatgaaattacttgtaacttaccactggctggttgttctttgcaaaattcaggaaactgtttgaacttctcagcttgtctggtgctttggttgaacttacatggcctgcgattctcaacaaaagacatttatttaggtatattcaagctttcgaattctatgaaatttcattcacattgtgcctgcagttgctgcaatttatttcaagcttaaagttttgtaatttaactctaagttgccatgtagctaaatgttgtttcagaaaaatcaagaagatggtcaatagagtcaatgaagggatttaatccattgattgagttgagttgcttcaagtttcatagtggcggtctcgtcatgtggagaagaagactcacgtcttaccctagaagtcttattgggcttgggctgatttttaaaccaaaaaaaaaaaaaaaacagagaaagaaagggataattctaaaagaagggggaggggaagtgattaatggtagcattggtaaaattatttaaaatttcatacattttttgtatatattttttttttttttgttatttttgtatatttataaaataattctaaaagaagacttctttcatggactaaacataaaagtccaacgggcttgaaaagtgggttaaaatgagttttaattctttatttttgtatttgtattgattttttttttttacttttactaccttgaggataaggtgattttaaatggtgaaaatgtgttagactatgaaaatactataaggcttattagtaatttgcaaatagtgtaacaacttagaaatatctattgtataatgtatagctattatttaatatgtgatgagaaaataaaatttcgattcaattattttatatgtgatgagaaaataaaatttcgattcaattgggatattagtattgtctcttagagtgcatttcgaaaatttttcttgtactctcgaagaggaaccgttatctaacagtatgtggcgttcagattggaagagaggaacaaagttcgacttgtcagtggcgagagagactggtgaaaataattattttcttaaatttgcacaatatttttatataacaggactattcttgagcttatctacttagcagatttcaatgagttaattactgaaatatttactattatttattgattattgtttcattatactaataagattagtcactaaagcaatacaagattagaaacacctcttataattat

SEQ ID NO: 61345 - DNA, 856 bp, Cannabis sativa
gctctgatactatttgtggtgaattaacacctacccagaataaaataaaataagaactaaagagacaagatataacgaggttaatcaccctttttgtggtgactaattctcgggaggaactatcatttgaccaagctttattcgatcttcaatattagaggaatacagaggagaacaagagttaatctcatcaacaagggtgtcttgcatttcaacaatgctatcatgcaccttaaaaattaactcacatgagagctagagatgtgattaaacacaaacatcctctttaacaaccctactcactcattagaaacgtaataatcatctaaattcctctctagatcataccctaaagaagtagaacacaaagccttattaggaaactcaatatgaggggtagcctagttcatttaactaaaataactaactcgagaactgagtagacatacctgcaacatctaatagattaccaaattagactaacaataggtgcacaccaggttactaatatcttcaaccttttctttaaaaaaaaaaaagaaaagaaaccaaataaaattaatgagaaataaatagacaaatattctacaggctagatagtattcaaagaatggagacagctcaaatactagctaaccaaatgaaatatggttagatcaaatcaccaaccctaagaaacaaagactataaaccctaccaaaaactaaagtgatggttaattatgaacaacaaaagactaaaaggcatatatcgtccccaattgattttgtagttcaagtactacacaaaattgacataagcgccaaagtcctcgaaggacaccctaaaactacaaacacaaaactagaccaaaaaa

SEQ ID NO: 61346 - DNA, 1945 bp, Cannabis sativa
  modified_base (610)..(610): a, c, t, g, unknown or other
aagaattttgtaaatataattctatattgtcaaagagtgcaattccatatttatagtagagtaataatagaattaataaaccaaattattatattaattagattgataataatcgcggatttattggagctttggctttgaaatataagtctatagtctccgtctccgagtcacctctatacaacactatacagggaaagattttatttcatagatgaattttgagtgaattaattgatttcgaaaagaaattcttaagagcaaaatagtaatttgtgaatattattttgattaattatggtaattatgaattatataattaatagtatttaactatattaattagttaaatataatattactcttaataatattaaagagagaaatttattattttagagaaaataatattttaatccttgttaaataagagattaatgagaattaataaattatcatttattggtagaataaataataaatcttatttatggcaaaattgaaaaatcaattttggaccttaatatagcccacacgtgtaggcccactctacacgcgtgtagggtgacatataaaacgttggagtctattttaccaggatctagatttnctaacatgtatgttgattatatgactataatttaacatcctaaatatgaattttctataacaatgaaataaacacatacaaagtctatagaaaattgtacattggtagcagcggcatataatgtttcctttcattcagatctctaactcttgttcattttcatcacagagtattactaagatctaaagctggatctccttagatgatggaattcttcacaatctaccacactatatttgagtattgactgtgtgggcaagcactcactcattatagggttcgaaactaagaagaaagaagagatgagtatttcaaaatctagagaagctttctttattttttagttatctgacaaagtagtctgatgattgttatgttatcaggttatgaaaataacagccatcttgtaacaccttactagtttaagcgtgctacaatacttttcataattattgtgcaacctttgctaatcaaagggtttatcaaaagcgataaaatttaatcttaaataaataaacatataatgtattacatttataaaatctgagatcccgtatctacattttttaactgtacataattaaaagatgtcgcacatcgactacaaaatagtgagccctagctttctcgaagatataacactccaggttgaactatcttgatatgtacaatctacatccagctcaacacttattgtcgttcaacaacagctttgcctttacttgcacataacatatcatttgtgagttgacaaactcagtaagaaaaacataaaatataaatataactaacctgtgactaagcgcccatacacctatcaacaagtcataaaccatgtcaaatatgtataaatgagtctcgaacattcttgaccatagtataattgatcataataccacatgcacttagtactctagtcgtactagtgttggtagtactagttcatgattttgaaagtataaccaaccataataccacatgcactcagtattctggcgtactaatgctggtagtactagttcatgcttttgaaagtatacccaaccataataccacatgcactcagtataatttggtgtactagtgttaatagcattggttatactttctgaattgacaaacacatacattcacgatattaacatgtaatcatatatacaccaactatcgttctaacaaatatgtcatatatctggcaaatataaacatgtgtgtcatactagtcttacctcaattctaatttcaagtgtgccggtcaaattgtctatgcctttacaacaattggttctttgtactcaaatatggtcactaaggtagtgacacaagaaaaattta

SEQ ID NO: 61347 - DNA, 913 bp, Cannabis sativa
  modified_base (447)..(447): a, c, t, g, unknown or other
  modified_base (551)..(552): a, c, t, g, unknown or other
catggcgactggactaaaagtttcctcatagtccacaccttctctttcggtataacccttaatgaccagtctagctttgaaagtttcgacttcacctccagcagctcttttcttcatgttgacccccttacatccaattggacaataatcatcatgtgcgtctacatattcccagacttttttcttttatatggaattcatttctgaatccatgccggctgaccattgttactgtttcggacttgccattacctgtttataggttaatggatcgtcctcaataccgtcaccaacgaccataatgatttcaccatccaagccataacgagatggttttatagaaaccctcccactacgacgaggaaccgtgatcttctaaacaggaacattagtggtagatttctcagttgtatcaacttgcaaaggttcaaccgagggagtgggatnatcctctacttgagtagaagaggacggaacattaggagttatatctgaaagcatttccttcaatactactttgctttgcggcttgaaattcttaatatagtcannttcaaggaaagtggcgtttgtggaaacgaaaacttgatcatccttgtgactataaaatagtccacccctagtctccttagaatttccaacaaacatgcaaacttatgttcgtttttctagtttgccatcattctttcttaagatatgagtagggcacccccagattctgtaatggcataaactaagtatacaaccattccataattctaaaaaggtgtctagggactgatttagatggaacaacatttaaaatgtcagtttcaatctgaatagcatatcctcggaaggacgtaggtagagttgagtagctaagcatggacctaactatttccaaaaccgtgcgatttcttctttctgcaac

SEQ ID NO: 61348 - DNA, 1139 bp, Cannabis sativa
atccacataattattaatatttataacagagaacttattttatttattctttttcgttttaacctagacactgtttacggttttctctttttgaatgatcacattttaaacttgcaccacgtaaaaacaaaaaattcaaaacttcaattatttcttttttatttttcatatataacttactgcattaattaactattgttttcttttttttttctttctttctttcaacattaatctctaattatttgtgacgtacttatatatatatatataaggtacacaatcctcagcacatttgaaattgtaaaaaaataaaagagtacagagaaaaaaaaaataaaatgcctaacaaagaattttgtcattgaaggtatgtgtattcttattattgtttttggtttttttttaaattatattataataaaaatttttaaaaaatgattaccactttttaggattttactattgtttttatattcacttgaattgttgatatgttataattataaatggattctattatgaaaaaaaaaactttaaattgtgtggaacttcaggaagttcttatacttgagtttttttttctatctttttttttgaatatacactagtatatatatatatatatatattaattataaggtaaaaaatttacaaatattttttattaagaaatataagttatttatatatattggtagtgtatggaattattattatttcaataaatgcacaattttgtttatttattattaaatatagcagtttaataaaaaatgtatgtgaatagtatatatttattttggtgatacaagatattacgttttaaaattatagatgatcataataaaactatggaaatagaatttcaatctcgtctagtttgaaaagggagaagaagaaatcaatgaagataagttggtggataataatataaagagtatagaaatgattcaatctgaaatatctgagaacttaatttcaaaaattggcatggaatttggaactgaagacgaagcttataatttttacgatgcttatgcttataaagttggttttggcattagaaaaaataaaaaaaaaaagaaaaagagaaacatggtgtgatgataaatagatccgaactttttttatgatat

SEQ ID NO: 61349 - DNA, 903 bp, Cannabis sativa
  modified_base (783)..(809): a, c, t, g, unknown or other
aatcatttaatatcatcgtaattggaatcaaatggcatttcctttaaacgaaaggactgtaattaagagattatttttataatcttgaatgggttgagcttgaattaataaactgttatgctataattttggcataggtgaaattgtgttttgcatttatttttaatattctaaatgtaaaatttttgcttagcataatttttggcacgctcggtgagacccattctccttttcatctccaattacgttgagaattaatatattacactcttgtaattaggtgtgctattttacaggaaaaatagtggcaccgaaagtaacaatacttttccaggaagcttacacatgaattggggcaaaagaagaaagataaatttctcgtgacattttctattggaacccatactcaaactgatgttccaaggaaaataaaggtcacaggggctcatcaaaccgcggaggctctaaaagaaaaagtcgccaaagacctaaagaagagacaaactaaatctattaagagggaagttgctcaagcatcaaaggctactgcagtgttgaactcttccgagtccattcaaacaaattcaacaaaacctagtggcattcctattggaaccacaaaggttaagcaacaatgcctgactcaaataatgatcggttctgttctaataaccctggttgatgtcaatttttgcatggtgaattcaacagaggtggagaatagtggtttagatttttcaaaacgaaagaccactaaaaatcttttgggttttgtgccctaannnnnnnnnnnnnnnnnnnnnnnnnnnttactaataaagatcagaaataacattttatgttccatgattcacatgatttatttcatgactatatgtggataatgtatgaattctatttaag

SEQ ID NO: 61350 - DNA, 1038 bp, Cannabis sativa
aacaactttctagtttctatttttgtttatttcctttttttagggtcataaatgtaaatttattacatttttagtttataatagaaaaaatctctaatttttactgtcatgacatttggtaatgatatttcttacttagacttagatatgagtaggttcaaaccaaaagattctaattttacaaattactaaatattccaaaaataatttgtttattaatacttaatatcatatatattttttcaataacaatctcacccgatcagataattaatttcaaacacattttgtctctcacaaatttatttattttattataacttgtgccaatactagtaaggaaaaaccagaaaattaatatatatagttcatatagatataggtatagataatatattatatatgagtaattgtttattatatatttatgggggagagataatggagttgcttgtcaatctcatctttgaaatgaaattttgttggaaatctggagtcacatttaatgacacttgtaacacctcacatgatagtgcttccattaaagatgtcttcccagctaaattttgtatcacaggcctgcacaattcaacaatattaattcaatatatccctaactaattatttattatatttgacacggcaatattatatattatattaaattatagatcaaataatttgtatctgtactcatccaactaatattgctcaatttattagatttgtatatagtatatgtataattgaatatataatgatgcacgtggtattatataaaatgacaagttgatcaactaaagtaaactatattaatttaaaaaaaaaacgaaattgtaaacagccaaaaaaaaataataataataaagaaatgttcaacacacgcaatacattcatatttctctagtattgtatgcgcttgttaattatttttattaattattattactgttattatttatataaaggcaacgattgcaaatgtgtaattaatgatcactataataaacatgtaaattcattttaagagaataataa

SEQ ID NO: 61351 - DNA, 856 bp, Cannabis sativa
aagaaagagagctactcagtgccctccagcctcatccaaatctgaagaaacttgagatttggtcctacaaaggcaacaacttcccaaattggatgggagatcatcgctgcttgtctaatttagtaagtttgaagttgatgaattgtagtaattgcagcttcttgccgtcgttgggacagcttccttctctcaaagatctttggataagtggattgaagggtgtggtgagaatagattcagagttttattgttcttcttcttctgttgcaatacaaacaaagcatttatctttggagaccttgaaatttgagaatttggagaagtttaaagagtggtcatttatggaaggtggagtttttcctcgtcttaagaatctttattttagtagatgcacgagactgaaagtgtcattgttagcagaatattttccgtcattgacagatcttgaaatatttgattgtgaggaactaataccattattactcccaagagctcaactcatgcaggcccctttgatcactttaaagaagattagaattgtcaattgtttaaacttgacgcacttagatgaggccacctttcagcacctcacctcccttgagaagttgacaattggacgttgttttaacctccgatgcttgccaaaagaactacccacttctctgtctgaactagacattttcgaatgtccatggctaacagctctactccaaagggagaccggggaggactggccaattattgctcacatcccaaatatcattctcgattacaagaaaatataggtatattaaattattgaatgatgaagagaaatattaaattataatgataataacattagttggtggcattc

SEQ ID NO: 61352 - DNA, 1503 bp, Cannabis sativa
aatttaaagtaagattattttaatcatgaaattttaaattgaaataagatattttgctaacttttaaattttattatttttatttaaattaaattgtaaaagttgaaaaatgatattaatttattgaatattaatgatattaaaatttgaacgaaagcagttctcatttttgtccatttcccaaatggagttgttgaatacttgggcgcgaggtagaattttggcattccctttccctttagacattttcaatatccaagatggagcggcctctgggatagtttcaagagcaatatctagtcaaagttcaccttaaagaacttctgcctaagctccctcagtggccattccttcaaaaggggcaactgtggcgttttcatcgatttccaccgcctcaagattaattcctagttcaagtccatcacttgaaaaaatgaagggataaggagagccaagaaattagacacccattatccaaatgacaaaatgggcatcggggaaggcctcccctaaaatttcttggagaggtcccattaagacccattactcccagaagcctgtcttcacaagacaactcaaagttatagatcaagaacctagggaaaagttaccacaacaaaatctaaagcaaaattctagaaattaaggccaattggaatcctagcaactccaaatcaatggacaaaaaatgaacagacctagtcctcgcttgaaagttcatccaaccgagttcaacccaaattctaggaccctaaaagcatgcaagtgtctacatagtccaaacaaccatacgcaaactatccacgcagtagtaacactctcatggtgcaaaaattcccacacaatcttaccatggaaatgtatttctacgagtaacatctcaccattaaaacagattagacatcctagacttagcatgaactaagcatttctatcctagatatgcaataacaaatattcaatgaagcatgtggatacttatttggtactttagtagggaatgaaaggttgtagaccaagaatgtcagagccacactactataatttacccttttagtgacactatacctgcaaaaaagtgtgcgtcactaaagagtggggagtgatttttagtgacatgcacaattagactctacaaattcggtgttagtctcttataatgtgggacactaaaaagtaaaacccaaaattttctgatttttattaatgtaaaaaatgttagcatatagtgacacactagacatgaatggataaatatattcccacccatctggcgcgtcactatatcataacttaattttttatataaaaaaagtacagctataattaataagtagataagaaaataaaaaatatatttaattatggtaaaacctagttatccacgccattctctttttcttaatcaattaaaatatttatcaaccaatataaaaatttaaataataacatgtaaagtaaatataataataaaaagagttattctaggtgcgtcctttgctg

SEQ ID NO: 61353 - DNA, 505 bp, Cannabis sativa
  modified_base (456)..(465): a, c, t, g, unknown or other
cctgggttactatggatggaggagaaacccaccgagctcttaaggcaccttggtttctttgaggaacaacctcagtatattcctcaataatatagccttcaccctctaccaagacttcaccgacctcgaacacaagttccccttcctcattgtaacccccgaagggcaatcttcgagcaactccctcctcctcggctttaaacgatgaattaggacggacctcacccagatcctccacctcttagacttcaatgtccccttcattatttccctcctcagcagaagttcgggcctgttcagcgctcggcatcgtggcaagctgagcatgtgaggatcggttaatgtagttctgcgcactgtctatttagtgcagaccatcattctatccctggacgacgtttgattggtgtgcctagcaacggtcacggcaaaggtgttggaattattttactaggnnnnnnnnnntactcacaagtatgttgaattaacaacctaaatatgaact

SEQ ID NO: 61354 - DNA, 778 bp, Cannabis sativa
  modified_base (720)..(720): a, c, t, g, unknown or other
taaatttgtatgaggtgtcatattgttattggcgtgataataaaatttattttaatttaataaaaattataaaaaattgttaactaattatcaaatatcaaatcataaaaatattaaacatatcttggtgtcacatgataatactttaaatcgaattttgcaatcatttaacacattatgctcatttacaaatcaaacggtgaaaagtccacttttgcaagctcagttaactaagattgctagtaaaaggtggctagattattccatcagataatacttataccggtgagataagctatcggtataagtcacttttgtcagcaaagtatcttagttttgccagcaaaatgtggtaaactaaccgccaattaaaaagtgggaacttttggcggtttaattccacttttgctgaggaaactaagtgcgctagcaaaagtgaattaattattggcagtttgatttcacgtttgtcggcgaataaatgcaccggcaaaaatagtgaaaattttggctgttcattttccgtgcagtaaaaatgtgcaaaaaattaggtaaaaaattttgctgacgagtttaagtgcgccgaccaatttttttacaattaatgagacgttgcgtttcattttataatttagggtaaaactaattttgtcaacgaggtgaagcgcgccaaaaaaagtgttttttcagctttaacttttgttggcacgtctaagtgcnctagcaaaaattgaagctgaataaaaaccaacatcgaactctacccccatttctttct

SEQ ID NO: 61355 - DNA, 650 bp, Cannabis sativa
ttttaagaacatatcattctatcaatgaaaaatagacaaatacaacattttgaaagttatatagaaatatatcctttttattaaaaatttcattgaaagtatttttctttaaaactcgttaattaataacaattgataattaaatgaggaaattctactttatacttactttttatttcttattttaatttttacttttaatttactattctttaatttatactcagttttataggtcatattcccattatgtacattaagaactataattttaataagttgtgtgagattatgtttggtattttgattattaaatagggtatttattaattaaaattattttagaattatatttaattaatgtataataaaaagggatagttttcaacttattcctaattaaatggtaatccaagaaaataatctgctctaatttttttttaaaacaaggtacttttctatatacaagtttcaaatattgtattttttaattatacattttaaggaaagtccaaagattattaaatttgatttttttgatgggatttttctttttattttgagcataattgtgctcccatatttattagatgcacaaaataacctgagtgttttcaactaagagtaattaattaatacataatctttat

SEQ ID NO: 61356 - DNA, 4639 bp, Cannabis sativa
tgttagtgtagttagttaagagtgtacaagcagtcgttagtttctctaactgtattgtcagttagtttgttaagttgttttctttgttctgttttctctgcaaaatctctctgtataaatatcccttcagtcaataaagaaaaaagcttctagccattttgttcatctctgtctctctttccttcttgaaatcttacatggtatcagtcgcctttgactaacgtcttccatggagtcttcgtctacaggccaaccggtacctcccaaagctccttcgaacacgacggcccttactcaggctgccgtcgatcgtcctcaacagatgaacaatccgttttctcactccctcacctctacgcttactgttaaacttgatcgtactaactttctgtcttggaaatcacaggttcttcccactgtgattggacacgaccttgatgaaattcttcttgcaggaatttccccacctgctcaattggtttcaggcgaaccaaatccattgttcagtcaatggaaacgtcaagatcaattacttctatcttggttgcgtgcatccatgacagaagctgtgctagcctcagtcgctaatttcacctcctcacactctgtttggcgtgccttagaacagagattctcaagtcagtcgaaggctcgtcttcttcaactcaagagtcaattttccacgcttcgcaagggaggacagtccatctctgacttcagtgacaaagttcagacaatcgctgattccttggccatagctggttctccgattcaagatcaagatttgatcttacaacttttaaacggtcttggacctgaatacgactcggttgtctccggcatcactgcgcgcagtgatgatcttacatttgaagaagttcagtcgcttcttcttgctcatgaaagtcgtctcgatcatcacaatactgttgctgatctcagcatgaaacttcaggcgaatatggctgtctctggcccaagaaacacaccatatcgccctcctaccaacaagaattttacaagaggaggctatcgacccccaactcagaacaatagaccgctgtgccaactctgtcttcggttcggacacactgcaccagtatgtcattaccgattcgacaagaattgggttcccccaaaaccaggcaccacacatcagtcatccaccaactctcagtccaaccctcgtgcctatctcactgagcaagaagtcgagtatgatcctcaagtatatgcatcctcttttctgcccgactttggagatgactctagctggtttgtcgacacaggtgccactaatcatgtcacttcagccactacaaacctggattcagctgctccttatgcgggtcaagaaggtctagcagttggagacggtaagaaactatccatctctaatattggatcaacttctttacagtcttacaactctttacctctcaaattaaattcagtacttcatgtcccttcaattaccaagaatttggtcagtgtttcacaacttactaatgacaactatgtgtttcttgaatttcataaaacatgttgctttgtcaaggacaaacacactgggaaagtgctgctcaagggaacacttaaagatggactgtacgtgcttgaagaatactcacaacccccaattcgacaacatcatgtctctgtttgtgaccctactgctttaatctgttctagtagtagtgcttatgacaatgtaacaagtccttccttatgtaccaatgttactatgaataaaaatgatcctcttgatttgtctaaagtctcttctactatcaacagtgtttgttacatgtctcatatcacagattggcataataagttggggcatccatccaatgccatcttaaacagagtcttacatgttgttccccacacaggcaccatagatcaactaccattttgcaaagcatgtcaattaggcaaaagccacaaacaacccttccccatatctagttcccatgcatctcaaccccttgaactcattcataccgacttatggggtccctctcacatcaaatccaaagatggttatagttactatatccactttcttgatgattttagtaggtttgtttggatctatcccttaacacttaagtcccaagcacttgatgtgttcttaaagtttaaggctatggtagaaaaacaatttaatttgcctataaaaagagttcaagctgactgggggggagagtacagaccattctccaagtttctaagtgaccaaggcatctccttcactcatccttgtccaaaaactagtgaacaaaatgggcgggctgagcgtaagcatagacatgttacagaaatggggttaactctcctagcacaatcggggttagatttttcctattggtggcatgctttccatactgctgcctttctcattaatcgactaccaactccaatcttacaaaatacatctccttctgagtatctttttgggcaacctcctgattacagtgtcttaaagccatttggctgttcctgttatcctcatttaaggtcttacaacaatcacaaaatggagtttcggtcacaagagtgcatctttcttgggtattcttcagtgcacaaaggatatctttgtgaaaatccctcgggcaggctgttcattagtcgacatgtggtttttaatgagaattcctttcctgcaacatccattcagcagccatctcagcaggtaaattctcatgattcctctcattttcctactgcaagtttctctgctggtaattctaagtatgcagcaactaactctagtaatgcttctactatggctactggttctggtgtcaatgagattgttataaccaaccagcaaaatattactcacaccccacccataaccaatataccacctggctctaccccaccaaccacaaacacatctctcattcccacctctccatctgtcagaataattaattctgaacctaccacctctccatctcatgcacctgaatataactcaccagccacaaacatacaacctataccaacatctacacctaccagatcaattactacagatgtcatcacttctcagccacctcaattcaacatcacacaaccttctcatcctcagaatgtctctacttctctaccccctgctacttctgttgacacagaaccagtgccatctgcagccagtaacagaacacaccacatgtgcaccaggtcacagtcgggcattcgaaaaccaaaatcatatatggcaactaagcatccgttacctgaatccgtcttgcctactgaacctaagtccctcaaggctgctcttgctgatccaaactggaatggggcaatgaactctgaaattggggctctacacaaggcacaaacttggctactggttccacctgaagataacatgaatataataggatgtaaatggattcatcgggtcaagttaaacaaagatggctccctaaatcgatacaagtctcgactagttgctaagggatatcttcaagaagctggaatcgacttcgatgaaacctttagtcctgttgttaagccaacaacagttcgaactgttttatctttggctgtctcgaataattgggaagtttcacagtttgatgtaacaaatgcctttcttaatggtcctttaactgagacagtttacatgagacaaccccccgggtttgaagacaaagaccatcctacttatgtatgcaaattacaaaaggcaatttacggtctcaaacaagcgcctcgcgcttggaatgacatgttaaggcagacacttgtttcctggggatttcaaggctcacgggctgacagctctttatttgtatatggttctggtgctaaccttgttatttttctagtttatgttgatgacattcttgtcacggggcctaactctactcttataaccaaattggttggtgacttaaacaaaagctttgccttgaaagatcttggacaggttcattatttcttgggagtggaaatttatcgtgacaatacaggaatgtacttgtctcaaaccaagtatattactgatttacttgtacgacttaaaatggaaggagcaaaggcttgtccaaatccagccagtgcatcaactcgtctctctcttcatgacggtgaaccgtttcatgatatcacattataccgaagtacaatgggtgccttacagtatctatccctaactcgtcctgatgtggcctttatagtgaacaagctgagccaatttcttcacgctcccacttcagttcactgggaagcttgcaagaaactcctacggtatctcaaaggcacaatcaaagagggtattcatcttcggccttcatctggtttcaatctttgtgcctactctgatgccgactgggcatcgtgcattgatgatcgtcgttccacaggaggctacttggtttttctaggggagaatttgatcagctggtctgccaagaaacagcacgtggtggctcgttcaagcaccgaaagcgagtttagagcgttagccaatgctgctgcagagttgaaatggattcgctctttacttactgaacttcaagttcaactatctcaacctcctgtcatctgggttgataaccaaagtgccactgcattggctgccaatccggtgtttcatgcacggtctaaacac

SEQ ID NO: 61357 - DNA, 734 bp, Cannabis sativa
agatggtgtagcatactctgtccagacattcttaactccttctatatagattgattatttactagtgataaatcaccctggatggcacatcataggaggaactgctcgtttaggcaatagaattttttccacgtgtcactcaaagggatgccacatcactttatgcagaaattgaaataacaataatgatacattgaatcctattttggtattaaacaaaagttttaactctaatattttttttttgacataaaactgtattcattgagattgattccaaaatacagaatacaagcaagagaaaacatttggtgaaatcagagaatagcctcctgttctaagccaaaagcttgcttagctagtcggtgagcgacgtaattagcctcttgagggacatagctaaaagcttgaggaagtgaagacagcaagcttttaattggttagaaattcctgtagatgaatgttattagagtgacctttaattacagtatcaacaagaatcttacaattagaatctatttgattgatcataagcgagtgcttttgacactatttcagggcgagttggagagaatgcgcttccattataaacgactggtggacgcctttccaagttaaagctaaggatgcgaccaattctgaagtatgattttgaactatcaatccaaaacctattctgttcatttgaatattttgtgcagcgtcaacattgaacttaagctggtctggaggcg

SEQ ID NO: 61358 - DNA, 1288 bp, Cannabis sativa
tttataatataaattatatattttttatatatatacatcgatataatataatcccaattatatatgtacattcatactcaatttatttttatatatatatatattcatgttaacgttcttatatatataatatattcatttatttttacgatttatatgcgtacatatattttacgttgaatatatatatttttttttgacaaatggatattcagtagcgaaaaacctacaagagtttaggcaagtccgccatgacataggcagacgcacaagagggataatctcccaaccacaacttattacaatttgaagaaagagccaatttggctaaagaatgggcagccttattgttttgcctccctaaatgaattagagaattgcaatttgagaaagcaggggagtccttgatttcctccagcaaagcgctccaatccgttttgatctgtttgttacctttttagcacctcggccactcgaagacaatcagtgttgatgatgaaaggaaccacccctgtttgcaccgccagctgaatgcccattcgaagagctaaagcttcagctgcctcaactgaataagcgccatgttgctgttggatttctgctgcaataacagccccttcaaagttccttatcaaagctcccagcccaattttaagatcagtaggccggagacttgcatcactgttgatgcaatagcagtccttaggaggagcttcccagccgagaggagaagaaggaagagttatactgctagtttccttgggaaacctgtttttcatcatgaaattggcttccatttgggcccagccgatccacttctctgttggggggagatgcaaattgagccttttcttgttccttctattccaaataagccaagacaaaatgataaaaaaaatagaaattcatccttagagacatgttgctgaatgtgaatgaacatgtctaaagcattgtttttgcttcgtttaaggattggccatatcgtgaatctccgccaaatgtttttagcaaatgtgcaataccatagactgtgatctattgtctcctcttcctcaccacaccagcagcagagggggttaatctccatgccccgagtcctcaatgccatattaacagggatccaaccattgcaaactctccatatgaaattcctaaccttcgggggagcctcaatcttccacagacctcgccaccatttcttagttaccttatcttccgaaggacctgctgttacttcattagttgtgaccactttatacccactactcacggtatagcagccatc

SEQ ID NO: 61359 - DNA, 1019 bp, Cannabis sativa
aaaaaattaaacctctaataaagtcaacaaaaatagttaacatatttaatataaattaaattagttgatgtgtcaaattttaataaattaataattaacacagtataaaatactaatttttaaccgagaatcttaattcctatattatcttttttttttttcatccttcatgacggaaagttaagggtttaatttatcacattagctaggaccatttatttttcaaatcatactatttaaaatatgcctcttcttcaaatactaccaagtgagagtatttatcaaaatggacttattaaattattccactcattcaaatactaccaaatcaaggtcttaagtttataatgaacagtgcattgaatcaataaatgtgaatgtgataaggacgttatttgcaaaaacttgtaatcttttataaaataaaatcaaacgtagttcatgctgaccctttcatttaatgattcataaatctggacttaatgggatcattcgtgtaatatacaaacaaaaataaagtaaagtcaaatgacgattagtatttggacattgctataaatatcatatttatcgatattttataattaattaacaatatttaataataacttttaaattaaattaaaaaattgttaaaaaacactactgtgataacgatataaaatgctagctagatactactaatatattctaacatttttttcatagtattttgatgactttgctgcccatttctacgaaataacctattgtatttgtacataataactagttgttaatttctagtttccaaagttgaaaaatcagctagtatggaattgtaaacgctaaaatatttggtgattaggttttttaattaacaccataactaaaaattgttttcaaacataattaattcttatcagtattatttagaaaacaacttttttaaaaactgtaggaatttacttggtgaaattccaagtttaacctacaccaactcaatgttcacagttaaaacgacaaggacaaaattgtcc

SEQ ID NO: 61360 - DNA, 577 bp, Cannabis sativa
gagaacattcataaatcatttttatattttttcttatcaagattaataatatatatgtttcaataaataattctgatgagttttatatatttttattatttgatagaagatgaaggtacagtaattatcattcagggtaaaaagtctaatttattatagtatatttatatataattagttcaaataaatttttctttcttatattaattttgataatatttggtcgtcttcaatgttggtgatgacaataattttgaatgtaatttcgatcacaagcgagatacaataacaacaaatttgaatgatttataagtgagatctgatgatggtaatgattttgaatatagtagcaattataagtgtgataaggtgatgacaatgacttaaacttttttttgtgtgtgtttcaatttacatatctaaaatataatttttaccttaaatatactgtgacagtcagtagtctcgtgatccgtaagagaaaataccatgtataatcccacatcgcctagggaaggtcaagtgggatgattctaggactgtgtgggtatgggactacacagttgaagagggctta

SEQ ID NO: 61361 - DNA, 2380 bp, Cannabis sativa
gaggagctcaagattttctttgctctaatactatcttagttctagaatgaaagagagaattgaaagtgtattattgattcgaagagattaaaacatattaataattagttaactaatttaattgtaactaaccttagaacttgactaaataacaattaacaactcacttattacagcttaattaacttctcatctaactaacaatgctattgttaacattttgtaagttgtatattcacttaatcaatcttatattttttttttttgaaagaactaaaagttcattaattaaggaaaatagatgggaatcacagggggattaccctccccttgatacaaaatggccgactcgctagcgattctagcatttttggctgcaccatccgctactacattaagactacggttaatataaaagaaatgacaattcagaaacttttttgacaaatttttaattgagtaaaaaacattagctaacttccagtctgggcatccccctgtagtagataaagctttgatagcaatgcttgagtcagagagaagatgaacttcttgccatcccaattcaatagctctggatagagcaagaaagatagcccgaaattctgcttctaaagctgattgggccttgatcttctgggactggatagaccagcatccgttgtgaatatcaacacaaacagctgctattcctgcatcagcctttgtccatgaagcatcagagaaaacaacattggaaaaactcctgtggtctgtactgaaattccttgctgctgtgttcgaaaaggctgagtcttgcattgaagactctctccttcttaggttgttggaaaggttctgaagctcaaaaaaccttttctcaattcggtgtagagtcactgcagtattaactgctgaatttcgaatgcaaagagcattcctttgatgccaaatttcagtaaaaacgcatccaacatagttgaggaaatcgattctgtgagcagctctttgtgtatctagcactatttcaaacaagttaatcagattatcatcactaaaacaatcagttctaatggaaaaaaaaccaccaaaccagattgctctagagaagctacactgccagaatagatggaaggcactctccacttcagtatcacacagattgcagattttgtcacttagaaagggtaatcggttcttggtggggattgcttcattcaagactcgccataacatcactgatactctcgagtgaactccactttcccaaatccatttccacaagttttttcctatgccaaaccttgatgcattgtccacacgataagcatctttgacagagaattttccactttgactgctcttccaaaaaacctgatctgaaaatggggaagggattctagggatattactaatccgagtccccaattctgggccaaaaacctgttcaatcaattcctcattccacttgttaccaatagaaacgtctcccagggtttttatagtgaatcctctacccctcagagtgttcatcaatcttccaaactcatggtactccatccagggaatccacggttggtgccaaaagctgatggaatgccctgatgccgcgactgtgatggtacctttgagaatcgtttctctactgtccaggatacatttccattgaaaggagtcattgcttttcttcttgacactccagaagctttcatggatacagtattttttgagcaaacaattcacccaaggcctatcctcatgtgtggcaaggttccacgcaagtttagcaaccagagccttattcatatcctcacatcttctcacccccaaacctcccgataacttaggttggcgaatttggtcccatgccttgagagcaagatatctattcttgtctacctttccaagccaccaaaattttcgcatcaaggcatctaattcacgacagctagaaagagggatccttgaggtagacattgcatagataggtatggctgaagtcacactcttgattaaggttagtcgccctgcgtaagagagaagtttcatcttctatccttccaatttcttcatcaagctttcttttaaccgcaagtaatcctctttctttcttcttttaaaaacaaacgggttgcctagatgcctctcatctccacgcgcttgatcaatgttcaaattacccaagatctgctcctttcttttagaagacaagtttcttgagaataagacactcgactttggcttgctacaagattgaccaaaccatttttcatacacggagatacactccattagcttttttgcttccttttcattggctcgggcaaagagaattgtatcatcggcaaacatgagatgagacaccggaggggctgactgagctattttaataccatggatg

SEQ ID NO: 61362 - DNA, 3006 bp, Cannabis sativa
tacatagctccaggtaaatattaattttcattaaattggtgattttttttttactagttattctatataggtgtggaaatatgctatgtcattgataagtttgtttcttctttttgttttggtggttttcagagtatgcatacacgtacaaaattaatgagaagagtgatgtgtatagttttggagtggtgttgatggagttagtgactggaaagaggccagtggagtcagagtttggggagaataaggacatagtttattgggtttatagcaaattcaagagccaagagaatgtgattgacttggtggattcaaccatatcagaggctctgaaagaagatgcccttaaagtgttgaaaattgcagtgcattgtacatcacaggtgccagctctaaggccctccatgagaacggttgttcatatgttggaagaggccgagccttgccaactcacttccataagtgttgttaaagaaggtgaaaatagccacggccaattgaataataatgttactaagatgatgttagagaagccaaactactagccagctttggattttgttctcttctcattagagtttagtatatgtatcattatgcaacaactgcttaaataatagatatcatagtcgtttgccttttatgctgtttcttttttagtaggatcagctgtatatggactattttcggatgtaataatactagcatagcattccatgaacttgtttctatgaacagaacaagacttacaagaagtcctgttttgatttgtgtactgaagggtcaacaagggttctaaattcagagcaaagtaaatgcctttgaaaaaaataaaaggccaataagttagtttggtaggacttttgggccttttgaaatattagtcaactagttcaagtgtatgagaggatagaatcgcgtgctagaaaatgatacattgattagttaaataaagtgttgatttcaattttattcttgagaatcttgtctcgaagcttcatgggtggaaattaaaaattttgtcaaaagccggtcatgctacgttaattaagtcagctggacttgctttgtcgatatacacaatgcaaactaccatgctttctaaaaagctggcctaaaaaattgatggtatgattagggatttttggtggactccgaataaggtaaccgaggtatttgcttgaaggcgtgggaccgtttatgccttccgaagtccaggggcgacctcagttttcgtaagtccctggagatgaaccaggctttgctagcgaagtggggttgggccctccttaatgatgagcaatcgttgtgttgtagagtgttgaaagccaaatatctcaaagggaaacctttcttggagggttcttataaaagttcggactcttagttctggaagaatgtggtgaaatctaaagacatcatgttgaaaggagcgtgcaaatttatctcggatgggtaagatactaatgtccggtctgatccttgggtgttgcatagcaaggacttctttgttaaacctattacttctagacccgagaatgtaactaaagttgctaatttactcacagatgactgggatattcccaagctcgagactctttttgacttgggaactgttcgcgacatcattaaacgaggaaatcctagtggggtgggaagtgacaaatgggtttggacaaaggagcggaatgggctattctctacaaagtctgcttatttagtccaagccatggagagggcccctacctgtgtagttgtgccaggcctgtggaataaactttggaactctaaagttatggagagacataaggttctctggtggagcaatattttgtctgatgctctgcctgtccgtggcctcctggctaaaagaattatcatcaaggaggtgtcatgccctttattcccatatgttgtaattttgcagctcacaatgttgctagatgggcttttgcactgaatatttaaggtatagtggacccctcttgtatacttaacattattctttgtaatgaccgagaggtctaatttttcattatcaatgaacactttattttcaaaaaaaaaaaaatagttaaataaagtagaatttatagattttaaaattttatttgataaatatgatatttgtggtatagttctttcaaatgaaagatctccaaaagttgttatgtttatagaaagttagatgatattctgaaggacgttcctgaaagtctaacttgaccatctagaagaagttttgtggaatgatagatataattcggaagggcattctcagatgcttatcatgtccacctggaaggagtcttcaagaatagtctttcactggaaaggagttccagatggctaactgtactctcttggaagggagtcctagataatcgagtccaactatctctattcctatccaggaagatccttcagcgtgttcttcagttcatagtctcagaattggttgcttcattcgggagaactataacttaagctaacgtggagattcttctatgatgagtttgttaagtttgttaagtcgtaacaaacttaacaacttagcacttatagccactggcacttatcattttgagtaagaacgaaatcagacgagttttgagaggtgatcttgagagagaaagactgagaggtagagagaaagtggtatagagaaaagagagatattgagattggattttgtatgaagaatcttctgtagataaagaagattcttaggtaagagtgtgagagataaactgtttaccgagtttttcgaaaaccgaatatattttgtgcttaaagaacgtaaaagataataaataataaacaaccgtattttttacgaggtttaggcgttaaagatccttagtccacgagtctatagtattagcctctcaaggcaaatatttatgagattacaaaataccacttttgcactttcaatcatttatctatttttcacaaataccacttttgcactttcaatcgtataaatgccaaaattatttattt

SEQ ID NO: 61363 - DNA, 1292 bp, Cannabis sativa
accacacattctcagtaccatatacagacttataataacaaatcataactcatatttcagtatacaaagaattcaaatttatgcaggtaaatacatacaaaactacctaattttcttacctcaaatcccgttgtttaagacattgttatactgtcactactccctataataacacatagatcaaggccctaacattaaaattctaactctttcaatacagtagaaagaatattatattttaccaacaactaaatgaattcaatgaaagttgccttcataaaaattatagacaattcaattatctttctaatgatatgttgaatattattgaaaatagattaaaactgagagggttatcatagttttactgaaataatttttgagaaagaatatagaataacgaatcacaggagacatcagaaatatgaagtttttacactgaaatattctaaatcagagaataatctcttcataaaagttttagaaaattgaattccctttcaaatgacattaaaatccttagaattggacttataatgtaggagatacatatattttaccaaaacagttttttagaaatcctaaagcaaacaaccaattttagactacaacaataaattattatacccgaaattcagctaccatttcagtagaggacacatgtcaagataaagggaatatggatcgacaaaatcacttttaatggaataactcattaatctcataagtagcagagtatacttgcaactcactgactataaggtcttatgcgaggaaaagatatacaaactgttgtttagcatattaacgagaaaccatatgtcattggatgcataaagcgatgcatcaacctcgttacatctgggaaggctaaagcgacgcatatcgactgtgaaaacacttagcatataatgcacaaactaagtataacagtcaggtggactcgagacctaactcgctataggaaggcgcattcctataactcccaccagttaacttcaaacatctttcagcgagacttctaatcttgacgcgataaaccgagtcaggatgaatcattaagtcttcatacaaagaggaagcaaggtgtacataatcgacctcggaaagatagagaagaaaagtttcagctccctgtcaaggtcatttgaaccaagttcctgtcgagacaacccagaaaaatataattaaaggcgtgtttaaacacacgatcattttgacccagtaaaagcgcaaaaatcacagctctgtgattttcaaataataaccgcatttatactatgtgatatgta

SEQ ID NO: 61364 - DNA, 969 bp, Cannabis sativa
  modified_base (288)..(292): a, c, t, g, unknown or other
cttgttttggtagctcaccatgaacgaactccatggttgagtgtccttgacttggggtggtttcatttaggaaatttccccatgaagcgtgcgagttagagaaaagcgcgttagaaacatttggattggtctgtggagctagtcatctgtccaggatgcagttggagtgatgcactcatgtataagagccatcactctgtgggagtaagggcccaatgaaggcttgaagcggggacgttactaggataatgtataaaagaacatcaggaagagtagtggtatcactannnnnaagaagattacctgaattacttaaggtaatacagtaatggtggagagtacttcataattgactggatagtcaatatggtatataaggagaccattgaaattctaggaaatgattactttattaagcaattatggaaaggcatactcacccagaatggggaagagcttatgaattgagatgaaatttaatggatatgtatttgagtgattggtgaatgttggatcccaaagtaggttgtttattaaacaacaagctatataattaagtgtaaaataagttttagagtggttaaccaagtatgaagatagtgatgattgcaagaaagcaatggtagcatacgaaccagggagtgaaaccttagttgtaatgatggaaaagaacacgagagtctcatatgttgatgaatcaacataatctacggaagactcactataagttggtatggtaatttgtaccaatgggttatcaatataacagagaatatacttgaggtatgtatatttctgcgtgtgttgaaaagatcatcaagatctctatcaaacacagaatagaaatttcaagaccacggaatgatccttgattaattgttattagttgagaattcgggaaatgtgtatttccagtttagttatgggtacctggtatgagcaatgttgcctctaccatataggttacat

SEQ ID NO: 61365 - DNA, 3260 bp, Cannabis sativa
ctttaaagttatcccactgtctaagctttaagaggttagcataaaactaacctcacccttttagcaattaaaatataatagcccttaagtcaactgaaacatgtaaatcaagacctaatactgttcaaacataaaaccactccatgtacaacgtgtcaaaatctgttcaaaactttaagctagaaaatttaaaggcttatacaaattgaaaaaatttgccttaaagttaaagaactatctaacctttgagaggcttgcatactgctaacctcacccttttatcttttaaaaaggtaataggcccctaagcctactgaacttgtattattcaatactgctgcatcaaccataagtattgtatggctctgttcttcttgagaaactctaggtagaacttccaaactattcctatttctatgaagagtaaggctactatgcttggctccatcacgagcatatacaatagtttcataataactgtcaatccatttaacaatttgttgtggctgtcttaattgttgaccacgagtaattttatttctctccgtccatatggctcgagcattaataataattttttcatacaattccctttttaccacctcagaagcatatagtattacatttttaaaattaattacctctctcacttcatgtagaaatttaaaatccagtagcttccaaatttcttgtgcaaagggacaccagaaaataccatgagcattgatctctcctccaaaaccacatagctcagatgcattgttagtgactatatttcttttgttcaacccgttacgtgtaggcaagatttcatggaaacccctccacgcaaaatgtaaaattttcctgagtatttttaaaccccaaaattgcttccaccataatgagaatacatcactagctaaagagggtaatgagaataccatatatatttaattataaataaaccacaaagttaagttaggggggggccatggccccagcatagatcaacatagtttcgcctttgtaggtaaggaagtttgtgttactcctacacacttggttatcaagctaagttgatggacttcgacaaagggtgctctagcaaatggtgctctgacaaaaggtgcttgtgtgtgactttgtagagagagagagacgagaatgagagagggaatagaggggaaggatttagttttattcttgaggggtatacttggtactaaaaaaaaatagcatattttgtttgatatttaatagggtggtatataattagatcatgcaatacatttaagcatggatagtcaaaattttcttttaaaaattatttttaaatttagtataacctttttttttggtaaaaatttaaaattttatgttatgcttatttatgttaatactagtttattattacgtgaagtgcacgtatatttattaatttcttcaaaaaaaaaaataatatataaagttttaaaaatttgagaaaaatacatataaagtttaaaatattaaaattgaacatactccctatattaataataacaatagaagataataatgttacaaataatattaatatatattttaataatattaataatgttaaataatattaatatttatatataattaaattaatctaatattggtataagttaaattaacctaaaacagataataataataataatatttatatatatttaaattaatttaaaattaataatattaatatttatatttatgggtgactactcattgttatatttttattgtaaccatcatggttacatttcttttttacctgtaatagcaagttaccaataagtaaaacttctttttttagaattaattattattttttaaataattaattgaatatttaacaagacctcttttaacaattaatctttataaataattttttatgtaaattcttactataattattttaacagttaagtcatttaattataatatttacaatgaaactttattattttttttttacaaaatttagacttcttttacacaaattagaagtctcttcttgtataataaatttttaaataattaattatttttatataatattaaattattctttttttataactagaagaactaagtatgagttggactatttgagtttgaggttgcttcgttttttaggagagcttgactttactttttgactctagtttggtttttttaagtaaatgactccttataaaaaaaagatagaggagtttagtcatttttttttaagaaaatacttcaacctattttattttttactttttaaatatttaaataaaaaactaaataattaagtgtaataatttttaattaaagttataagtataataaaattttaaattataaaattatagagagtttgctataaattttttaataatttaaaggcaaaaaaattgctaaaagatcattatataataataaattacgaaaaattaattaataattataattactttaatattaaaatataattaatcttcattaaatttttttaaggaaattattaggtattaggttataagttaattattatttatttttatttaatttttaaattaatcacgaccattcaatagtaatttaatgactaaaaaaaaaaatacaatcatgatggttacatatttaatataaccattgaaacatactccttatatatatttataaaactaaccttactaacatagttaaatttaccagaatcttatatttttaaaatattttattaaactaataaaaatcgttaaatagtcacattttatatataaagatatgatttctttaaatttagtgtgatgacatttataattaaaataaataatatattaaataataatgtgtgagatcacaatgataacattcttaaaaggtgttatgctattgaagtatttttaaaagtaaaaatatataataaaatgatgtaaaaaaaagataaaataaaatattattggcaaaaggctaattagtaattttttcccctaaactttgacatgtagtaaatcgtgcccttcgaactttttttgccgttaaaaattcccctcgaactattgcgattgttaaatttaaggatttttgtctaatttcattcaatttcactgttttggtgattgtttatatactaaaccatgctcccaatactttgatatctaccaaatcatacccctcaaactttgatatgttctaaatcatgccccttgaactttcatccatgttaatattttttactaaaattaaacaaa

SEQ ID NO: 61366 - DNA, 1916 bp, Cannabis sativa
ctcattcaactccaacactgtcaaatgttttgcactctctactattttgagaccatcctcacttttctgagagtggatacatctgaagcttaaaactagttatggctgaatcgacaatgaaatatgcataccatttttgtgttgatccaaagtcttttgaatcttttagattaccatttcaattttgttactcttaaaactgttacagctcacaatatagataatttaagatgttgaaaatagatgtgtgaaaatatgtatacaacaatatatataaatcatattcatataacactaaaaaaaaacagatgcacaaacaataacaataacaataactaaacaaaagaagaatgttgagtgttactaacctcttcatctgtagattaatcaaaatgatatcaaaaatcaataagaagagcatgtcaagtaatggaattgtaattatgtaaaattgcagcaatatgaaataacaagatctacataaaaatatataatatgatcaacaaattaatacagaactatatcaactagttcacaagtaaatataagaagaaatatcccattttcttatgcaaagtagtcaaatgcattagtacaaatataagctaggaattaattaagaaaacacaatctgaaaaagaagtaaaagatattcatctatactaaaatatgacatttccattgacagacaatgtttctaaagaaggtgaaatccacatcaacgactccatcaaattcgacaacctttttggcttcaaattcgacattcttccacgattcaaattcgacactctttcaaacttctgacattcagttatgaatactttgagatgcttccaattaagtaaaggcgaaccacattttctcttgaagatttctggaaaggtgaaagccttcatgcaaatatgtaataaacatatcaataaacacacacttaatataatatgaacttcaaatctatcacaaggataattattctgaatatgtaagcttacaatattccaagagcaaatgagattcgaaagaaatttcatactactactaaaagagtcaaagccaaaagattattaccttttccatttgactcatattgaatatacaatcattgtaacaaaagcatgttaattctggatctgattcaactacaaaacaacacctacgtgtatccagaagattaaatcttttcatgtgttgacttgaaattttaattagacaatctgaaactgtcacaagatgtatcaaagtcaaagtctcaagaagtggaatatcagaaataagagcttctaatttggactggtcatatgtagctgaatctactaatgagagatttttaattttcttgaaagaagagatgtttatactgtccaagaaagcaccatatatagtaccaaagattcaacattactggcttcaagatgaaatgtttcatccttgtgcctctgaaatccaagttcaacgaacttgatggttgaacttatttgcaatcgaaaaccatcatcgtaaaataccttattatttgttgaataaggtagagttagatacttgttgttcatttagttttccatctttaaaaacttggtcattggtatggtttaaggtttcacattgccacaaattaaacaaataataaacagcttccaatacgagctgctattctgtggtgctttaggaatatgtttaatataataaaaattggattgattaatcaaatgaagataattataggaatatgaatgaaccacagaaacacatgtagacttaaaaaaaaaaagaaaggttaaagctcagaagcacttgattttatctgaaataagataatggtgaaggacccctccaacacagaagtgcaaatatcatcacagctaaatttgcaccagccgggaatcgaacccgggtctgtaccgtggcagggtact

SEQ ID NO: 61367 - DNA, 920 bp, Cannabis sativa
  modified_base (891)..(894): a, c, t, g, unknown or other
aactaagcggtctttacattatttgttataatataatatagattaaaatatttcaataagacatattatatattaatatgagattaatatatattatgtgttggaggctgtattatatcatatatagtataattatacacataaaagttgtaacatatgaggagttacaaatttgaaaataaataataacttaaggatcacatgtaactaagtgagttattacatatggaagttatggaattaatgggataagtttcttgttgttagaaactgttacagtactcaattatattatttaaatgagtattgggacgttggaggaagatttaattcgaagaggagttacaaaaactaaattttgagttttctggaaacaattgttttatggtattgttttacgaacacctagaacaagtttttgaaaacgtccataaacatagatgaattgattgagcatgtttctagctctcttgtctaacgtttttataccattaaacaccaattaaagtgctggtaacaaccatgtggtgaagagactttgattttcatatgtgatactcaaaatactataaatagagatcttgggttcattttggaagacaagaagtttctatcaagagaccacattactagaaacactttaggcttgataaatctagaaagctatttccattcttttcttttctgtacgtgcttgtggtaggggaaaataagcttttggacaaaggtgtaagaccttgttcaagtttagtgattcccctattaattatacactactggtgtatgtgatgttgagattgatctcacatctcttatatatacatgttatttatatattgtgtttatgtgtagcttattgccttgagttgtaatgtaaagaccgcttagttnnnnttggaaattagcagttaatcacgttt

SEQ ID NO: 61368 - DNA, 518 bp, Cannabis sativa
  modified_base (331)..(336): a, c, t, g, unknown or other
tggtagaggcagttttaacaggtgttgttcgagataatttttttgcagctggtggttgttatcgactccctaacactagtacaataaattcgtgtttacgaaaactgtacagtcccttaggatccgtttggaacacaagattagactgaaaatgattatattagaatggactagactggacaagattgaattgtgctaaaagtaatcatgtgtttatttaagaatagactggactaatttctttaatttattttttaaaaaagtaaattaaaataaacatgtaataataaagtaataaattattcccaataaaaaaataaaaataaataannnnnnaataaaataaaataaattattatatcatatataatcaaatatataacataaatattttattatatatttatttaatagataaattatcattttttatttaataaataattaaattagtaaaataaaaatatttgaataatataaaattatttataccaaacaataaaataatcactaatttc

SEQ ID NO: 61369 - DNA, 2725 bp, Cannabis sativa
  modified_base (485)..(485): a, c, t, g, unknown or other
aaaatatactaaacttaatctaaaattactactaaaaataacctaacaggctcaaatggtggaaagaagaagtcaccaagcattgaagcccctgctactgaggcatagggaaatgggaagaaaggaggtttgaacggaggaaagatagccaacaatagtggaaaaacaatgcaactaccccagaagaaagaagcctaagactgggggaaagccctgaagagattatgagcctcgctttaccacctactgcattcatttgttgattttatttaagtagggtccgaagccgggtccgggacgggtccaagtctgtggccaggtccgagtttgatttttaaggtctaagttagagtcagattaattaaaaaaaaaaactgtttaaaatttttttgaaagtaattcttttttgtttttaaatttagattcttaattaaaaaataaaaacagctttatagaacattgttttaaaaaatattttcactttnttaattttaaaaataaaaaattaactaaaaaaatattatcaaacgatattaatttataaatatatggcattctctgttactacaccaaaatttatactgtttcaaaaaataaattgtaatgttcctaaacacacatcaatgtcctatggcatttcacttatcttaagagagtaaggacaaaattaaaagattccctcatacacttagatagaaataaggcatattacattgacattccctccaaagaagacaaagtcgtataaaaagaacaaaatcaaaagattcccttatacgaataaggcatactacattgatattccctccaaagctctactcaattcttatactccccaacatcaaacaaacaaactacaacatatccatcaacttttgtttgttttaagatcaaaatcttatactcaaacacaccatgacaaccactctcacagaaaattacaactctacaaccctattcttcactctatcaaccatcatcatagtcctaatttggtacataaaatctaagaagctcaaccagtactcaacaccattgccaccaggcccacgaggcttaccaatagtgggcagccttctaagccttgaaccagaactccactcctacttcaaaagccttgcacacacctatggtccaatcctaaagctccgcttaggcagcaagctcaagatcatcatcacctcacctaccttagcccgccaagtgctcaaagaaaatgacaccattttcgccaaccgggacgtgcctagtgtaacccgaaactcggcctatggcgtgagcgacattgtgtggacaccatacggcccggaatggcggatgttgagaaaagtttgtgtcttgaagatgctaagcaatgcctcattggactctgtttactcccttcgccgccgcgtggttcgacaaggcgtgagtcagctgtacaatcgggttgatcaatcgcctgttgatgtgggggagcatgttttcttttgcatactgaacttgatcatgaacatgctttggggaggtacggttgatgttgaggaaggggccagtgtgggagccgagtttaggaagattgtctctggaattactgagcttctttctaaacccaatgtgtctgacttctttccgggtctatcctggtttgacttacaagggatgtctaagaagaatcttcagttaacccaaagttttgataggatttttgatagaatgattagtacaaggatggagattgagaaaagtggtgggaatggaaataatgatttcgtgcagtttttgttgagattgaaagatgaagaagattctaaaacacccttgactttaacacatgtcaaatctttgctcttggtaaccttatattatatgcttttctttcactatattttgcacattttgtaaatgtgattgtgaatcatatttgataagtttttctacattactgaacaggatatggtagttgggggaactgatacatcatccaacgcaattgaatttgccatggcagagatcatcaatgcaccagaggtaatgaagaaggtccagaaagagttagatgccgtaattggaaaagacaacatagttgaggaatcccatatttctaaattaccatacttacaagctgtaatgaaagaaacactacgcttgcacccaactttgccacttttagtgccacattccccaagtgaaacatgcgttgtaggagggtactctgttcccaaagggtgtggtgttattgtcaatgtatgggctattcatagagacccttctaactgggaagatccattgaagtttgagccagagagattcttacaggacagtcctaagtgggacttcactggtagtgacttaaagtatttcccatttgggtctggtagaagaaattgtgcaggcatagctatggcagagaggatggttatgtattccttggctacccttttgcattcttttgattggaaaatccttcatggccaaaaattggatctttcggagagatttggtattgtcatgaagatgaagacacctctcgttgctattcctactccacgattatctgatccatccctttatgagtagacctgtgtatactttaaattatgttttgtattttaagttttaaaagttatatataagctaacttggttgtaaaacaaagcaatggttgttgaatctctgattaagcctgcccactatattatgaattaagaagcaaaaagttagctgattcaatttttgttcattt

SEQ ID NO: 61370 - DNA, 1133 bp, Cannabis sativa
ttaaaaaaccaaaaaaaaaaaaaactaggtccgatggcgacccatcaggcctacaatcggaccatcggacccatagccaaaatttccccaaatcggaccctttacaatatagaccatcggatccatcgggggggtcccatcgggccatcggaccctttacagtaatggccatcggacccatcgggggaggacttcgggctataggatcggacccatcggggtccatcggaccattgtcttcccaaaaaccgatttccccaaatcggagatcttagcctaaatcgagccctaaatctaacaaatccgttcaaatcaaatcctaaagtcaatactctaactcataatcactcaaacaaataatatcgaacttaccttcgccattttgattttgatggaccggcggtgatgagggggtgacgggccaatcttcggtcgtacgcggtggagaggggggctggggcttcgagcgtcgttggggttggggttgggattcgtgggtgccgtggcttgagcgggggttagggttttcgtgggtgccgtgggttgagcgtgggtgagggtggtcgaagctgtgggttaattgtgggttgatcgtgggtgagggtggtcgaagtcgtgggttgatcgtggggggtcggtgagttgagagagagtcggctgagctttagaaaattaggatttgaaatgggaggggtagttttggaaaattggtaaaatggtcatacattacaaattttaataagtatgcatttagggaaaaaaattataaggtattgtaagtatggaaattcaaatttccctttcctcttacaaaaaacctattgttaaccccaaaaattagcaaatttaactttcaagataagtcgtcgataaactcggtattaacttcgaaaagtggcacttacaattttgggacttatccaagcaaatcagaagactggtctcgtggtcgcttgcaaataaagtgttgagcaagttggggagtgaaagaaggaggaagaggacgagatggggagttgggagtgaggttgacgagttaggagtgggagaaggaggaagagggcgagatggaaagttggggtgaggttgctattgggttttgtgacctaaataaaacccatttcaatctaatc

SEQ ID NO: 61371 - DNA, 874 bp, Cannabis sativa
ctttctaatgtttcctttttggggttgtcaggagcatgctttaggcacaacttcattggggattttgtatacctcttttacctttttctccctgattgcctctatagtggttcgctttctgggctcaaaaaatgctttggttcttgggactactggttattggttatttgttgctgcaaatttaaaaccaacatggtgagcttcttcttcttctttttttattttttttttcaagcttatcatggcgattcaagtttggactgatactgttctttttcatagtggaaggaacttgcatttttatgtcacacctatttagacactgaatttcctcatggacctgattttaaccttgaatctggcgcctattgttttgatgttttctcacataaagtgtgcaaggataaactaattttgtttgaccactacactaaatggaatctcgcatagttcaattgagtgttacatgcaccaatagtgtatgaaagttttaatcaatttgtgaccatgaatcatcacaaaatctgtcaagttactcatttgaaattttgcattgcatcagatgttgaaaccacacatgctttgtttttgaagatattttcatgtaggtatacaatggttccagcttctttgtaccttggttttgctgcttctataatctgggttggcgaggtgaaattccagctttgtattttcttttcaggtttaatttttccttcatttattacttaccttagtatggtccattcagggtacgtatctcacttctgtagcccgaagttatgcaagagactccaacttgcatgaaggaacagttattggtaacttcaatggagtattttggggaatgtttgccggtcaccaggtcaaccca

SEQ ID NO: 61372 - DNA, 1570 bp, Cannabis sativa
  modified_base (615)..(615): a, c, t, g, unknown or other
tggctaaaagcgaagtcaacaatgcttttattttttcaagattttcctcaatacccctcgcgttaactatgaatcccaaaaactttcacgaggagactccaaaggaacatttttttgcgtttagcttcatgttatacttttttaatttttaaagcattcagcgaggtctgaggtatgatccttactctttatcgattttaccaacttatcgtcgatgtaaacctccatgtttggccctttctgatttgcgaacatttcatttactagtcattgatacgttaccccagcgttgtttcgtccaaacggcatgactttataacaatagagtcccatgttggttacgaagcatgtatgttcttgatctgggacatacatttttatctggttaaatcaagaatatgcgtccataaaagatatcagctcgtgcccagtagttgcatccactaactagtcaatcctaggcagtggaaaacagtcttttgggcatgccttattcagatcggagaagtcaatacaagttctccaagttccgttaggtttcgggatgagaacaggattggctatccacgaaggataaaatacctcgcgtataaaatcgttgactaacaacttgtnaacatcctgttttagtgccccttgcctctcagaatccaagcgcctccttttttgtctcttttccagtagtttggatcaacatttaagtgatggcaaataatcttagggtcgatccctatcatatccccatgactccagtcgaattgatcctagttcgccttcaaaaagcttattaattgctttttaagctgctcgtccaggttctttcatattggttttagcaggtttctttcatattgaactcaaggatcaagatcttcctctttcttctcgtttcgtcctgccaagatcgtcatcaactgatgaccgacttttttatactgcaactctatgcgatagaaatcgcgagccagcatctggtcaccatgcaccactcccactccatctggcatttggaactttaaagataggtgcttgatcaaactgactaccccttgtccgatcagtgctggacgacccaacaatatgttgtaagccgagggcaggtcggcaaccaagaagtcttgcataatagtagcagttaacggtgcctcgcctacagttaatgcgagctcgattatgccaaggctagcaatgctatcctcggtgaatccgtaaagattcaccatacaaggccttaacttggcctttttgagccccattttctttagagtttctttataaatgatatttactgagctcccattgtctattaacactctcttgatcctcttattggcgagttgaatggttatgaccagcggatcgacgtgaggatatctgacgttcttctcgtcctccgcggtaaatgtaatggcaggttcctcagttttcaccttcttggaaggttctgaggcaaagaccgacttctcgttatttatttccttcacatatatcttttgagtgttattcctttcccatgcaatatgcggccctcccaaaataaccaggatgtcctctccttccacaggaatag

SEQ ID NO: 61373 - DNA, 881 bp, Cannabis sativa
acacagacaaagtcaaggaaacctttgactgctttaataattgtgttagaatcattttccataataacaaattacaaacctttgttcgcaatgcagtagacaaaaaaaatacaaatccttcaatacaatacaatggtggagatgctttaattagaaagtctctttttgtagaagcttatcaagctaacagtaatggtaaaaactaagaacaaataaagactttaaagaagagagaacagaagaagaatagctcgaaagcttaactctaataatgagctaaggcctttatttatatgcaagagaatacaaggcaggtacaaacaattcagttaaaataactgaaacaaactaattgaaaattacaacagtttattggttaatattccccctcaaacgaaaaggggtaacaaccattttgagtttgcctttgagatacatgaaccgatcagtagacaaaactttggtgagggaattagccacctgatctactgctgggatgtatctgaccgaaagttcttttgcaagaatttaatctctaacaaagtggagatcaatctctatgtgtttggacctagcatggaagatggggttggctgcaagagcagcagctccttgattatcaacccaaataactggaggagaagcaggtgatatgtgtagttctgacagcaagtgttcaagccattttatttcagcagctgtatttgctaaacttcgaaattcactctcaatactcgatctggcaattacatgttgcttctttgctgaccaagagacaaggttacctctaagaaaaacaacataaccacctgttgattttctgtcatcaaccgcactggcccaatcagcatcagagtatgcgcaaatgtccatagatgttg

SEQ ID NO: 61374 - DNA, 1954 bp, Cannabis sativa
gtttgtgatttagatttgtgggttgtttaaattttgtttggtaatgggtaatggtagtggtatttgtggtggttgaatttattggttctgactttacacacttattttatcttttctagtcaatattgacaaggttaacttctgattttacctttttttttagttgaaacctcaatgtttaaacaccactttttagcatcatccaagtcctgaagtgagcatggagctattgaagaaatggcaatataacagttaaagttcaatttttatatataatttttattttcctttggtagtggtgttggtggttacagtgggtaatgatggtttcagtggtaggtggtagcggtaggtgatattataagaagataaaaaataaaaaaaaaattaaattaaaatttctttaaagtttataacaaatttttatttttaattatatattctttagaatttttaaatattaaataattttaaacaatttttattttttttaagttaaattaattttttaaatttttaataaagtttctaaataattaaatggctggactaatataaatttgccacgtgcaaatgagtgtatatgtggaaaattcaacatggcaattaacaattaaaattggataacagaacacatgtttagaaagttttacagtaaaaaaaatcagttttggagaataattgctagtgtagtgaaactttaggggatttgaccgcaatttactcaataaaaataatattgtttaatgaataattttaaaaaacataatattttaataattacacacaatcctcaaagggtcaaagataaaaaaatataactgaaacccctcaattacttcttattacataattattgtgtatataaaatatgcattcatcactaacaagtattttatgtaatagtaatatttttctaaattactatttggtaataatttcaaatgacgggaaaataattgaaaattttacataattgaccaaaaattttaaaaaatacaacaatactttaacacagattttttttttttttttacgctttgagcttttttatttacaaaaatacctctttagtaaaataataaattatttttttagtcgttttatagttgtattatagttgtcatgaagttaatttttttgttgttttatagtttatttataattgatttatagtgatcgtaagattgatttctcgatgtttttttttttttttactttttggtgaacaaagtgtatttttgtaatttaaaacattacaagtatatttttataaataataatattaggtcgtaaaattataaataaacataaaaaaaaaatataattttaaaaattcctcaaaataatttttaatttattatataatagtaaacaacaaagagggagtgtacccaaaaaaatccaattttttattttaaaacattctctacatagcaccaaaaagaaaaaggataccaaaaagtatatataatttttttcttctttctttttatagaatctttattattcatttcatattttgaccatacaaatattttatataacgataaattatatttaaactaatatatattataatttttataaatagttaaataatttctcatttattatataatagtaaatgagaaagggggactataataaacaaaattccaaaaataattttacagattctatatagaacaataaaaaatctcaccctaaattgtcaaaaaagaattattattattattcatttcatgtttgacctatgtgacaagtgttttatgtaacggtattatatttatgtaataactttttagtaacgggtaaaaaatgactcatttattgtataatagtaaaagaggaaagaagaccatgccaaaaacttttccaattttttttttcagattctatatagaaccaaaaaaatcctaccctaaagttttaaaaaggaattgttattata

SEQ ID NO: 61375 - DNA, 1038 bp, Cannabis sativa
ataaactctatgcaaaattcaaaaagtgtgagttttgactgttgagtagttacactaaacactaacctcgtcacaaaattaaaactaacaaaacacataaaagtcaaattaatcacataaagtaaaatttgagcctcaacctttctaacaagctaagtaacacaattatcaaaaaatctcactattcatcaaatctaacttctcagctgaaccatatcataagtcactcaaatcttttttaagtatgcctacagaaccataattagtaaataacaagcatttgaaacaatttatatatgccaaatcacactaataatccatcacacccttaattctatatgattgcatcacttgctattctccactaatatcaacgatgcatgtttaaaaatcaaaaggtcttttaggcttaagatgaggcttaggtaaaggtagatgacataatcatttaggctaaaattacactataagcacaaaccaataaaccagcaactaaaattaacattatgtcacaaaatgtcatccattagttcaaaagattgagaaaagaaaaataatttacaacaatatgtaaataccactctctcaaacttatttattattgtatagcataaggagtggttaaactttaattttttctcttctttgctttccttatttcacatattttttttgttctttctcaacccctttttgttgttcttcatttttttttcttgatgacaacaattgaaaaagaaaacccaattaaaatattttcccttgaaatcaatcttcaaatatgctcatgatataatttatagaaaaagagaaaaaaaaccaataagtttcatataaaactcatataagtgtcaaagaagaaaaagtttaatattaggctcaaaatagggaactagggataaaattttcacaaggttagcttaaaaggcccaatcgtttttttttttttaaattgtctagatcatcatctcaaacatgcatcatttatgattttacctcacatagtaagcaagtaagttctagaattgattcttccat

SEQ ID NO: 61376 - DNA, 3032 bp, Cannabis sativa
gaaaattagggtttttatcttttttggcacttttggaggaagcaattagagagacgaagcgacttagaagactttcaaacaatattttttcgacgatttctttttttctactttcttcttatgttcttatttaatttgtgtcaatcgtttacaatgaacaagagtagctagacttttatttagagtattaatggggatttttttgacattttattatagttttaatatgatttaattctttccccaattttttatgtacatctatttcattcgttcttaatttcctttaattttatggtttctttacttaatgcctctgatatgttttaatttgtcacgagagtagaaaatttacatataagttgagatttctatatcctagtctgaatataagttactttagcaaaactactattgcataaaaattagtatttaggaattaagtgataatcttttggttgcatacgcactcggttagtgtgatataataattttttgattgcgtacgcactcaactagtctgatgtgggggacacattatgataccatggtgccctgtgtttgaagggttttgtgtaaggagatatctagatgctatctagatgactattcaattactcattttcgaatcgcctcgtgaaggtatccagacttgtcttggtagaatctttgcttctcaatcaaatggccttctttggagtagggaaatccggccttagcaggtcaacgagttggactcattttcgaattagagctatagcctaatttggccatttggttggatagttacctagattgggcctaggtctgagttgaccgatatgcgggctttggaattgtacaagtcatcaatccaagaatttagataataagtttttcttttttaggataaataaaatatctattaataaataaaatcagataaaattaattacaataactaataagctaataagcaaaccaaactatttacaataactacaaagaaaatctcaactaatcttagttagttcacttcaattggttgtcaattataccatgccctctctaaacaagtatattttgaaaattagagaggaagtatgaggtcaattactaaatatccatatataatatatacaggtcatagagtattattacaaacactatctgtttttgtattttatatatataacctaaacactatacgttaatgttatccaaaatcaaataaaaccatgctattatttaaatagaagtattatttaaaataatttgtttccaccaaatatactattattaacaaaagaaagaaaattcctcttaatgcaaaaataatcatttgaggtcggttacgtgtttcagtgtacacgtgtacgtctgttatttgttggataatttttaattataaatttacagcacaattctttgaattttaaatattatttttaaaaaaataaataaaatgaaaaattacaggagaaaataccaatatcttattgattgttgaaatgggtatatacatacaacaacgggactggaagaagccgccattgttgtttgccagtaaagcaaattcttgtgcttcttcttcttcttctttcctagttcttgtcaaacgcagcgttttacgttttctctagctctgaggcggatctgacgaggtttcttctccgccatttctcccaattttgtgttttcaatcccccaaacttgtctattagggatacgcgttttatttattctctcttttttcttgaagaaccgtaatgatttatgtccgccatggttcatactcgattgaattcttttatttactttttttgatttagtgtagggtttgggcttgtcgacctttggtttcggtgctttggatgaaattcaggttttaatttgtgtacctcttttgcttgtttgattttgagaacgtatctggaatttgttgtactgttatatgatttgtaatcgttgttgttgatttgtttaggaagcttggagaataaggtcatccaaaatgggggaagcagtcccaatatacctgagcattgttgccttcttttgtactgttggagccattgctcttgctgttttccatatctacaggcacctgttgaattatactgaacccacttatcaaagatatattgttcgaataatttttatggttccagtgagtgattttatttatctatgaagtttgatcagtgactcgttttcattgatccactttgaatttcgtttgattgtttcatttacattgatttacaacactagtttgcattggatcttttcaacgtttctgaaccctgtgaatttctgtatctttgacaggtttatgcattaatgtctttcctgtctctcgttttacccgacacttcaatatatttcaattccattcgagaagtgtaagtactctgtactcgtttttatgttgttataacatatctagattattcgttttctactgtcgatggtcctcaaccttgtctgtcccctgtacactttattgccttgtctgctctatctgatttgactgtgcaagagtgcagacaaatttgttctaaattatcacatttattcacatgcatgtacaatacaataactgcatgcataggaccttttacatgcatttcgcattgaattaataccaaattcccaaaatttaacaactgttatttgatcttagttactttctatttcatattgatataatagtacttaagtggacaaaattatcgttgtttcgggtggtcattggttagaaaaccatcacacctaatggtaaaaagaattggcagaggaaaagatcgaggaaggttttcatttggccatcaaacttatgaatatgctgcttattggactacttttatactagttttctttatacgtcatggatgttgttctttttttttctctacctggtcagatgcttgttataaatgaaccttgttcctatttttctttcagaactatgattgtacattgtctattttaatatactataattttctttagggagactagtttgcccattataaacatgctccatttta

SEQ ID NO: 61377 - DNA, 2004 bp, Cannabis sativa
aagagaaagttgccgaagtgccttcatatcaaacagcattggcacatgaccgccaactatgaagggtagtcatgaccgttagagtggaagtcagacggtcacccttacccctagcttgagtaaggtgggcgtcaccgagaaggaaaaatgacggactaataccttcgtaagcggaatgaatgatcaccacacacctaaggcagtcaaaccaatctagggggtatatactactacgtctacctcaactacaatgatctacatgggatttagtctaggggtacaacccttaccccctaaagggttagtctaggggtaaaccccctaaactaaagggttagtctaggggtatacccctaccccctacaccctcatggtacaagtcatacattttaccatagacataatgatacgcttaaaggtagatgagaacatctacattacactataactagtgacaacggacaaggggtctcggggagtcatcccaagatgatgattgtcacctccctcaagttgggtctcgggggctcaccccgcgatgatgattgtcgcccccctcaagttgggtctctggggctcaccccgcgatgacgattgtcttcccctcaagttaggtctcagggggtcaccccgcgatgacgattgtcgccctcctcaagttgggtctcgggggtgttgccccaaagtatgggcttcattctcgaaggtggtcgacgaccgtgtcacacccataggagaccttcgtcgtcagtgactatttcaatcccatgaaaggctcaaagacagttgtcaaccacaaaaaataacgggatattatcttaaaaatcaaacttcaactacctccaaaaattaaggaggtgattgagatagctccacgttggtcgcctctcctaagcgagaagcaccgactctttccattatataagggatcatccatgacctggaaagaggatcagctattttgaacacttagaaaaataaataattttcattctttgcaatcaagagcctgttcttgacctttgcaacgcagattaataaaacagaaagggagtaggctattaccaacatccagggccgaacctctttaaattttgttgtcttttatttacatttattataaatttcggtgttattaaccgcatttattatgattccgcgtcggttggctaaaaatccagttaacacctaccaagccaaatgttaaaaataagtaatctaatgctttaaaaaaataaaacaaaactaattgccctttaaatattacatttagatatatgattatgtaaattataattaaatattattatagtaataaaataatataattaaatattaatgttaataataatgatcaaaatatttatttagtgtaatcttttttagacgattagaaatttattcttctaattattgtatgttgcaattgatttaaaaatttgtaccattttaaaaacgaaaaaaaattataatcttgattaatgtaatataattaaaaaaaatcgattaaaaaagtataattatcaaaaaaagtttaaaactgtaatataacttaaaaaaaaatgaaatatgatattttaaaaataaatatataattatttatgaccaatttagttccggtaactaaaaaaatattgaattgattagttaaaatagtataagtgtaataaaatgttaaaaaagttttttaattaattttttttgaaaaaaaaaacaaaaatgagtattttaatttattgtgcaatttttcataaaaaaaaaaaaagaacaacgagtgtttttttatatcaatcaaacataacattgatggcatgttaactaataagttatgggaatcaatggtaaggtaatcattcacttatatttgtttacttacattattaaaattaagaaatggagaacctcattaaataagggagaaaagaaagggagaacttctcccaccaattttataaggaatgccactaacggtaattgactttaattgtaaagaccgcttagttt

SEQ ID NO: 61378 - DNA, 1328 bp, Cannabis sativa
  modified_base (568)..(572): a, c, t, g, unknown or other
  modified_base (855)..(862): a, c, t, g, unknown or other
gatcaatcagttacgcatacctaattattatatattattattgtgttttatgttatatacaaaatgatcttgggtttattattaattttcaaacatgttatatcagattgcctattgtatataatttagaacctataatttatataattaatatgtatatgttaattttttacaattacatattaatttattattattttttgttaaatttttcgttgtttaatcttaaaagtttaagggttttactcattataaaattctctttctattggtatcggatatgactaaaatcgttcaataaattaggagaattttaagataaaagttttagggtttatgtattttctttatgaaattaaatatgggttttttgattatattaattattgaataaaattgattatgcaaaccttattagacctgacattgctttcatagtcgatgttcttaggagatatttatttggttctaggcatgatcattgggttgcagccaagaaagttttgagatatttgcatagaacgaagagttttacgcttgtgtataagcatgtcgacaattttcaagnnnnnagttattcacattcaattttggtggttatgtagatgatttaaagtcaacttctggctatattttcacttttgttggtgctgctatttctaaaaaaaaatttaaatagactttaatcacatcatctactatagatgttgagtttgcgtatattatgggacatctttgcaagctttatgattaaagaatttgattttagagataggactagttggttctattcctctcctatactaatctattgtgataataatattgtttttttcttttcaaagaataatgagnnnnnnnntgcttccaaacatatggaaataaagtatctcactattagaaacttggttaagaaatgagacattgtgatagaatattgaaagatcgagttgatattttcagatcctctaaccaaaggattaagtgtcatattgtttgataaacatgttgttgatatgagcattttataatcttttgtttctttgggttagtgggagtttcttgttttatcttttgagattacgtttatatgaaatttacttgttaatgttatgaactactttgtgggccaatacttttatgattattggatgtgtatgttttcaattaggctttgttatattctcgagaataattgaattgaaagcatgtagttcatatcttgttgtaatcttcgtattttaagtatatttgcttaatgacaatgatattttgttggcttaattttttaagcaagtttagtgacactgacttatttattaagtagt

SEQ ID NO: 61379 - DNA, 1246 bp, Cannabis sativa
taaagagaaagaacttaacttaactctaatctctaatctttaatcttattaaagattaaagagagaacaagataaaagaatgccagaatgaaccttacctccggtgctgagaagaagatatctgtcccgcttcccatttctttttgaacttgacagaaagagagaaaagagagagttatgagaaaagaaaagataaggttatattcattgtatcaaatttaacacacaataaatactatttttgtagttacacttttgtcattatgattaatgatatactttaatacatatatttatttataatattttaaatatttaatttattgatagtgattaatattattttgctttttgactaatttgtctcttaaaatattattgtgcatgggagcataattacaaatattgtgctaaatattatatttatttattttttgtatcaaatttagcacaatatttacatcttgtattaaagattgtagaagatcataggctgagacaaataatgcatgttacatgtttaatttatagcgatggtagaaaatttgcatgtgattgaagtttatatatttgagaagattataaattactttagtaaacctgctattgcataaaaattggtaatagaaagataatcgtattaaatcataatcaatagatacaattgaaatcgaaagctctaacttttattcattgttaatttacctactttttactttcactattttttattgtttcctagttataattttcactcaaatttatttagccaaatagaagtaagaatttaattttaacgtacttaactacaatcctcgtgggatcgacctcactctttgtgagtattacttgtttaaatgatacgtatacttgcgtgttgcaaattacaacaacagaagtatttattagaccacatttaatatttttaggtcaatccatatccaatccaattatatattggatgctaaattttatcatctgttccaatctaattaattttagtcatctgatcgatccaatatccaatggatgttgaattagatcagttttatccattgatgtatttcatgtatatttattgaattagttctgatttatccaatattttaggtatagttttttggatcggatcgaatcgaatgcatccaatattttagatcatatatttattagattgaattggatgaatccaattcaaccaaaataaagaagaagtaaaaatttaattttaatattcatatatata

SEQ ID NO: 61380 - DNA, 2378 bp, Cannabis sativa
aaaatttgaatcttcgatcagacacttggaaggtgcctagattgataaattgtcaacttcggcgctgggtgctcgaggcccaaggttctcaaaaatcaacttgctccgaatcttattcagattcctcaaacatgttagtgtgtgcctagtttatgtatcaattcatgttttgaccactttgcattaagactttcctagaaacaaaaaccctagttaaggatgtcaaccttggcaccgagtgaaaccctaggtgcctaggtgggcttttgggttgcaggttcattcatctctcaattcttggattaggttgctccatgtattcatggtacaaaatactaaaagatagtgagttagattcttgttattgaagtacgaacttcaattaggagtgcccaaagtcaacctgggcacaaggctagggacccctccctggtcgatatgctatgacttgggactactcaacttcgagatgccatctttcttgtcaagtgtcaaaaatttatttccatgtcatcagggctactcttgttttataaacatatgtcagctttacatttgtgtgaggttgacttaatgacgtgaactaagctcgtttctctcaaaactacccaatgggcatcaattttgacaatctcagacaattgtttctattcatcaagcattcccactaagaggaggattttgaatctccattccctattgaataatagatttttaaaatttaaggtgatgatttcttgagtgatttcctttgatttgagatactgtgaatcatgcagatattggaatatcaacatttactcttatgttcagctattgtcttactattaactctcttatccgactatctatttatgtgaatattgatgtagtttgtcttttgttaagttgtagtcttgttcatctcctctgtttgatagcaaaggaggccttaatcaattccttagctttatagcataggaggccttcaacatccccttagctttgtagtggaggaggccttcaacatccccttagcttttcagcggaggaggtctttatcatatcattagctttatagcaaagaaggtcttcatcatctcctcatctttacatcaaagaaggtcttcttgacgactgtcaacgatgtgtagtaattggtggctgttcttttgttcaattgaggatgtgacaaactctagaattaatatgccaaagatgggggtgatgtcttccctatctcgtgtgccccttagagtggttgtaagtgtagtctccattttgtccttggtctttaaccttagaggtctttgtcgtcccttctgttctattcacaacgaaagaggccttcttcttctccttggctgtcttgacagcgaaggaggtcctccacttcctcttggctattatcacagtgaaggaggtcttcctcatccccttgtcatagtcgaggagttcttctaggcgaatgtcattagtgtgttgtaacattcacattctactctttggttgccaatgagatggtcgatactagtcgttgtcaagaacttgatagacaggtggtagataagtgagatggctcagaggtcattgggtgttgaccttccaagaagacttggagtcgatcactataaaggtagtcatagtgacattttccacagggaagtttcgactatgagtggtgaatcaattctaccacaaggagagatttttgctcacctaaaccaatacatgagctgcttgcttggcttcaactctttttaagagtgacccacacttttcaaggtctgttttgattagaatagttggcgatgcatgactattaaccatcaccatgtccatgatgtttgaaatttcattgttactatctaagttttacttctcttgcccgcagtgttgttctctttgtgtttagggtgtttaactttgaagtttctatgtttaagctaactaatgtgagtgagatagaccactgttgaagtgtagtgggttattgcttgtgtgagtgagatagaccactattgaagtttcaagtatgagctcactttatgatcataagtgaatagtgcagaaaaatccgctagatcttttgtataagggagaaatcacaggttactggagaacctggtttgatgattttaattcatagatccatgttaatgaaaaatatacaggggaggaaaaaaataaagagtagattaaacccgtgctaagtactgagtctaatactttggaggagtttagtaaccaaaagaataccacaattggggcatcatctaactcccagagggtttccttcaatcaattagaaaatgcagcatcctgcttccagagagctttctataattgatgatgcttttcttttatttttaatttttgtgattcgaggaggaacactt

SEQ ID NO: 61381 - DNA, 1226 bp, Cannabis sativa
cttcttcttcttcttcttctaatattttaatttaatattgtggcagattttaaaatggacaacaacacttcatgggttcgtaagaaccctctgaagaaggattctgtcaatgtccttctgatcgttctagtagtactttctgtactactaactctgattctgtgtgtcgtgacaattatttgtcacgcgcgcagaagtgacccaatggctagcgccagagtacaccctgcacctgtcgaagaaatcgacaatcaagataatcaacccatctaaagggatgcagcctcaagaaaaggaaaagatactttttattttagtttaaggaaataatttgaattttatacacatttaagatatttaattaattagttagatgtctatgttaacaatttaaattttaaagttccatacatgtattatataattttaaaaaagtaataatattctattagattttaattatatttaaattttatgtagaacatctctcacataagatacataagttgatcattatggtgtgttttgctaatcttaaacatcaattgagttaatatcaactaaacatcattaacatctatttagaacataattaaaatctgtaaaagaaaattgttcataaaatcagtgttatttttatttaaaataataaaaagagaaagacttattgatatatatattgtcactaaatacaaaatagaacttagaatgaaatagaattagaagccaccatcgaatggacctccaaaagacataatatgaccatgggcacctcttattttccaatcatcaacattgtacaaattttttgcatcagtgaagatttcagcattgtcaaaatcaacttgtttatgagattcatcaatggttgtcatttgttcaatatatgcatctttactttgatctcccactgaacgaaacccgtttacccatttcgggattaggttgtctaggcggactgtatgcctctccaccccattccatgtacgcagctaaatctgtatttagagcactaaatattcgtcccggccaaaatccaatttgaatatttgatcttccaaattcaaaccaccaatttccatttattttatcctataaatataacaaagaaagaaattacaattagtatttttgcaaattaattggtgtgaaatttagtgccagatcctacacaaattttgtgaaatagtaaatccttttaaactttaattttgtagtaacaactt

SEQ ID NO: 61382 - DNA, 1912 bp, Cannabis sativa
  modified_base (815)..(817): a, c, t, g, unknown or other
  modified_base (1602)..(1604): a, c, t, g, unknown or other
tgattattaaataagagttgaacatttgatatatgtatgaatgttaaattattaatattattattgaataatttatattaaatatcgaaaaattcattattcttatatatgaggttgtgggcttgtagctatacagagaactaagaccacttagctatgaataaaataattagtaacatattaaagttatagaatctttaatcaatggttgctagtacagttcactaatgcccgttcttcagtgcaagtaatctcgatttgaattatagatgtagtatgacatcaaagtaaatatattgtatataataaaaattttatatgataatgactgatataatgaagttgtctttattaacataatgtttatcataaagacctagttcatattataacgatgatcaatagtagatcggcctaaatcctgagttatcatgaactcctgttcatattattagtttttttattcactcgttaaagtttctcagagaagatgatttttacaacttttgttttatgaatctaataatgtgcatgtttgggaacatgatgtaaaatcatagaatcttaactttcctcacgtatcgaatactgattctctttaagtgttaattatagaattagaatgttgtgcacaaatttagatggaatctaaattatactttcactagtgaattaatagtgctaaatgataaagaagtaattagaaaggtaaaatgataatttgaccaaaaataaatacgaaccaacacatggaggactaatcactggaattttttttgaaagaattacatgttcattgattaagaaagtcgatnnnaatcacagggggattaccctccccctgatacaaaacagccaactcactagcaattctagcgtttttagctacaccatccgccaaagtattaaaactacggttcataaaaaagaagcgaactacaaggagtactttgatcacattgacaatagaataaaataagcttgacaccttccaatctggggcccctttccttgcatttaaggattgaactgcaatctttgaatccgagagaatatgcacttcttgccatccaaactcaactgcccagttcaaagcaaggaaaattgccctgagttcagcttcaagagttgattgtgcttgaattttatgagccttgacaaaccagctatcaatggaggaatctattgcaattgctgcaataccagcatctccttgcacccatgaagcgtctgtaaagaaaacatgcatggcaaacctacgtgtcacggggttccaaaggcactgcatttcctaggctcactgcgtgtcactggaattgattatatcaatcgacactgcagttaaactctataaatataattctataattactaagagtccaattctatatttatagtaaagtaatcatggaattaatattcaaagattatttagttgatgagactcaataaatattctagtttataggagcttgaaattataggtctatgatcctcaaattgctaccttgaaacaatgtcaagggtaggaataaagagtggtataaagatgttcggaaaaatctattttgaattaacaaatagtaattatttatttttgtnnnaaataaataattttttcaaattaattaaatagggaaaagataaaagttgttaagataattgttaagataaaagttgttaggccaaaagacaccatctttatcctaaaagacaagggtaggcgcctagctatgtcatgtccttataaagtttatctttttgggttaattaattatttaattaatttaattgggtaaatatctcatttaaaaagtgattatagatatatcaaggttgttgagatattctctcaaatagttaagagattttctcataaatatcagtaactgaattcagttatagatattta

SEQ ID NO: 61383 - DNA, 922 bp, Cannabis sativa
cttgagcgcaagcggaagggcaagatggttgtgactgagtcttctaagcagacttggaggggggacactccggcggtgagccacgactctgggattcattccgaggcggaggagtacacggtgccgcacgacattatgctgaccccgattcctgcggatgaggagaggcaaaatctccgagtggctaagcacaactacactcttcatgagtacagtcgggggcatgccgaggtggaggccttaaagaagattctgcgggaggagcagcagaacactcttcacgaggacgccttttgaaatttgtgggacctgaatatggacccgttgacggattggttcaaccactttgtcaggcccaccttagctccctttgccttggagatgaccagccagtttgtctcctacctgactcagtttccgcccaagagatacgcggcttgcgcttccttgaactccgtttaccaagtccaagacatcagctctgctatggccgcggtgagtatttgtagtttattcccccctttgatattttgtcgaaggcatctgacctcattcttgtttcttttttcagattactgtcgagacccgtcgcctttccaagaccctgatcgatcatggtttcgtcatgtctgaatttgggggcattgacgaagccgtgaggatccttcaggatttgtctgccgaaagacgggcgttccaggaggaggctcaacagagggaggcccttgcggaggcaaagttccgggaggaagccaagcaaagggaggcgaagcaccaggaggcattgaaggtggaaggcgaggtcgtaggcagggccagacgcgagcttcgggaggccagggaggctatggacgagatggctgccaagttgaagtccttagaagagttgcatcaggtggacttgcagtctacgaccaacctg

SEQ ID NO: 61384 - DNA, 968 bp, Cannabis sativa
atgtgttatattttttaaaaatcacttaaaaatattatgtgttttttaaaaaaaaaaatttggaccctggctgggttctaagtgcatgtcttgctcgtcttaaccaagattcagtcttatttaaggatatagagtaataaacttgaccagatattgaaaataggtcatgcgcttagtagtactctctattttttaaaatacataattagtacttgtattttcaataatatttatctaataaaccttggaatattagaaggaatgccttgcactttaatgactctaaggaggtggtgaactagatcttagtctagagttcttgactgatagagcgaagagcgacaaggttaagttcactcaatttgctagcattttatgctccactttttggatggctcgtaataaagcctaccacgaaaggtaccaaatgggcttgttattctatttctaacttgaagggtgtatgaatttaataatgcaaatgttgcatcgttgcctaaaaaaattatgagaacatcgtgatacatttacaccgccttaaatattccagctcattactagtaacaataagccacgtcagctttgataacgcgcttttagtacaaacaatccaaaaaatttaatacggacaagctatccgaatacgtacaagcgcttttgcctatatgaataaccaagattgacagtaaactatccataagtgcatctccaaactaatgacaagatatccagagagacaattcatatgcggtacaagattaacagaaaagcattttaatttctcaccgcaaatttctttctttctttctttttttttcctttctcaatctctctgtttttctttttctttttcttttcacttttcttttcttttctttattgtatatatttcgcttttcccatgttattatataaagaagcaattacaaggtgatgactatatatatttttgactgttatgattgaac

SEQ ID NO: 61385 - DNA, 549 bp, Cannabis sativa
agcttcactctgctagcaattgacccccgaaactaaaattttagcggcaaaattcctaaaacgatttcatctatttgcctccctcactttttgcctcgatgagctctgcaacccagacatcaccgtcgatggaaccccaccagactctctccctctccctctccctctccctctccaagggttgggctcttgttggccgagatgcccctcggagctccaccgtaggtggtggcagttctcaatcaaatgagacgtatgaaggatcggacctcacattcttgaagctcttgacgagaggaaaccaaaaccaaattctatttgttcgttgatgaccagagatggtcaggtcaaagccaaaaagtttcggctttgatgagagagagggagagagagatcagaaaaatggaggagaaacttaagggatgacggggttggggtttcaaggtgctctgagttaatatgtgacctcaatttctttacatgtatggtcgtacacacctcgttggtgtggagccgagtaaaacgtgaagagagggagagagagagaga

SEQ ID NO: 61386 - DNA, 569 bp, Cannabis sativa
ttattgtatttatggacgatatccttgcgtactctcaattcgaagaggagcacgagcaacatcttcgaatggttctgcaacgactacaagaacataaattgtatgccaaatttaaaaagtgcaagttttggcaatctcaggtgtcatttcttgggcaaattgtcagtaaagatggaatcaagggggatctagggaagattgaatctgttagggattggccaagacaaaaaatagttacagaaattagatgtttcctgggtctgacaaggttattaccgccagtttgtaaggggattttctaaaattttaacacccttaattgagctcactaaaaggaatcaatgatttttgtggacagataagtgtgaaagcctttcagaagcagagattaatcacagctccagtattagccctaccttctaataaggaaaatttcgtagtctactgtgatgtatccagacagggtctggggtgtgtactattgtaagccgatcgagtcattgcttatgcctttcgtctgtttaaaggatatgaacaacgtgttggaaattatttaccaggatcttaga

SEQ ID NO: 61387 - DNA, 1122 bp, Cannabis sativa
taaattaattatttatttttattagctagggaaaatttatcactttagtatattgcaaacaaagtgtacaccaactttgtttaaaatgttatttggttatatagattttatttgcaagtataccaaagttaattatatttgtaaaatattataaaataattaaaattttatgttattttatgaaatattattcataaatttatttatttattatttcataatatttatttacgaatttttatttataaattatttattaaaattaatatacaatactattaaataaattcattttatttctccaaaaaaaaattattataataattacttatacatgtattcaatttatttttaaataaatatatcaatttaataattacataaatatatttacaaaaataatttaattaacatattatttaaaaaattaaaaaatataattaacttaatataaataattaaatttaagtttcttaaaaaagattttttttctttaataagaaagttttttctaatcattctaatattagttaattattttattatataaataataattatttatataaattatattaatttattatttacataaattttcttaaaaaaatttactttttttttataaataatcacatattttaaaaataattacaaaataacaccaaattattaaaatatttaaatacaaaattttatattttcaagaactattattttaataaattatattaattttataattatattaatttattaaaaagctaaaaagctttacttgttaattaaggataattacacaaaatattcatgtaatttttttttatttataattaaaaactttaaactaaaatttttaattttttattcactaaaattttactaaatacaaaactgaaattattttaatcacacaataatcataactaaaaccaaagtatactaacaattaaactcaaacaataatccaactattaaaaatatttaataagacaaataatatttatattatatatagaaatatatatataaatatatatatgtatatataacacatttcacatttaataagataatatttcagatttataaaccaacaatattttacacatattaactaca

SEQ ID NO: 61388 - DNA, 981 bp, Cannabis sativa
caataatcaatagaaagaacatcaaatttcaagttctcaaaatttataaaaataaataaataaaaaaacagatctcataaatacaaactcaaatatgaaaacctcaataaaacactaaaattcaaacattaaaaatacacacaataaaattcgaacccagaatttaacacacacatcagaataaaaattaaaccataaatgaagatttatgctactatttttcgaatttcggtatttattagcaacaaatttaatattttaagtatttatgttaaaatttttttaatagtaaagttaaaatttcaatataattttactaagtaattattattaattaaactacataatctattttttatatataatttaaaatattttatatatttgccacgaagcgcgggatgtttactagtattctattgttattagtgtaattatgtatagactcccacataatttaatttaaaaattattaaaaaaaaattattggtaagtaagagactattccactcgactcactatataaataaagatataattctcatacttctcacccaataaaagagttttatatcatacgaaatgggagaaagttgcgtgaagctcataggtacatggacaagtccatttgttttgaggactcagattgggcttggcatgaaacgtgtccagtatgagttcattgaagagaagtatgggccgaagagtaacttgcttctcaagtccaacccagtccacaagaaagtcccagttctaatccatgaagataaacccattcctgaatccttagctattcttcaatacattgatgaagtttgggcctcatctggaccctccattctctctcctcatccatttgatcgctccgttgatcgtttttgggccacttatattgatcagaaggtagatataattgtttattacaccgtatgtattttattatatagtattagattaaattatgttatatcatatttctaa

SEQ ID NO: 61389 - DNA, 1278 bp, Cannabis sativa
gaacattttaattttttaatacactaaccttgaaatacaaagtcggacagcgaaagaaacttagtgaaagtgagcacgagcgtcgagccgtcaagcaaaccagactatcactgattcactaattcactgtcacacataaatccataaataaattataaacacatattatatttttcaatatccactaatcaataattaatataatatttttcacctctataagcattgccaaaatacttctccatttccctctttgcttacctcctgttcaacaaattgaaacggataagctaaaacataataaacgtatgccaaatcctaaacatatctaattatgaagtccccatttaattcatatattttcatctgctattttctctacttttcattttaaaaagtaatgtcaaacactcttctatttttcattcaaagacataatgttctacagttatggaaagcatgtatagagattagaacaagccaaaagaaaaaacacataacagtaatacacaatcactcaaagcattatctttaaaaaccatggcttattgagagctgttatttcttcttcatcaaatctcaaattaagtgcaatttaaactaatatacttacgaccagtaatacacaaatccaagctagaaacaacttttcagatgggtgaaatcatttgcttaaacataagaaaacaatccaaacgagtttgccatattttgatagataaggaagagcaatgaatacccaattaccataatcaaaatgagtttccatataatgttagacaaagcatttaaattgtggtctggtgtgaagtgaaagtgttagtttttagggttttttattttttaaataattaatatatataaaaatatatatataatatatttaaattgtgggttggcggggtttttcgggttcaacccgaaactggtacacttaaaaactcaacctgcgaacccgcgcaaagggtacttgttcaaccacccggcctttttttaaaaaaaaaatttgcgagttcaccggttcgatttatacttcttctttatatagatatatagatacttaaatagaaaaaaacaattaaatttttaacatcatacaaaaacaatccgtaactttccattccaccaaaagaacatctataaagaaaacaatagattagtatcaaatatttagtgtgtatttgataatacttttttaataaattttttattttttaattaaaaaagtaaaaatattttctaaaattatgttcaataaaattattttcacttttcaat

SEQ ID NO: 61390 - DNA, 814 bp, Cannabis sativa
accaaaatatttatcaagatttttggaaatagaataaaaataatatgaactgaagaataaataatcaatagagaaagtataaaatgagacaaataattattaatgcagttgggacgttaactagccttagttcatgagtcaatcttactcagtaagcttgtgcttgcaattgcctcaggaattacacataatgtatgttctcgagtttgtctaagcaaagtatatcaaagaattcaacccttaatccatgagattaaaatgatatttatagtagttcgggaattacattaggttttccctttcccctactaaggagtttacagtaaagaatattcgtgggctttctcatgaagtcaagtccatggagaagacgatctgttgactaggcagatcgaattgtaattgaattggtcaacaccgcatacggtaattttgggatattaatctaaattaattgcataatatttgttgtagaaagtctcccctttaatcttgattcagtgcactgttgcgatctttcaactagagtttccttatttaagtacatgaatataaagggaaactggaagggtcttctgggaacgtggtgtcttgtccttccggtctcgtgatactggaaatattttttgggctcggtttgtcgaaggcagtagactttaggagtatagaaccgttgcatgtttcaggaaggtaacatccagatgggcttggcccattttttctttaatgatggtctcactgatgggtcctgaatgttgatctggagtccacgtgtccaatgcctggataatagaatggtaaaacagtattttga

SEQ ID NO: 61391 - DNA, 840 bp, Cannabis sativa
cttgaaattttagtttgaaaacttagctagccaaacatggtatagtatagaatatagcatgatagaaagattggtttttgtatcatatatttattattaatggttcatttcaataagatcaacttcaaaatactttacttcttagtggaaattaagtgtagtatggttgtcttttgacctttttttttcctttcatagaaatggaggttttaagatttctcaaatcaatagcttttcccattttaagctaataatatggattttcccccatatttgagtgtttgtttgtgttgaagtgtctcgacattaattgagcttagagctaaagaagaagaaagacagagaaagagaatgaagaggaaagaaagtctcagttattatagttgaagtaaatgtttatatacaaacaattacaaacaaacagaacctaacaaactcaacaactaactgaaccaaactataactaacttgctagtgacaactaatagtcctaattgtcactaactaaattaatagctctaacatccccttcaaactcataattgaatgatcctcaattttgaatttgtttctaaaatttaaaaatctttggcttgagattgatttggttagtccatcagctagttgttcaaatgcaaaaacatgtttgatctgaaccatgttgtcgagaactttctctctgacaaaatatagatcaagttctatatgtttggttctagcatacaaaattagattttgtgtgagcataattgtgcctgaattatgacaccaaatagttggtggttaaggcattatgatttgaagctcaaaacaataggtagtgcaaccaagtgggttcag

SEQ ID NO: 61392 - DNA, 2899 bp, Cannabis sativa
caggaacgctgaacgaaggaatcctggctgagctagccatactgcgcaaagatattggtagggtctcctggagacaaaaaggggacgactcaccctctaattgtaaggaccgtcggccgtgcgccggacacattttggaggcggaactccccaaaaactttaagatgcctgagatggcagcttacaccgggcacacgaacccgagcgatcatttgtcttggttccactgagtcatgacggtcatgagagtcagcaacgacgccaagtgcttatgcttcccactaacgttaagcaggtctgcgaaggaatggttcaagaagttggaaccaggattggtggactgctagaacaagttgtaagttagcttccgaagatagttttttgccacgagaaagattaatcttgaagtcagtgccctgactaacatcaagcaactacccacggagacattgaaatatttcaaaaagaggttcaaagaagaagcctcgaagactaagaaagttaatgatggacaacagcttgcacttcttcaagctaggatccgtacaggaactccattctggaacgagttacaacaagaaggacctgcgaacctccaagatttccagaagagggtccaaaagtacatcaacttagaggaggacgagatagtagcttatggaggaactacccgaccggagtggcaggatatgtacccagagttcaactcccgggaaccctacctttggttactccacaaatgagcggtatacaattctacgctacaccaggatataatctgagccaagccttggctctcacatcttcgcactacaggaacccctctggagtaagcggacaagtctcgtctcactccgctcctgctgcaagcctaatcggaccttctcaaggctcccagagcaagaagtcctcgaaagctagcaaccggacggaggacaagcgccaaaaaagggggtatactccccaatacacccagtacacagagctgacagactcacaagagcgtttgtatttcgccacaaggcaaaatacgcactaccggagaccgcctcccctataccgagatagttcctgaagggatcccaacaaaagatgcgagtaccacaacgacattggacacagtaacaatgagtgcaaaaaccttaagtatgagatcgaaaatttgattcagttgggtcatctctataagtggatgaagaaccggctaccccatctcaacccagttccggcaggggggctctgcccttggggacggcatggggtgcgccaagagtgttggcaccagctgcaccctcgggaggacctccgcaggcccctggcctgccaccaagacccaacggaagagtggctatgatctcttgtgggccccatattggagggaccacccaaaaggaactaaagcgctatgccggggccgttaaacacaacgtggtgtgggaagtcaattactttcacgaaagaggacgcaaagatggtgtgttttcctcaccatgacctcctggtcatagaaactcccatcgccaacaagatcatggctagaatactgatcgacagtgggagttctgtgaatttattgtttataaaagccttcacggtgataggcctcacgaaccggtatctgtcgccaagtggttcccagctcacgggattcaattgaaccacacttatcccaatgggaaaagtgaggttgcgagctaccctatgtctggacacaacccagagcacttttaaatactgcacattcatggtggcagactgcgcaactgcttacaacgcaatcctcgaccgaccggccctagtagactttggtgcagttacatctatccggcacttgtgtttgaaattccccactcaggaggctggtgtagggaccatgaggggcaatcaaggtgaggccaggcaatgttacaatgtcggaacccacttaccagtattgatggtctgtgaaggtatcgagccaaatgtggcaaatcgaggaagtgtcagtgtgcgacctcaaccccaccaagatcctccggctgggaaaaagcctagaactggaggaaaaagaaaaaataattaaagcactaagggcagccacagatgtttttgcgtggtgccaatgagacatgaccggcataagtcctcatgtaataacccatgttttcaatgttaacccgaatatgccaccagtttagcagaaacaacgtcccctcgatcaagtgaaggcagaagctcttgagaaagaggtggacaagctcctagctagtggcatgatccaggatgtgtattacccagaatggctggccaatctggtgttggtgcctaaaccaaatgggacatgacgggtgtgtatatattttaccgatctaaacaaggcctgcccaaaagactgcttccccctaccgcggattgaccaaatggtggacgccacatccgaattcaagctattatctttcatggacgcctacaccggctacaacaagatcaagatgcacattgcagatcaagaatgcactagcttcaggaccgataagagggtatactggtaccttggtcatgcctttcagactaaaaagtgctggtgcaacataccaaagaatggttaaccggatgtttaaaggccttctgggacggcacatggaggtgcacgtggatgacatgttggtcaaatcaaaggcatgtgcaagccatgcagacgatcttgaggaacgctttgaaatggcttggagatatggaatgaaacttaatccgaagaagtgcactttcgaggttaaatcaggaaagtttctgggatttattgtcaggtagcgggggatagaggcaaactcaaaaaaaattcaagccctcctgaacatgccttctcccaagaagcacaaagacgtacaaagcctaaccagaaaggttgccgccctgagcc

SEQ ID NO: 61393 - DNA, 876 bp, Cannabis sativa
tcatggccaaaatcgttgtgaaattggaagagtttaaaactgtccctcttacttatgtctttcctcatgggaggaggcttcctatacggaactatggactctgtagccacgtcgactatttcaggagttgttgttaggagggtgaagcatgtaaagctttcctccttctcctttgagtcttgtggtgtgggggaattattaaatttcctctttttgcctttcgcttggccaaatttattgctgttactcttacctccaatgttttggcctttggagggctgaccacttatgctggcaggtgtgctgggcggagctgagggctatcctccacttaggacatgtccagcacctgcatgtctcccattttgggcttgccagacagcttcttcaagcttaacaaagccttctgcctgatcaaggaaatcaaccatgtttttagtttagtgtcggcggatgtccttccacaactcactcaaaggtagtatgccactcatgatggtcgtataccttccttccatcagattcttgactttggtagcttcagccatgaatctttggagatagtcttttagaggtccccctggcctctgtttgacttcaactaagtctataagacatttgcttggaagacgagaattgtgtgtagaactttcttgttaacgagttccatgaatcaaacctcccaacagctagtttgaaaaaccactactgtgcggtttcaaagaaggctactgggaagattcggcatcgggtatcaacctcaacattttgcgaatccatctggatttcaaatatttgatgtgagtcaagggatcttctttccctgtgcacatcctccatgtaggcatttaaaacttggtaggcaagagcagtgca

SEQ ID NO: 61394 - DNA, 2786 bp, Cannabis sativa
  modified_base (1175)..(1178): a, c, t, g, unknown or other
ttaaggtgagtattaattacaattttttagagcattaattacaattattcagtcaacttttataatattatttttttttaaatagtttacagtaccgaaaatagagtttttgatattttaatttactatgtgattttaaaaattttcaaaaaaatttttacacagaaataatattataactataacgaacaccataaaaaaattgaaaaaaaatattctaatgtatattttcgaacataaaagttaatcaaaagattgtaatagaaggttgagaataacacttctattaaactaattcttattattgtgggtatgtaattctctcaataatttatttattttttattaattattttaaaaaataataacaatttaaaacttattatataaagagtaatttacggtataaatacctaaatttataaataaatatttaaatttaatttttgccagttataatattaagttatatttttaaaactctgtaggtacctgataattaaatgttaagtcattatccacatgtcattttttattagtatatttgaattaatttttttttaaaaaaaaaatagtctctttgaccaatcaggaattgccatatagtaatttattcaaaatttaatataaaagttctaaaattataatttaagtattattaccgttaaaaattaaacttacatatttatttataactgagaattaaactcatgaaatcataccttaaattactcgtatataaatagatataaatagtagtagtttcaaaggcacgtgattgaagagtagggtagtgtgtgatgatgacgtggaatactataattattatagattactagacaattaagtagtgtataatattatatattgtcaaaggcatgtgggtttgatgagtctctattatatattgtattcttattttcttcttattatttttaggtgtcatattcctattattatatagttttgatgtttcgtataaatatagttttgacattcatgaccaataatattattagaacactaattaattaatattttttgaatatatataaatatatataaatactttcttaaatagatatattgatgcatactctacttgtttcgacatttaaaaaaaaaattagtctacttttttatgtccatgcacattataattatttaagatattnnnnaaaattttgaaaaattcagaataatttataatatagaaaacaatatttaaacaatatatttcacgcgtgtataaaataaaatagtcacacgtacaatacacagtttgaaccttatttcggtgtgttaaattttttaaatttcttaaaattttgcaggatgtcttcaataagtataacgtacatgactataagaaaaaatttgactaaaacattatttcagatactgttaggctatttttaacctaagttttagatcattttttagagttattttttttctttgtagttactttttctgacgctttacgcttgtttttttttttattttaaaatcccatagatttaaagtgcaaaatctgtcaaatatcgaagagacgagagatgagttgaaaatcaaagaaaattttagttgaaattcctgaagcttgtcgcggcgagcccttatctggtcacgactaatttttgctagtgagaataccttatggtcgcggtgagatcattaacagaaacgttgaattttgacttatcacagtcgtcgcgaccaggctatatatgtggtcgatcgcggcgaggtgttccgtatgggatgaaggataattttgtaattttactattttaaagtgtaaaactgattgttgtaagagggtttcgaatttttaagtcaattattcagaaagagaaccctaaaaacaaaaagaagaagacttaggaagcgagcgtggcgatccgatcgagttcacatttaattgattttatttcaatttgttaatgtgatttgtttttttttttttttgttttgctttttagatctttgtgatttgttcatatttgtgttaatacatgttcttggctacctttaacatgatttatgatcctaatataaaatttgaaaagtgaatattataaatgctctaattgaacaaatataaattttgatgtgaaacgagaatattcacgtagcttgtgtgatcttttagattattactcaatacaaattatatgttattctatctcaaagatgcaataaatgatatataatttaagactttaatgatccgaaaagaattaaagttatttttataatctgtcatcacttaaagaaagaagattaataaatagcattaacaattaagtaattgaaacaatttgattcatacctctaatcttttatccatatttaaataacgttaatcgcttttttttttaaatttttgacaattaatcaaataaaaatataagtccaatttaatagtattcaatttcaattttatatagttcaacttaatatgtgtacttgaaacgtatatattggttagtttataatttttataaaatatcaaaatagataaaagtgcattactatattataaaattttcttgtatataagttatttctcgttgatttcgttttcatacataaatgttccactttagaaaagtgaaaaaaaaaatgtaccaaaaaataggaatatgagatcgatatcaaacaataaatatatatgtgtatatatatctatatattatattagtatattgttacgtgcgatgcacgtatgttatgttttatattaagtattatattatgagttcggaaagaaataaatgaat

SEQ ID NO: 61395 - DNA, 1209 bp, Cannabis sativa
tgtattcttatttttaggggttttccacttaatactgaaattttcaattttcttattttttttttacagtaaagtgattaaaaaaaaaatactatatatatatatattgtgttaaatttttactgttattctgcggttataattttttagttgttccattgttattttaattgttctgttttattgttttacgattgttctataaaagacaatatttcataaaaaatttcgtatgacagtaaaattataaatttttacctaaaatttaatattttttataaaaacacctatttttaactcaaatcacaaattgtgtaagtagtcctaattttaccaaccataatttattttagcggaattttcaaaaatatttttttatatatattttatttataattttatgacttaaaatttcaatttacaaaaatatgcttataatgatcaaaaataattaaaataaacttttctcggtaaaaaataagaaaacaactaaaaaaataacaaaaaatcaacagcataacaactgtaaataaataaattataaaacaatctcattacaactaaataaaattataaataaactataaaaaaataataaaaaaataataatttattatttttactaaagagttatttttgtaaataaattaaaatttacaactaaagcatgaaaataaaaaaaaaaaatcgtgttatgtaatttttcttttaatttttagttatgtaatttttttttttattttatactacaattttttaataagtaaatgtcattttttgtccctccaaataacgtaaacagatatatccaaataaaaaaaaaaatggaattttttctggaaattttggtagaagcttatggttcggtagtagcgtctttgttttagattacttagaaaaattatgatctaatacagtatatattatagttaaataattttttttaacgaccagttatataaattttaaaataacttattttaagtgcatataaaacaagatccaaaactacttctttttagatttttggcacatcctattttatttaattttttttttttaggatgagcaatataattatttagaatctcacacaaatttttaaaaaaaattaaataatttagagtttcaaaaatataaaatataaatatgttctatatgcccgtaaaataaattaatggtaatatacattattcaaaattttatata

SEQ ID NO: 61396 - DNA, 1351 bp, Cannabis sativa
gtgggaatggattgaacaacagctttcaataacacctctttgccgcctattgaaaaaatcttgtcattccaagcatgcatcagcttccaaatcttctctttaatgttgctgaacaattgagatttatcacgttcactataagcaagtaagcctaaataagtttcatgacaatcacaaattggcatgcccaagatttgttggaaagaattttgaacaaccaccggagtattaggtgaaaaagacatcaccaatttgtcagtgttcaattcttgtcccgaagcacgatgataaatatcaagagctcttttgatagctccacaagatctgtcatttgctttacaaaacagaagactgtcatccgcaaataacagatgagagattgttggagaatgatgtgagacagccagcccttgtaaacatccaatttgttcttcgtatttagtaatctagacagcccctctgaacaaataaggaagaaatatggtgagaggggatctccttgacgtagccctcattgaggaatgactgaacccaaaacttctccattaataagaaaagaaaaggagtttgtataaaggcatgtcataacgagagtaatccatcttatattgaaacccatcttgcccataactgcgcagccaagaaaaagaccattcaacactctgtcaaatgctttgctcatatccaacttgagagcagcataaccttttttcctctctttcgatgttttaaactatgcaccagctcaaaagccacaagtatgttgttcgtaatcaatctattagaaaggaatgcactttgtgtctccgagataacagaatgaagaacttctttgaagtgcaaagccaacatctttgaaataattttgtaaataacattacaaagactgattgggcgaaagtccttcatctcctatggttttttaatttttggaatcaaagtgatcaaagttttgttgaaagttgctggatttcctccatgatttaaaacattcaggactacctttgtcaccagatcacccacaatatgccaataatgttgataaaacatagctgacataccatccacaccaggacttttatcagaacccattgatttcagagcagccaatacatctgaagcagtaaagtcatgtaacaagaattcattttgctgagatgtaatagtagttaagatggtagacaagacatgagatagtgcccaatgatcctcctccgatgtgtaaaaagtcttgtgttgtcgagtgaatttcgcaacaccaaattatatagtattattaataaccaggagaaatttatgtggaaagacaagtgcgagtattcaaccgaaaatggcgagtactcgactggga

SEQ ID NO: 61397 - DNA, 1468 bp, Cannabis sativa
aaaaattgtatgtaaaaagatatgtataattttattttaaattatattctccttacatataaaataaaatatacatttgatttattaaattttaaaatatatttgtatcatttatagtaaattttcaaattattatatttttacattaaaatattaattgtatatgtaatttttttaaaaaatatatatataaatatgtgtgaattggaatgaattagttacttttttgtgtcaaacaacatccaatccgcacaagtacgaatattgaatttttcaatccaatccaatccaatctgcacaagtgcagatatccgcactttgcggattggattggattagattgagtattttataaacacccctacttagaatgtctttttttttttaatctaaaaactaaaaaagagtttaaagaagctaagtcatcataaaagtagagataaaaaactaaaataatataatattaggaaatttattttagggctaagcataaaatttagaaaaaaaaatcgtttaaaccgacctaccgaacagtgttggaactgaaaccggtgaaaccaagaatcgaaaaaaccgctaacaattaaaactgccactgaacagtcgatttttttgggtagtgaaccaatcgaaaaaatcgaaaccgaccattatacatatatatattaatttattaagtttttttttttactttatgtattgtagttattgataatatattattattttattaatattaaagttgaaagaataagataattagtttttgaacattaatttgtatgattgtgattgtagaatgtaaaataatgtacttataaaataaatttgatcatattttaaagaaaaaaaaagttcgaatttggcaatttaaaccgatcaaaccgaggttcaaagttggttttaagataggttctaaattggtcggtcggtttttgaattgcaccaatccagaccgaaaaccgaattttagatttttatatagaaaaaaaccgaccaaatcaatcaatgctcaactctaatttttttagcattttaattcgaaaaaaaatattttttttcacttttttttttgtcattgtacactatcactttctgcttcctcttcttcctttttccttagcaaaaaaaaaaaaaaatataataataataagcaaaaaaatcatgataccaatgtccacactgtaccaagtaccaagcatgaatttatgaactcagttatactctccttggtaataatattcttaacaactttcaactttgcatacttgggtaatgatcatcttccaccaccaccaccaccaccacatagtcttattagacttttacaatcagctaagctaaaacttatacaagagaacaatcctcattcttttcaccttttattgtctctccatataaccagcagtatataacatagcaaaacataaaaaaaaaaaaaaagaaaaaacatacttatattaagcca

SEQ ID NO: 61398 - DNA, 924 bp, Cannabis sativa
agcaagtttcaaaaatgcaattcatgtaatatttttgtgttaagtatagagatgaattataaaaccatattaattacaataattagttcggtaaaatggtccttttcttttagttcattttccaacttagcctagttttgataattattttcgaaataaagaattttttcataagagaatactcaaaaatgataaaaagtttgtactctaacaaatttatgagccactgttagcataacgataaacaaaagctaaaggactcctctcatgcaaccaagcattgtttacaattgttaacaattaaactaaaacgagaggtcattattaattgactatgaatagtttcaatgacaggattttaattttgtggtgacttatttattataaaaaaaaaggagctttctactattttggcctataattattaaattaaaaaatttacatttaattttttaaaaggcaatattttgttcgtcagggctatagccccccacatcaatgttaatggtttctacgggaatttttaattttatgatttttaaagtataaattttatgatttttaaactttaaaatataagtttgcaaaaatagaattttatctcaaaaaagttattttatgggaaaattttaaaaataaagtagaaaaagagatgaagaaaaaaaaaacaatataagtacttggttatcctttattcttacctcattttctcatatttttcaatttttttattcaattttcccatttcctcataaaattaagttcctctaaaatgtcttgggtcgaagcccattacatagcccaaacaatgatatttaggcccacataggcccaaatataggggaccggcccaagacattgacgcgacgagaaccaaagttcggaagagaagaaccagaaactcaggtctcctctctctctctc

SEQ ID NO: 61399 - DNA, 1915 bp, Cannabis sativa
gaggttcaaaacggtcagttttaatataggttctggattagtcggtcggttttcagattgcaccaatccagacaaaaatcgaattatggatttttatataaaaaaaaaatcggctaaactgacagatgcttagccttagatgcagctcaattttaaactcttagctattttattttaccttttagctattatacctttcttgttctgagtgctcttaaagcaaataataaaaaataaaattgaacacatgaatctaaaaagaaaaaataataaaaaattacatagaattttaacaaatataaatattcttattttgagcattaatttaacaaattttgaaattaaaaatttataaagtgtaattgtggaaagggaggtgatggtcaacaatgtaaatatatatatatatattttttttttacaaaattatctatttaaagaaattaaaattttatttgtgttaattgtgtttgctgagatattttcagaaaccgattaattagagcttaaagaaaatacaaaataataaataatagacaaatggttttttacgtggttcagacattaataattcctagtccattgtattagccttatcggtgagtatttgagtattataagtgtttacaatgctaactttatattcttttgtttctcttaagaataagaaagctttctaggaatcttggcagaaattttataagtaaaaaatgttcaccttttgtacataaaaaatatgggcatttatagacacatgcgtgggtgagggcatacccttcacccacttagggtttcgtactcagcatgtttctttagctagtgattacaacttggtgatctaaccgttgggggccagggaacctcataatcgtgtggtgcacaactgcgacatcccaattagtaggccttactacatgtgtcgtccaaaagtttcaccttgcaaaattggtgtataaacaaactgttgggcaaaaaggagctatagtacgcgcactactaaggtctgacataggggacaagatctaatttggcgtcagaagatatgcaaccgtcaggtttagcttcagattaggcattatggagttccaggaagctttggctaaggccttcctagatcaactgattcgccaccatcctggagcgtgtgaaacttttgtttacttccagtagcaacaagataagatgagaattctcggagtcctttctacatttactggtgaggagagcctccgggtagtacagcatcttctgtaaccctagtaaggggaagacataatataacaatatgtaatctgaagtggcacccttctatgattgccatgtacaagtcatctaggaacatggataacatttacccccaagctctcgagcttacaactttctcccggaggcccatctcatgtctctctctatatatatcactcgactctctctctaacactctctatctcagttcattctttctcaatctctctactccctatctcggtggacagccagacctcatcatcgaaaagaatcacacgcatttacctcaataatgggtaagtattatccaaagaatttctaaaatgttcagattaatatgtagtttatttttgatagatctgtgtggttgttgtttgcattggtgttgttttgctggtttttttctttgaaatggaacgatctggttttgttgccaaattgggtatttttaacaaattatcgatatatatcaatattttctcgataattaagttaagaaagtaagggatgataatttttgacactttttcgatgttatatcgatactatttcgatcaattcattccaagataaaatatagcacaacatagtaaaattaatcagacaaggcataatcatcgataaactatcaataaaaaaaatgtcagcctattgatggtttatcgat

SEQ ID NO: 61400 - DNA, 1095 bp, Cannabis sativa
cttgtcgatctcccacatagctaacgttacgaccagttgttaaaggagcactttctgcataaatggtagtgtaataattcaacccaagaaaatctatagacccttttaataactttgattcttctttactgaatttgggcaatctgtttcccgctgctaatcttatacttcggggatagtgtccaaaagtaactggatgagcaaacctgcaacataattaattaggcagttttcaattcaaattattattattattattattataaacaccttatgtatataatatgaagtactacattgctgtgacattccctcaccatccaaacaagaaatctagggctctagaagctgcctttcgattagctgtggtattgtattttggctcgaaccaatgtgtaactatggtaattccaattttccccttttggttaggctgcagttaaattaaattcacatgatcaattaacatagtagttaaattaaattgtaatatacatatatataaatatatcctaattaattaaagtacttattaccttgtatttctgcctatacaattttgtggcagtggcatgagaaagaagcaaatggtgagctacaatgtaaggttcagttgctgagttaccaattgtgcaatttccaaggtagttagagcatcgaccaggcgcataagtaccgaaagtataaccattgattgtaaatgcattgggttcattcatagtcacccataattttacacgatccccaaatgtcttaaaacaaaaattggcatagtctgagaagtctttcctattcatcattattttataagacatgaattgcacgaaaattaattatacatttgtattatgctttattgacttttgttagttctagaagcaatttatagtaataactaacatggtatatttcaaaagataaaaaggatgttatatcacttacactattttagggctcaaccaactgccatattcttgttcaagtgctagtggtgtgtcaaaatggaataacgtcacaaatggtgtgattcctacgttaaaatataaatttagaatattaattaaattttgaactttattcatgcagtataaaaat

SEQ ID NO: 61401 - DNA, 1028 bp, Cannabis sativa
gtttaccttatgttttctctatgtgtttgttgggaatactggttaggtccttcaaatggtgggtgtgtcgccgtaacttaatgtcatgcctgcgttcgcatgttccttgagtcactgcgacacacccagccatttgcgacatatgaccaattttctcttttcttgcttaatcgcaggttatgactagttggttttctcgaaacagtgaggagtttccattgacccaatgctcatgcaagaaatgcatgccctttaggacactggagactcctcagctatttctagagatactctgctagttggatatgtgcgatatagatatatatgtagtcgtatgttgtggctgatcagatttctcgaaatgttgggtgtttcctagtaaactccatggtcatgctcaaaaataaatgccccttgggtcactgggaaacttccagccattttttgaggcactctattagttgcgcatatgagacttacaccttgggagggttggcttggttctcaaaatggtggttgtgtctcaataccttaatactcatgtggcgacatggtcattaggttattgagaatcacccaaccatttcttgagaggccaagcttaccttctaaattttgaagttgtgttttttatgcgggtgaggtcagttacattattcctgcacttttaccacagtgaaaagatcttctatctttcagatgagcgacctatcggacaaccaaatgctcgactcaagaggtggggctttcgctgacaagcatgataaaggcgataacttcatacaagcttcaatttttgaagaagaagtccctgtcactaaagctacgactttgggtccattgtcttttgaagagatagaaaggatggttcaggaactcgctgaactaggggcaatcgagattcgcgatagtgaatccacggtgtccgccgaagaacatctcatccactccaggcatgcccctgacttcgaagtcaaggagatgggggaagattaggagattcttgaccgcgagtcaggggaagagga

SEQ ID NO: 61402 - DNA, 2872 bp, Cannabis sativa
  modified_base (1194)..(1206): a, c, t, g, unknown or other
aattatactattttaattattattaaaataaaaaactaaaatattaaataaaactaacactacgtggcttggcacgtaacaatcacctagtatatatagaagcatcatctcataaaacagacaattattcacggttatataaaaataataatgagtctatttacccttaaaaaataatagtaataataataaataaaaaaaaataagccttgtttataatgcattgcatggcattgcaggtgtttaagaaaacaattgcatgactctaaagagacttaaaagcaattatcatgtagttagttaattatgttactaatattgttcattgagtttgtaaagactgattaggtgttaaaacattgataaagagaatactctaaatatttattgattcttcaaaagtatacaaaaagtaaatatattttaaatttggtttaattgttaattaggggttttattctaatattatttttatgttgttagtttgccaaatgagcatcttagaatgaatatactgagttgtttaatttaatatgtacaaattttttgataagtttttcttacaaaataaaagaaataaaaaaagtagtaagttttaagtaatatgtacatatcttactattataaaagtgtggtaatggtgtctatattgattatagagtaaatactattttggattctatattttataaaaattaccaattggactctctgttttattaaatgacaaaatagagtctatattttccaaaacagtacaaataagaccccgaactgatttgttatcaaaataaaatttaataataatctgatttaatggtgttatgacaaaactgtttatattttctgtatctgttcgtattagaaattgtcttcaagttaattatattaaaataaaaagttgtcaaaaattaagctcaaggtcctatttttatcattttgaaaaatacagggtccatcttatcatttaacaaaacagagtgtccaatcaacaacttttacaaaatacaggatccaaaatagtatttactctttgattataccaattttactcctaataaaattataaaattataataatagtaatatttttagacgttgctgtctataaaaatttgtgacaacacataaattattaatattattattattattattattattatttgaaatcaatattattattattattannnnnnnnnnnnntattattattattattaataacatgagtaatagccaatttactctatttcttttgtcacatgtatattatcacattatttatatgcataattaaataatttagtattttttgtaccattttttttcttgtgttatataatatttttaatttacttatttatttttatatcttcttaagtaattatcacaaaaataattatgtctctatattttagttaaaaatctttatatatagtatttttttacatacaatttttttattaaaaagtaggagtgttcacataatttgcaatctgtagtttcaaactctaattaattcggaccaaaccatttgagatcggaccaaatgaatttggtgtcaatgatttgatcaattcggaccgtttaaaattgtttggttcggtcacggttttagaaatctcggtagcaattcaaaccaaatcaatccatataattattttatttgtacttaatatatatttttggacaaaatgttgatatttgagaataattttaagtagaatattgatattgacttaatattgttatgataataattttttattgttagttatgtagtataaaaataaaaagaaataccgaaaaaataaataattattgtacaaaaaaatttagaacaactataaaatacaaaccatgattttaaaccaaacaaatctgtgtttgagtggattggtttggtttggttttaaatttttaaaaaaccttaatactgatttggttcgaaaattttcaaaatcagaccaaatcaatccgtaaacacccctattaaaaagattcaaaattttttataataatttttgtaaagctaaaatctcttacaatatttatttaattaagttagtggtgtgataattttgaaataattttttcatttataaaattaggtatttataatttaccccaaaaagatatttcggtagacccctaacctattttggcatacatgagaattttttagtttaatttttatcatgattgtgtatattatagttatttaggacaacctgtaaattttcaaaaaaatttgaatactaaaaataagattcaaatattttgtcgcacgtgtgactattttttcttatacatgtaataagtaattgtttgattttcattttcaatattgtaaactatttagaattttgtaaaaatttacagatgatcataaaatactacatcgtacgtacatggtcataaaagacacttgaattaaaaaactttcttagatactgaaaaatataatgggatctactacaacacccgtttattatagattttctctaagtttattctcttaatttttttttaaatgattacaggttgaaaatttaatagtatatatagtaggaagcttttctatggtgcactccctaaaaaagaatgtacggatgcactccttttaattttttttccaaggttgtgtacatagtagttgttaaagttattctgcaaaattttaagaaatttaaaataatttagaatataaaaagcagtgttcaaacaatctaaaatatccactttaatgtttgtctcttacattctttctctagtataataataaaatatgtattttgtaacttgtactataattaagataagatgtaaaaattaaattatatacatttttgttataattatttatgaa

SEQ ID NO: 61403 - DNA, 715 bp, Cannabis sativa
taattccaatcccgttaatggcaccagctgcagattctcctatgttttcacacgttcaaaaatcagcggagttctatcaaatgttcatgagctgccctcgataactctttcaatatccagctcatgatagaattagaataaaaatagattctaatccaactccttaacataaagacccggacctggctgtcaaagagtggccattttattttacatagcttgaaaatcaatggatcgattagtcaagaaacgaccaaccaatagccatctgtcatcatcgatctccgataaaccatcgtctgctttttcaaacaacaatccttcctcatcatcatctatcgcaaatgccatgacttgcctttccatagatgcagatactgcctgtaatccatatactagaaaagccaaaaagagactaaaacaacaaacacaaaaactcatagagactatacaaaaacaaccatgtcaacgcgataaaactctctatagtaatttacttttagtgcatttaatttgtgaacaattcaaataaatatatacaaaatatataaaaaaaaattcctctaaaatgtacattaatattttatattttcaatatgggtcctcacaaatatttatgtccgtattgaatacaaccatgaaagaagtctcggtctaccaatacgtactttataaaacatacctattacaaaaaaagaaatgctaattaaaaaca

SEQ ID NO: 61404 - DNA, 557 bp, Cannabis sativa
cccaaggactcacccacaacacaagaccgccgacggcccacaggaacatcattcgtgaaatttacaaccacctccttcagcgtcgtgtctccctcacatgcctgtgaaggagtgtggtcggacccagcgtcgtccccaacctcctcttccacctcgctagaaggaaggggtacaaagtacaacttgtctgccatcagcttgtcacccactcgaataagcacgctttttataaggcagggtaaagacaggaggtgatggcagagcttcttgtcatagtctgccctaaacaacttaagcaggctggaggaatactcctcttctgtaaggatggggcggatgtgccgctacaaaagacaaaaaggggagttaaaaggacattgtgataaggtcaatgtttgacaattgatgaggatacaagttgaggaatcacttactgggcattcgaaagaccacctgtactccatcttgatttgaaaaaaagaaaaaattctctttcccatgcttccctgcattagaacgaacacccaccaccaacgcatcagaaggaactttcttat

SEQ ID NO: 61405 - DNA, 904 bp, Cannabis sativa
gcttgtaaacaattcgattctatgttaaatcgatggattttacgttgtattccgacctgtaaacccaagagaatagcctgcaactccagctgaagtggagcaatttccctgttgactacagtagaggacgcatacagagaacgccccccactgtcccgaaccacacaacctatgcctgacactcctccgccacttttaactccggcatccacattaattttcatccgccccagatcaggtgccccccatttcgaattttccctcctaacccaactcacagcatcagctcctcctccctgaaactcagtcaaatacgtcctacaccagtccaccatctcccctgccataggagctgtcccaccatgtattacattgttccgtacgttccaaatgttccatgtgagtaccagagaaaactcgaacttatcctgttccattgccgagccatcctcatcaaaaaagaaagcacattttcacccttcagccgtttcatttcatcctttaaaccactaacagccttgaattccttgctccttttgcactcccataaggcatgaatagcagtttcttccacatggccagtacacctttcacacttcttattcacagccacaccgcgtttggccaatgtaacatttgtagggatccaattagaagcaagtttccacacaaaatgtttgattttgggtggaattttaaacctccataatgctttccaccaatctaccaacaccttgtcattggactgatattgctcatcaaccaaggaacttgccatcttatagccacttttaactgtatattccccattcttactatagtgcgacatgattttatcttctaattcccatcccatgctaggcatagaaagtatgagcttcgcatcttcacgattaaacaccgc

SEQ ID NO: 61406 - DNA, 1537 bp, Cannabis sativa
cgctcttccgatctagagagagagagagagagagagagagagagctttttatttatttttatttttatttgtgtataaatttagattttattttatttatatagacttaggtttaattttgtgtatagtgatttgggtttatttttgtgtatagtcagaatttatatgtatatttaattatgtacgtacgaatatgtgtatttttttatatatatgtgtatgtatatatatgtacatatgtacgtatatatatatgtatgtatataatatgtatgtatgtatatatatgtgtatatatatgatgtgtgtgtgtttttatatatgtttggctcatatcaaaataccattcaacaacaatgaaaaaataaataaatcttttacaatgaaagagaaacctaaataaaacgtaaattccatgaaaatataataaattggtaattttaaaataaaaaaaaaatagtaatttgaataagttggtaattttaaaatattaaaaattaaattggtaattttaactaataggaaactttataatgaaaaaaaaaattattaatttcaataattagaaacttaaaatgataaataacattgttaatttaaactaatttgaaactttacaatcaaaataatatttgcttacatgaagacattaaaattttaaaaatataaaaataattgttaatttaaataataagttgaaaatattaaaccgaagatagcataaaatattgtaagataacataaaacattgtaagatatcataaaataaaatctgataaaataattttgtttgtattatcacctagtgataaatttttttccacacgcacgatttttttagacccgtttggagaggttgagtcagtaaagattcttaaatacgcttctctcaattattcataattttttttgtccacatggatagtttgggcttgttgtatacctatagtgtgatctattgctcatttgattgtttctttgttaaaaagtttgatacatcatctcctcacacgttattgtaagttggcagacttattaatagtttgcttacttatgagaactgtggggagatactgccaaaattttgacaaaaaagaagcaatcttaagagcgtagattgtactatatgtatattacaaacttgaatagaatatgttctttacccttttagtaatggagtgagaaggtgaattaggacacatgcacattttgaactttgttttgaactttctctttttatattatgtagaaatatggtgagcgacaaaagttggatgactttaaacagacgctctatagagtttcgtaggggtgtggatgaatttattggagttgctcgaatgcaaataaattctattggaattactcgatgcccgtgcatgaaatgtctggatgtgaacttcgagagtccagatagtatttgggtacatttctttatgcatggcatccaacgattgtacatgacctagtattttcatggggagaacttcacgcaaccagttgtagaaatagtagacgatgatgaaaaagaaatggc

SEQ ID NO: 61407 - DNA, 1412 bp, Cannabis sativa
aaaaaataaaatatatatcagccctaaagtattcttccccagcccactcgtccccacactcgtccccacactaccccagcacactctctctctcacgataccctctcaagtagcagaccctaaaattttccccagaggctggcgcaacagacgcagaccggagaccggtgcgtggtccaccctctgaagcggagaccggtgcgaggtcctccctctcaaacagacgcatctcaagtaagaaatttttattcattttttgtttttttgttttttttttttttttttgcattttagatttttttttgagagactgttgggttttttttttttttccattccagatcatttttctatttttgttgtttttctatttgaaaatgtgattattttgtatatgattatttttccattccagattttttctttctctctcaattcgtttctcctctttctctcgttgtcattttgttacctccctcactcccagacgagtcgacgatggcgtaggtcctccctcggtcacagacgacaatgcacaactcctccctcagtcacacctacaaataggcttatttggtaagagttgatattaatttatggagcttaatttgattatgttaatttatatggattttaatttatgtgttcaatctgaggcaatagaaggattaggtggaagtattgatgatggcgattttagggatttcactaatttttgggttatttgtaaatcctatgcattaaaatgtgatatcaactaacatggtgattttgctgcccaaaagacataaataaataataacatatgaatttcgttcggattgacatccttgttatttattcttacgagcaaggtttattttttaagattcagagttatgagagaattgtctattgctgtagagatgtttgtgaagattgtactagttagtgtttctaaaaaaaagaagaagaaaaagaagattgtgatacttgatgctgttttctatttaggtgtgtattgggtttgtttttgttctgggaagcaaaaaaactattagtttactggaattggtaaaattaataattttgtttcatccttttcaaaaaatacataaataaataaaaatttgtttgaactatccagggagatagtgaaatggttttgttattttctaacatttttaaaatatattaagtaaagcagtttgttatgtgtgacatattatataatgattttagtaaaaatttgtatggttgggaaagttaaaaaaattgttgtggattacttcgtgtgtatgcgtgtgtttgtaccttgggctttctagtatccatttatatccccaaacttgtatatgagaaatttcatatgagttgtgtgtactttttaggattatccttattaaccatctctgattgtgttctgtcattgt

SEQ ID NO: 61408 - DNA, 2818 bp, Cannabis sativa
agccatggaatggtactcactcagtagtcagccactttggttttctactctcttttttatcttatgttttaggataatgggtatatttgtaattttaagaaatccaaaggaacatcacaaacaaaaatcagtacatatcttatccataccatactcatcatgtttacacattattaaatatctcacctttcaccgtttgatctctgtttttgagatattttggagttaaaatgtaatagattttgtcagacgaagttggtgttaggataatggagattggtagcctcaagggaaaagctcttccaccgccatgtctgttaccccaaaacacagctccaccacttcggcctcgcattaacttttcccagctttctcacgccgaccacaccttgacgcgaattcagacctctggtatcattgcttgccttcgcgccaatacgtatgacctatctcggcttcgcaattgacatactttgtttcaattaggaacatgttgtattctatgtttcaattagcattattatctatgttagtagatgaaaccggaccactaattcatccaatcacttggctgccaactactgtcaattggtcatggtgtggaacacatcgtactgtttagttactttcctttcttgtagtgcagagttggcaatggaagctgcccgtgctgcacttagtggtggaataacagtggtgagtttatttattattgttaaatgagacaatgaatttaatttcgttattgtataggcaatatttgatctttgggtgtaatgaaatgtgacatgacgaattccaattgctgcttcaacagtttcattataatttattttaacaaatcattaataaatagcaaaatatactaatctaaaatccaagtagttgcaaatattgatcgaagcacataaggcaaataacaaaattcaaagcccagtttccttttgttgtaaatatttgtgttggattagttagaaacttgtatttgtttttctttgaatgattatcgccaaatgatgagttaatattccattttctatcttttgtttctgtagctggagattgtacggtcaactccaggtgtgtttgaggttgttaaaattacatcttcccatgctctctgtttagctaacttttctctttcttaaaatttagcttgataatcatttcttactttttaaactcaggttcttaagcagctggtgaatgactatcccacaaccgtcttaggagtaatcattttacctcaccttctgcatttctttacattattgtaatttcttgcaggaatagcctgtttcttgttatttaactcaagcttgtgtcaaacatgcatgatctttctttttccaaaaaaaaaaaaaagaaacaagtgtatgaataacatagattcctctgttttagaacttataatctgctttcccatctaaagagagactaggttcatgagactttttctgtttagaacttttaagtaatcttaaaaattactataatgaatgtgaaagtgcattctcacatttagcaaaatgctgactttctgcgaaaaagcctctttgtgtctaagaaaatgtttcttagaattgtttcatgagttttaagtggatgagttcttcaggttggtactgttcttaatatcgaggatgccagaaaggcagttggtgctggagccaaattcctcatgagccctgcaattgtgaaggtaagtttataaatgccttcctaatttatatttaccacttttactatagactttccatgttagaagttaaaggaagcaccagttggattgcttatttgtgtttatttaatgttttcatcgttgcttcaggatgttatcgatatggatggtttccagaacggtgaagttttatacatacctggtgcaatgacccctacagaggtatgaattgatatgaaagaacacccatttctaagaattctacatgatttcagttgagtatgacttatattataattcatgtcttcttactctactcctatctttttacttaatttttattgatgaatgatgtagatctaaatagaagagaagagagaaatagaattacttcatcaaaatatttttttaacaagaattgtacatattttggtaattttgttaagccagaaaagtgatgaatacaactattatagataacaaagcttagaccaagtatcaaacttaaaagaaagaacattaaaaaaaaactatttcaactaggtaactaactctaataatgcataataaactaaattctctagttattcagttaaatgaaactaaatatgtataaatatcttatccagtctttatatttgtctttcataagtatgtaaaattactcatgtgatcttcttcaatgaatctctgagcattttatgtatccttgcattctgtttgagattgtaactttaactttatccttcaaggagtacttaagcatgtatatatgttttacagatattgtctgctcatgattcgggtgccaaaattgtgaaggtgagtcttggtaatttcccctgctaaattcgacaacatgccaaattgtttcagatatcatcagacatttatcattttcccatcatgttcaagaaaatgtgaacccctttgctttgcaacatagggtttgtaaaagtttttaactctctttttttccttttgtttaattctcttttaacaagggtagcatatcttaaaggtagttacttctgaaattgtgttttatcaaagtgtattgaacatattaattaaattgttactatttcatcttagataaatttatagggatttaagtttataatctacatcttatat

SEQ ID NO: 61409 - DNA, 932 bp, Cannabis sativa
aatattttagcatcaggcacgtcgctatattttgttcttgatatcaatttttaagcacgagttatcaggaataaaatattaagaatgactatagtcgcaccaaataattttctggaatgaattaaaaggttttatggaacgaaaaaagtcgttcctgatgacaatttttgttgtagtgacatggattcaatcattgcttcacgagctgcatatatctctccaacaacagttcttctccatatttagtgtgacaaatgatagcaatattttctttatttctaatccaattctccatgctggcacaaaaatattgtaaatgtcgtttttgtcaaattagatctgtcacactgtatccagatagtcttgtctatgtattttgtgcatgttaatcatttttttttattttcagttatattgattatcatgtggtttctacgtgtttagtttgttagctttttgctctagcataataaatacttgggatctagataatgttataaactaactctttttagcaatagaaatttttccttgtcgccttcagtttttcttgttaccttcttgatttcttgaaaagaaaagtgtagaaagtcagtacagagaaaaagcttgagtagctctgtttgtgagatccgaaaactcaaatagtttggttgttcttgttcaatcataaattctcgtcgttttagattgaataatagagtttttattatatatctgtagatattgtttgaaccgagaaacttttttaaatgattagatgaatgacatttcttaaaaatcacatatattgatttgatttttaccatacctatatatcaatctttagattcaatattcaagtaggaaaactacttcagaaattgacttttattttgttctacacagatccatgtcaaacatgtgtcagctctagctcaaattgttgactc

SEQ ID NO: 61410 - DNA, 1765 bp, Cannabis sativa
taattaataaggttcaaagtgaagtttaagaatgcttggagcagaatttgtgtttgagaagcgaaaactagcgaacaaggttgcatgtcaacctaggcgtagggtctagtgctatgtcaacctgggcgctgaccctgtttaggctctctagaaatctcgtttgctccccgagattacttgtatctttgttatctttgatgatgaaaaaaatgcccgaaacatttttttgggaaaatgattaaaagctcgttgacaaaatgtcaacctgagtgttgggttcagtttttgggcccaataaatacttgtatcttaatctttgacaaaaacggagaatatgtacttctcaaaaaattccttggaaatagcccaggttgacaaagtgtcaacctgagcactttgatcctgcgttgacttcgtttgtttcgcaaaagtactcaaatcttaattttttgatgaaaataaaaaatatgcctagaagatttcatttgaactactgatggaagtggcccaagttgacaaagtgtcaacctgggcgttgggaccctattttggcctccaagtcaatccatttctcccttgaaagtacttgtttcctcattttggatgaagacgaagaaaatgctctggatatttttctagtattatggttggaaatgccccaagttgacaatatctcaacttggatgctgggtgcatggggcacctggtgctccgggtgcttaaaagctaaaagtgctctgattctaattttgttgcttcaaatatattcgtgacatgtttaattcatgtccagtacaaattttgactcatttacactaagatgggcccagaaactaaaaccatagtagggttgtcaacttgggcgttgaacacccgagttgttgtttcgtgtgtttttagcttccaggccttagagttggattcttcatgtcttcatagtacagaatactgaaaaatagtgagtttggaaacaacttagcgggatccaaacacccattcttgagttcttagagtcaacctaaacgtaggctagagacccctccaagtcaactgccatgactcaaaactactcaacttcgggatgtttactttcttatcacgtgtcaaacattaatgtccacataatcagggtcagtttccaacccttgtcacaatcagggttattaactgcatgatggtttcttatatttggcgtgtagcttcctcttattctgccattttagcttcttcatctaagaccagttgctttaaacgttctacctctaggtccttagagagattgtagtcttcctcatcttctttgtcataatactctactcgttcatctttttagtactcattcgaatcatcttttccattggggttatcttgatgaagttctatgctgattggcatttttgaggggatcaccacttgcaactgatacttttcctctctttcactcgtcgcctaagcgtcagctggaggaaaggaattcgaagcatcaataatgggatcttcagtgatgttacagaccgtctagccaatcgaccgtgcaatcatgttcctcatggccaccattgttttttatgacaaacaaaagaactttcttcagctctcaatgaaagaactaaaatgtttactgaaatttttgaaaactaatattaagaaagattaagctaaagaatatggaatgaaaaacgaaggtccacacaaatttttacatgatttagacattaatgagccttagtctacgtgatagttttataagcttttagctatagag

SEQ ID NO: 61411 - DNA, 2021 bp, Cannabis sativa
gatattcctaagataggagggtgtggagtagttgtgttgggattatggttggaccggagggagacttttcccttcggtgtatggtttttgttttccagatttgtaattttgcttcttttgttgttgttttcatttattaggattgaacactttttttttttcacttattctctgtttgttaatttttgtagggaattttacagtcatattagcagaagatgttgcattaatggttgccttggattggtctctcactcttggtcttcctcttcatgtggtggagtcagattgcttagccttggttttggctctcccaaaatgttttccctttgtaatgaacttggttctttattggatgatattgctagtttgctttccagttttcttgaggcatccctaattcacgtgcgtcgtacagccaacaaggctgctcatgaattagttgtgcatgcacttagggtggatggtgaattggcttggattgaggatttttcctcttttcttattgatgtattaagctctgattgttgttaataaaagtttaatttcaaaaaaaaaaaacataaaaatgttcaattttattttttaattttaaaaacagaaaataaaagtgtgttctataactttcattttcatttttatttttttattttatttaagtcgtgttcggatcaaaggccgaggccgtagtccttccgagactggggccgaggccagagtccggatcccaaggtctaggttggagtcgggagttaaaatattgattaaaaaaaactgtttaaaaaaaaattaaaagtgattttttttttgtttttaaaattttattcacaattaaaatattgaaaaagtgaaaacagttttacagaacatgcttttagaaaatatttttacatttttaattacaaaatagaaaattgagtaaaaaaaattaccaaacgtactcttaatttttaaaaacgggattttaattcaatgatcgataataaaaaaaaatagtgttgctgtgcttaattttactaagtaattaaaaaaatatatctctttttacatatatcaaaaatattatatttataccacttttttctttaactcaaattaattcaaaaaaaaaaaaattatctctgttggtctgatagaacaaccacaaccatataatacaaaataaaaaaaaaattcttttaattaaatagcaaaactaagtatgaaaacttaaattttcctaataatacttattcataagtaatactcattaaaaattttatataataactaccgaatgtataataattattactaattaattagttgttttgtatcgtgtactaattaatagagaattgttgaaagatactattggtgcctagctagcatcttctttgggtgtcatactgttattggtgtgattaagtagcagatcctatataacttaagaaaataactctgagagaatatcgttaactaatcgttaagtgtcacccatagaaagtgttgggtatcactaatgtcccataacaatggtctaattaatatgtagaataatttcaatacccaaagcggagatgggacaggggcagggataatactatctgcaccatatccgatcccgatatatataaatatatataattttatttttattcttaacatatatatagtatatatatcattgataatcaaaattattttgattatcatccataatcaaaattatatcacatgcttaaattatgaagatctaatgactataatgaactgatgatcattgaagattacatgtgtaaagatattttcttctcgattcttaatttcatctttgtttactttttaatttgttgggaggctagagaggtatgagagatcttacacttgggtttatcttttatcttctatgaattatgaatgcataataaatatttgtgagaatattagtttaatttatttattttcaatcatttaattttttttttcattttaccttaatggatacccgatgagttccccataaccgatgggtattcccc

SEQ ID NO: 61412 - DNA, 884 bp, Cannabis sativa
ctctttaaccttcttatcatcattgatgtctttgagaccttctagttgatcaatagcttctaatatgccgtagtgcaccaatagagcacacattttgagcctccattgactaaaatcattctcaccagtaaacttatcaatttcaaattttgttgaactcatcttgatcgagtcttgatcatcaaaccctaaatcttgatccttgaatcccgatacgtactctaataccacttgtggcattttaatcacctcgaaaataatcaagaacagaaatgataattagtgcagtaacatgaactaactaatcaagagaataaaagaaacaaaaatcaaatcacattaatttaacaaggtttgatcagttgcttggtagtggcaactgtctattttccagacagaacaatctttgactttaatctttattgattcaaacttggtgttacaatggtgataatcaccaacagctatgaacttacaagagaaccgagttatatagcttaatttatgtacagaaagaattttgaagaggaggaagaagaagttttgaaaaaagttatctttgactgtataaaaagttagtatttaaaagcaatgttcaagagtgttgaaaaaccagtattacccccaactaatttaactgttagattaaaactttaaaaaatttactgattgtaactgaacactagttagaccaattaactaattttaattaacatcatagttaaattattaaattagaaaattttatactaacatcatagtacgtatgtctatatataggcagtttataatagtcaagtaatattgtgcatgtttggtatcataactaaaaaacagttttttgtttttaaaaacagaaaattgttttttgaaaacaatttggc

SEQ ID NO: 61413 - DNA, 1574 bp, Cannabis sativa
attgttcaaaagttataaaaaaaaataaatataactaagtctactttgttagagacttagaggggccctcttcttcttcttcctcaatatcgccaacttcgtccttcttggtttgctcataataatccagcatcgcatcggttgcactacccaaaaagcaataattgttcgatcacaaaagtgtagatcgaacggatggaaactaatggaaagagatagtcagaacattaaatgttgaaaagatttgcctcgaagttttaaactcccacaatgaaagcatgcaacttttaaatggggtaaatacgaccgtacccttaaggtaattaaaaagtcttttttattttaaaaagtatttttgtggggcaattgttatactcatatttcgagcagtaatatgaagttagcacgtgaaacaaagttggaatataaaccacctcaaattatacatcaataaatgtattcagatgactggcctcgagaaatacagttagtaaaaatactcaaactcgctgtcatatagacaatggcaagacaggagtaataactaccgattgatgagaccagcgaggtgaataagttcatcccaggataaacaaaatacactatggaattgtttgaaatacgtagataatgagttttgcagctcattgatccacatactcgtgagtatgttacaagaataaagacagcgacttcaacattcttcatctctctcttgacatgttaaagtaagcgtctcgcatatacttcactcaatattgaaggaagagtgcgagatgtactataactataaacttagacattattccatagagatgtttgagaaaagtgttaattgaatggtgagaataacaagtacagtcagcataatctagagataaagacaaagagcatttatgcggttatttataattatcttatgtgcataaatatgagacgggaatattcacgttttaggagctgttacaaataatcatattctagggaaataaatgtattcctagactcctataaatagggacagagcccaaggaataaatgataatatacctttgggaaaatagagaatattgtatttattgttcatttctaaaaaaacagtttattgtattctgtaaataatcttcgaaccctgaatatgatgaactatgaagatttaacttcgaaaccatgaaaaataccctcttgtcatttattgctactcctattgttaatttttttgtttttttttttgatgaaccagtgttcattgcacaaaacttttatttacatcttaaaagcaccaactttggcctcaataaatctatacagttatttacaaacaatcaaaccattctctatctttgagtttcactttttgtggcattacaagcatagttctaattttgacaatcttttgaagctgctggaccaatacctctgcctttagaaccttcttttgccaaatgagatcatttcttgccttccaaatcaagtatacaagtgctgcaatacttgatgctttgacactcttcttgaatttagtttgcttagcctttcttattgtcttgatacaccattgctgcaatcgcagc

SEQ ID NO: 61414 - DNA, 890 bp, Cannabis sativa
  modified_base (565)..(565): a, c, t, g, unknown or other
  modified_base (685)..(700): a, c, t, g, unknown or other
ggcataaaacccaacacgatgatggagcatcatcaaacatcctgttcaagtaagccctaatcagaatgggtttgaccttaaaaaatctgcaaccatgcgaggagcttatgtatggtttcagcggagccaacaacgctccatgtggtaagattaaactgccactcaacatcggcactgccccaattcagaccaccatcatggccatgttcatagtggtggatgtgaagtctctatacaatgtgatgctcggaaggcttgctctctatgaacttcgagccatctcttcagtgtactatttgtccataaaattcccaataacggctggtatcagttgtctccttagaaatcaaggaactgcccgagagtgttataacgcttcgttatcacttgccaagaagacatcctctattgttatggcatcataggggatgaacatgacctcctctattgctatggcattaggggggtcgagtaaggcctctcctacaaaagccggagagacgataaagacctccaaattccaaactatgaagaagacagagactgttgggattttatgccctanataaaacccattttaatataatcttatttgttatcaatagaagattagaaatcatttatgtttacatgtacttttcatgtttaaggttttatatacaatttctgttaaatccaaaacatnnnnnnnnnnnnnnnnacagtgatgtcaacacagtggaacataattgtgattatatgcttcaaaagataatgtcccatgattcatcagtgcactgaatttacactaatattatagtcagcgataaaacttacttacaccttagataagtgttatattcttttcaggacattgacaaagtatgttagtatcggatgtatagagtata

SEQ ID NO: 61415 - DNA, 970 bp, Cannabis sativa
atctcaatgtgcttagttcgctcgtggaacacaggatttgaggcaatatgaagagcaacttcattatcacactacaattttactgtaactgaagttttaaacccgaattaagtcaaaagctgacaaatccatactatttcacacacactgtgccatagctcgatattttgattatgcacttgatttggacacaacattttgcttcttactcttccaagagacgaaattacctccgacaaagacataataacctaaagaggatcttttatccaccttggaaccaacccaatctacatctgagaaacactcaatctggttgtgtccatgatccttgtaaacaattcctcgtccgggtgctctttttatgtaacacaaaatttgctttgaggctgccaactgatgaattgttggagatgacataaattgaccgacaacactatcttagaaagcaatatatggacgagtcacaggaagataattcagctttctaactaatctacgatacttctcagtgtcttcaaatggttctccatcactcgttagatgcatagcagggttcattggagtactacaagattttgcttccaatttttctcttagctaacaaatcaagtacatactttctttgagatagaaaaataccttgtctactctaagtgacttcaactcccacgaaatacttgagcaccgccaaatcctttgtatgaaattggatataaagaattttaagggatgagatacctctagtatcatctctagcaataacaatatcatccatgtacacgaccaacaaaataatactgacagttgatcttttatggaacacagattgatttgacttactttttcaacaaaccaagtttctcaacaacttggataaatttaattaaaccaagtacgaagattttgtttcaagccatataaagacttgcaaaggcgacaaactcgccctaactcctcttgagcttca

SEQ ID NO: 61416 - DNA, 1821 bp, Cannabis sativa
ggtgccctttagcatttctcttatgtttagggtgtatttggttagaggtaataaatgagaagaaaagtttttattccatttatttgtttagttatattttaatgtattagaatattattcttttagaataatttttctattattttgttagaagattacattttgcaaatgaataaaaaatcattctagtacaagatgagaaaaaatttaataatttttttataaatttttttatgcattttaatttgattccattcaattcttatttatattgacattcacactcatatttttatgttttaattcctctcaaccaaataccttcttaaaatttctttatcactcaaatatgtaccagtgtagtctggcgtgaaactaaccaatagttttccactgaagctctcaattttttgctctgagtttgtagagagactaacccatagttttaggaagggtttgtcagaaaaattaaaataaacccaagctgctaaattgtatataatattgaatacaataataatatataatgattaagtatgcatacttgatttattcatagaaattgacagaatttgatagtgcaatactatcaactaagtcttcttctctagatctctaaatcagaaataattttatttatctgattatcaaaagtataaaattgttataaaacaatatgtatttatagagttagggaggggacttagctacataactctagttggactgggcctactcatcaaaggctttaattaactagaaaagctcacactttttcttcaactagactttatacacatagatgctaagctcattaaccattactcactaacaatatgggctaacacaacaaataactatccaatcaacctaaattttaataaaatcaatagtataaactggtttactgaaggcaaccttatgctcatgcgcgaggtaaatattttctcgagtttcattaagctcggtataaatagtataaactggcacgtacttatcgtgattctttggtttcttcttgtccttggacgaccccttagagtcgtctttgctctttgagccggaggcccctgagttatgaactctagttgagagagtgcttgttgaaacattgctgggtttgcttcccaagccagtttttaacaagttcatctcttttcgagcttcctcctttcaaacaaacacctgagccctctcattgaactcattgatattcttcactggacgaccctgtaagtcattccataattcgcccccaatagtggatagattggtagtgatccctacctgaagggccgtaagttgtgtactaccatctatatatcatgaatactcatttttcccagggatttgaaaaactctctcaatgaaagcaccaaactgttaacgccgatttttgtcaactagatttgagcctaaatggtgataaacttgtgcagaaaaattaaaacaataatgaaaaagtaagaacatgaaggttttttacgtggttttgcagttaaagatttgcgtagtgcacgagtcaatcttattagatttctaatacagttttagggccttttatcttatgaatttttagtcccctttttagagtaagatgcctctatttataattacatagttaggcagttaattacatagttgactgatatcttcacaacaattaccccctgagattgtggggtttgattacataccacgtaaaataaatgcggttaatatttgaaaatcacacagctgtgataggtccgcttttaccgggtcaaggtaaccgtgtattaaacatgctgtaaatcataacgtttggggatgcctcgatgg

SEQ ID NO: 61417 - DNA, 761 bp, Cannabis sativa
tacgtggcttggcacgtaacaatcacctagtatatatatatagataatatctcttgttgtatttcatgttaacaaatatattatacgtataatgtagaaaaattgagttgaaaagtcaaactttaaaatttatatatacatacgaatcgagtaaatgaatggaaatgtatgtcatgtgaatatataatattttaaaataaatactaaaaataagtttgtttttttaataaaatgtgagttaatgttaatgttaatcaatttttatagtaaatattatttaaatttttgtaagagattttatgaattgtattggtagattttttatctgtttcgtcaactaaaaatatattttagttcaattttttttcatgacgcatacgttagctttattttagttcaactattacacattgttttatttatttttttaatactattaatattgttagttttactataatcaacacgggctactttaaatatgctctaccatcaatttaatcatttgttttagatattaaaatgatataaaatattttttaatcaatacagtttcataattaattactcttataaatcttattaattattagattatttgattcatgtattttattttattgcaaaaaaaaatatttataaaattttaaattaatttaagtgagttatataattagataactcataaatagttcgcaccatatggtaaaaaatatcgatcattaaaattattatatatgaagcattgctcgcactattgg

SEQ ID NO: 61418 - DNA, 1377 bp, Cannabis sativa
aattattagtatagaatagtatattaaaaattgatatatcattatcaattttatattttattagtgatatgatggatatgatgataataactaattcaatactaatagcaatttattttaaatatatttttaaataaagagttactatcacgaatataattattatttttttaataaataatattttaaattcaaagattacgtaccttgttaaatagttattattaatgttcgtttagaaatgtagtccgcaacaataagaaaaaaaacacaatctcgtgaaaataaaagaaaaagaactaacaaagattaacatctttcgagtatgtaacaagattcgtcatccaactaaaataatttatataacataattaatgcaactagttcgttggtagtagaaaaaaaaaactaaaatttaagcaacctttaacggttacttataatacttatctttttaaaatatataggaagatataaatttttataaaaattcgaataattaaaaaaataagtatatagaaaaataataaaaattatttcacaaaaatattacagcaacataattttatagattttttttcttagtaaaatatagtatacaaataaattattataaaaatatagagaaaaaacttccataaatatatcaaatatagattataacaagagagcccttataagaaacttaataaaaaaagaagaaaaaaactagcacacagatttttataaaaaaaaaaaaaaaaattagagttaatattaatttggaacttatattttgtaaaaattattgatgagatactttattttgtaaattgataaattagaccatatatttttaaaaatggtatggtacaaataccttgagctcaatttcgatattttttttaaaaatagatgcagaaaatgtctcagttttatcacaacaactctagattgggttattattaatttttattttgataaaaaaatcaattcaattcatgatattattttatactagtttaaaaaataagggtctaatttatcatttaactaaactgatagtccaatcaataatatttacaaaacacagtagccaaaataatacttaccaaaacaaaactaccaaattttcaattatgtgtaatttccaaatttagcaaaccaatcaacttgtttagaaacaaacaatttacatgatacactaaactcggaataagactcctcaaaatcaatatgtagcgagattcgtcctccaactaaaagaatctatataacataattaatgcagctaaattaaattgttagtagtaaaaaaactaaaatttaaacatcctttaaccgctattaatttcaaataatttattttttttttatttatttttatactttaaaata

SEQ ID NO: 61419 - DNA, 907 bp, Cannabis sativa
ttagaggttattcttgaatagaattcttgaatagaagttctactgtatatatataatagaagtatagatcacaaatcattagtctcaagaatgacaataaaactaattacaaaatgaagagattgatcaaagatcaatatgataatattacactttcgtatgagaaaatgtataatatagctagattaattaacgcttgacatcccaattaactcaatattagtttctaaaataatccctatatttaccaatataagtggagggatttcataatgttaattttaatcttatgttttgttcgattaacaacaattcatttctattgacataagtttgattttggcgagaaaaaaaaatataagaaataaaaaaaaaaaaaaatctcatgttgatcggtatatgtggttaaaaaaacatatattattagtagtagtagtaagtaattaagtaagtaatctcattaataccaaagaacaaacaatacaaaacttagggaaagcacaacaaaaaaaactgtacatggcaaagccaataattaataaccagcatctacagctttatagttttcaaaggaatgtatttacttattaattctactatatatgtattgtacttaatatttaacagtagttttaacaatgatgtataatccaatatatattagagaaataattagtatttgtcaactgaatccggtacaggacctaaggtcaaattaataccttctttcattgaacaaaaataatataatatttatttaaggctcaaaaaaagaatagactcattaataattgtattaaaaaaatattatattataggcaaactgaggaactcaaaagaacaagccccacgttctgatcatatatgtattctcagtgggatacatgtattttatatatatatatat

SEQ ID NO: 61420 - DNA, 684 bp, Cannabis sativa
ctccgtagttttttggacaaacaacctatgtttctgtaaaaataattagtaataagatttaatatacttctatttatgaaaaagtataaattttatatatttacctcgtccgaatatgactttaattgaacttcagtacatgagaatatgttttctgcaacatctccgaacatcatagcatctagcaactcggttccattgtcgagtacaatgtaagaatactgtctacaccaatatatacattacatataaatacaatgtgtacaattgagaaataaaaaaaaatacagtcacgatttaaaaattacaaaatttgaatctatataattgagaactaaaagtaaaatctctacaatcgagctccctaacatggtatcacacattctatatatgctctctgctaacattgtatcacgctgtaatatttattctgcaaggcaatcaatctcttcgaataagccccacataaacactttccaagttgagcttcgattaaaaatatttgaaaaagtttcttacattgggcgctatgattgcaattttgctctaaagcaagatcaaagagatcttgcaagaggtagtgcgatttctgttgctgcctgggttgcccttgtacctctacctcggctaacgcttgcaagtaatatatttgcaacctatttcaatgaatttagcaacttaata

SEQ ID NO: 61421 - DNA, 816 bp, Cannabis sativa
  modified_base (50)..(54): a, c, t, g, unknown or other
  modified_base (367)..(367): a, c, t, g, unknown or other
aataggaccaaaacccagacgaaggaccaaacccgaacccaaacctagannnnngacccaaaattagaacctgaacaagaatcgccgaactaggaccctagtttaagactaggaccatgactagtacccggacccaaacctagaaccgaacacagatctagccttagacccaaactcagactggaactcgcgcccggtcacggtcgtgtacccagacaggaactaagacccggacctggatctaaatcttggacccgatcccaaacactcacttggacctagatagggatccggatgagaacttggactgggaccaagaaccaaactgggatcgaaatgctggacctagatctggacggagatcctnacctagaaccaaacttggacccgcactcgaaaccagaacttggacttgtacccgaacctagacccagatcggggtccagacctgcacacaaactcggacacagactcttacccgaactcaaaaacccacacctacaaccagacccaaagctaaacccagactaggtcccaaactcgaagcctgtccaaggacatagacccagaactgactccagactcagatcgggattggaactttggactcggacccaaccgagaccaagacccaggacgcgaacccacaccaggagcctaatctggaccgagactgaaatccagactcgaaaccaaactcaaacaatgactcgaactccgacccgaactcaaacccaaactcgaactcaggatcgcaaatggaactcgaaccgatttaggaatacgacaaggaccaggacctaaacccaaacccga

SEQ ID NO: 61422 - DNA, 648 bp, Cannabis sativa
catcctaaagatcattttccaagcaacaaaacacagctacaagcacaaaatcaaaacttgccattaaagctccaagtttgagcttcaaaactcaaagcttgctaaactcaacattaaacaacatatgtcacttccagaaaacaacatcaaaccctaacagcagctacagcaacataaaccacaaaataatgcatatccactttcttaaaattcaagaaaactcaagaggacaaagtcaaaagcttacttagagcttaagcactccaaaatcttgcgaaaacttgcttgaattgagaggaaatggaagcaaaccctagttacctctaggtgaattcgaaagagagagagaaattgagcggaaacgtaatttttgtctaaatcttgatttttcgtaaaatgaattaacaaaaggttggttttatcaaaaataatcaggcaagaattaataaaatatagattagaataatctaaaagaaatcacactaaaagacaaattactaagtgggaaaaagatcaaaatgccctttccacacaaaagccataaaaagaacactaaggggtattttaggaaattcttaaatcccgactattcccgacattctcaatgcctaattctaccgccccgccaaactaaaatactaacatgtg

SEQ ID NO: 61423 - DNA, 921 bp, Cannabis sativa
ttctcttatataaaagcccaagttcactatgataatattttgtatattattaaaagaagtagttaaaattataatcatcataatcttgtattccaaacaaatttttgtagattagttcctaggagatttataaggacgaatgcgaaaaaagacattcttgaagtgcaagatattactatataaagtactcacaaaattttgaatgatagtgttgaatttaacatttaaagagatcaaattggtgaaatggctaataaaattgctaatcatatggagagcaagttaggaccttttttaatatttttttttaagattagagaattgttagttcatattttattataacttttgtcgattttgtattatagatgatgactttcgtaattttaaaatacatgaatttttttaagatgttaatgagtaatttttatttcatttttatattataatttttatatatttatctaaaaataaataatattcataattttttatttaaaaaaagcaaaaaaaaaaaaaaaaattgtgctttttattttatttaaaaatagaaaataaaaatgattacagaatatactttttttttgtttttaaaattacaaatcaagagtggttagtaaacatatttttgttgttttgtttttaaaaacaaataaagtggttataaaactcatttttattttctaaaaataaaattttaaaataaaaaatctacttttacttttttatttttaaaattaaaaaacaaaaatattaccaaacgtcaccttaaatttttcatgatttattttttcttctgaattagattttacatggttaatagtattctttatataggggattttagttatataagatgaagtatagttattgtagtaaataccaatagaaacgatatatgatcatgaagtgcacaaaata

SEQ ID NO: 61424 - DNA, 824 bp, Cannabis sativa
attctcatccccattcccattccccttcgcatttcgattcccattcccattccctttcccattccccgacccattcccattccaattcccattcacaattgcattcccattcccattcatgttcccattcccactccgactcacattccccttcccattcccatttcctggcctattctcattcccattcccattcccattcctactcccattgccattgccattcccattccctgacccatgcccattcccattccctttctcattccctattccattcccattccccaaaccacaaaaccacaaaatcctaaatgcgaaaaccctaaaaccccaaaccttaaaccctaattcccattcccattcccattcattggcccattctcgttccctaccccattcccattcccattcccattcccattttcattcacattgctattcccattcccattcgcattcgcattcctaattcgtagcccattcccattccctgaccgatttccattccctggctcattcccattcccatttcccggcccattctcattcttattcccattcccattcccataccttggcccattcccattcccgtaaaccctaatggcacgtttagtatacaatattcaaaatcagaatcaatatttgtaatatgttgttttctaattttttttagaaatagaatagttgtgatttatcttatttactttattaggaaacgtaatcgaaatgcttaaatagacgaaattgtccttttgagttaaactatattatatggtagttatcttgtaagataaattttaaaggacaaaattgccatt

SEQ ID NO: 61425 - DNA, 528 bp, Cannabis sativa
agttttgggactttgaaattttttttgagtttctgctatagtgaactggaattttggatggtacagggctgtaccaaccagaatttcgtttggtcagtttttttgggaatcgccaatttttgtattttgaccataacttttcactcgggtgtccattttagatattctatatacaacttagaagcttatgaagagctctactgtacgaaacataaattagagccaaaatatgtatcttattttaggatgttttcaccataagattcggtagaaaattttaggtgattatatgcaggtattagatggtattttggagtaagcacttattaatttaccgttatagtgatataggacccataattgtcgagcattgttccactcagattggcccgcacactagattattggactgagataaaaaaaaaactatttgcactgctaagcacgttaagtaagaaatgattattatcgtctgtggcttgattatgatccaggtaaagatacagtcattaccgttattgagaatga

SEQ ID NO: 61426 - DNA, 907 bp, Cannabis sativa
acgatttttgctcaaaaattatgacttatgtattattaatatatatatatatatatatgagttacgtattattgtgttaaattttcttaaatattcacaaaattattatatatcacactaagaaatgttcttatagattattcatatatgtggcattgtcacacttatgctacatatgtaatttagaattgtcaactccgatattccacaagaaataatattggtattatatatcttagatgagattattttaaaaaattactattaccgagccagaatcaagatataatgtatacattaaatcataaaataaaaataggaaaatacctctttaagtctatcaaaattccttgttatgttttcatataatgaaaaacattcaccatagtcttctaagtcaaattcttaacacacaaaaattagtgtggtactaataatgatcacagtgtctaatttagtatacgttcttgatgttctcaacatattgaagaagagaatgaagaactcattttaggcttaactttaaactaccgtaatatagaatatggtataaaaaatcttactcaattaattataattttggtttaactatttgaagatatttatttttcaaaacaataattaatattatttaaataaatatcctaacatattttgatatagatatttgttcaattttttttttttttttttttttgaaagtaaagacccaaaagttagaggagaaaagggtaggggtcttggctattccaactccatgtgttatctaaccctatggacatttgtgctaaattatgagcttctgtattcccttgccgcctagtgtggtgaagggttacagtgggaagcgaagataacatccgtcgaatagcattgatgatggttccatagcttgaaagattttcat

SEQ ID NO: 61427 - DNA, 1255 bp, Cannabis sativa
agattggtgttcaaacatccacaaatatcaaataaaaattgaataaatcataatgaagagcaaaaaaaatcataacaacttgcaataaacaaatagtgtaagttcaagtgaatccataatatcctagaaaaataatctagtttcataatcataatcaaaatattcattcacataaatgaattaataacatagaaaaaataagaaatagagtgaagaaaaacaatatgatgcttttaaaaattgatcttcattcactttaaatatttttctaatttcttacaattattttttaacttttggccgagaattaaaacaaatttttttaaaaaaaaaaaacaatctaaaaagtttattttactaataaaactcaaaaaataaatacttatacatataatttttggccaaataaaaaaaataataaaaattagaagttagtcaaaacaagattcaagcaatttccaagcttctcgagtgttgtaggaagaatatcacgctatttcaaacctaaaacaaccataaagaaataaaatttagaaaaaaaaaataattttgataaaactcggctcatttcaataaagagccatagtaattcatttataggctgaggatttcatcattacacaattagtggcctaacgactcttacagctgtcccccacaaatcccaagagaatattctgataataaagattccctaatgattacatactcattttataatagaatgtacacatcaacactaaatatcttcaatcactcgaactagtacaatcctggtacagggaaatactggtgtgtgtaccttcaaaggatttgttagtaaattttcttttccttaacatcttccctcaaacaaaagggtgagattatcacaccaagcttgtccattataaaagtaaatcgtgagtgtgacaatccctttgtcaaatagtcagctacttggtcatgtgagggaatgtatctaactgccaatttcttctccaacactttgtctcgcacataatgtatgtcaatctcaatgtgtttggttctgatatgaaagataagattttaagacagtgcacttgcactcatgttatcacaccaggtaactaagacaactgagagtgggaaatcaatttctttgagtatggattcaatccatagaattttttcagccacatgagccaaggctctatattcgaattctatacttgatcttgagacaactggttgtttcttggatgactaagacacaagtgtatcccaaaaataa

SEQ ID NO: 61428 - DNA, 989 bp, Cannabis sativa
gagatgttgctgttttgcagaaattgaagactcgaaactttccgtttctggttgagccaaaattaaagttgagaatttgattaatcttacttcatggatcattgctcttgtgaaaaacttgatgaacagtcaaaacgacatcaaattggataagcaggacccagcgaaccaagccaaatgttgacctaggcactggggcctttaaaccaagctcctgtgattttatttttgatactttcaaggattctaaacttgaggacaaggtctctccccccatttttgaccattccaaattcaatggtcgcatcgaattcggcattcgaggaattgaaggtagcttctcaggttgattgtcaacctgggggctaggcccagcaccatgtcaacttgggtgctggccctatttctaaggactcgagtttgtgtttttctccccaagtttacttaattcttcattattactgatgacggtgaagatgcccggagcaatttttgttgatctgaataggaaacagcccaggttgaaaaaatgtcaacctaggtgcaaggcccagtaccaagtgtcaacctgggcgttgggtccctctttttcccctttggaagttccgtttggtccctgaaaaataattgatctcaatatttttctgaaaacggagatgatgctcgaaataattctaggaaaaatccattttttgtggcctaggttgacaaattgtcaacctgggcgcagggccagccctaggtgtcaacatgggcgctaggccctattatttgtgccctgaacatgttgtttttcctctggaaggacctattttcctatttttgatgaagatagattcaatttgaaaaattggatctctgatcagatgatttgaaggcgcccagattgactgattgtcaacctgtgtgttgggggctcaaggccctgggttctcaaaactcaacttactttgaatttgattttaatgcctcaaatatgtctgtggtat

SEQ ID NO: 61429 - DNA, 709 bp, Cannabis sativa
atatatatcaataaaaaaatgacagatgaataaataataacttgacatttaacggtcgggtacttaaattttaaaaatataacttaaatattattatcatcaaaaaataaacttacgtatttatctgtaactaagagttaaacttacgcaaattactatttttaaaaagaaatcacaaattgttatacaaaatactactgaaaataaaacaagaacaatattaccgaatgaaatttctgagttgagtcgaggactaggtcgctatttttaagaagtttgcggcactgcctaagaatgtgcaagcagtcaacattaccgatcgtccccaacataaaatagcctagtcgaaataccactgtatcaaagctatactgcacaatagagaaccgtcgaacaccacacccacaaactactacttgtatatctcctgttggttctgatgcattatataagaaatgcagagaaggtagtcatggaaagaaagacattgattatggaaaatattaagtgggatcgatgctgaaaataaggaggagaacacgtttctctttagcaattaattaaataaagtatcacatcacaccagccagttcggcacggtcagagtgcgcgtgtggtgagtcaagtgtgtgttcttttgcattcgcacaaaattgggtatctcttggggtctattccaagtcttggggctatcacaagtgtcaaaatt

SEQ ID NO: 61430 - DNA, 1414 bp, Cannabis sativa
aatattgcaaagcttccacttggtaattactaaacgagtttgtctctttgcctaatattcagttccatgtaattattatttgtaagaagaatccataaatataatgatatacaatttacttttataaaacaaatgttcatataatcatgcatttagttaccaacctctaaaaaacaaaaaaaaaaaaaaacaaaaaaattttaaataaaactaatatttacgtggctcggcacgtaatattcatctagtatatgtatgtgtgtgtctagtttttctgtttatattttctttctccagcatcattaattagtagcaatgtatttgattgtttaaatggtaatattaaaccaattagaatttatattgaataaaaaaaaggagtatgatggttggacatgaccacgctaatcaaaatgaattgatatgttacacttttctattctacgaaagattaattttaaattattttgacagtcattttaagagttacgcccattgaacttgctcttatgtcatatcatatgttttttcattggctagccatatggtaaatatgatgaatgtaaaacttatatttattaattatagaaaattgatgaaaggtacttgtagtgcgcttatcattttttttttattatactgctatgatgtaattaaatagcggctgccacctaatgtattgggctacaaatataaatgctcttaattataatatattaccatagtttatataattaataagttgaacaagtccaaccagaagaattttaaacttttgtcctaattaattattatattatatattgtgacgcctacgtataatattagagcatacaaattacaataaataaaagtgaattgctaaagtaaagaaacacactaagttctagcacaaataaagtattgcggaaagaaataagaacgagaacagagaaatttttttcgtgttattggaattaaatgaatgaaatacatctaagtacaaattatttatagactagaaagggagctaagaccaactattaaacaacaatcccaattgaataataacagctaataactttcttaactaattaatcacacataccaaaataaacactaataatcagccttaaatgatatctgaatataatggtcacaatattaccctatatatcatatacagatattttgcgaatataaaaagtgagggttgtagaaggaagaagcttggtaaaagcatcagctagttgtaaggtattgttgaaaggaatgagctgaatttgagattgcgttattttgtctctgataaataaagtgacaatcaaactcaaagtgttttgttcttttgtgaaaaggtcaggttatttgtaatatgtgttagagatattattgcagtggaagaaaatcaagatattacaactctattgcaata

SEQ ID NO: 61431 - DNA, 1227 bp, Cannabis sativa
  modified_base (56)..(66): a, c, t, g, unknown or other
  modified_base (1194)..(1200): a, c, t, g, unknown or other
ttaatcacgttttccatacacctcgttgataagcaacgagctgcacagtatgtttnnnnnnnnnnnaatacgcctatgctagttagggtattacaccgaggggcttgtctaagaccatagattgctttgttcaacttgcaaacatgatttgggtattccggatcaatgaacccttgtggttgatacatgtagacatcctctttaagatcaccattcaagaatgcattgttgatgtccacttgttgaatgtcccatccgaatgtggctgcaagagtaaaaataatctgaatggtgcaaggtttattcacagggctgtaggtttcaaagaagttaatacccgggagttgttgaaaaccttttgcaactaatctggctttgtgtctatcaaccgagccatctttattatatttgaccctatacacccatttgttgtgaacaatagtcatatcagatgtgggaggaacaagtacccatgttttctttcttttcaaggctgttactttagtcgacatggctgcattccaaataggactagctaaggcagccttgagggattttggttcagtctcaacatttgtgcttgcaagatatgtttttggcttaaagattccatgcttagatctagtgaacataggatggatattggtttgtgaagtgtgactgtcagcattagaatttgtgttgggagatgctggtatggggttgataaaagacacagaagtgtcagaattggtaatatgaggggtaggaggtgtaactataggactaggggtgggagtttgatgaacactaggttcttgaatgttgttatgtgggggattagaaggaaaagaaggcaaagtataggttacagagtcaatgacaacaggcagagagtgagattggggtgagggattggaaaatagatgagaatagggaaactcttgttcattgaaagtgaaacttcgggcaacatagatcctgccactaggatgtagacatctatacccttttgaggagatgctatatccgatgaacaaacatttggaggacctaaaggacactttatgattttcataaggtcttaataatggaaaacaagaaaagccgaataccttgagcatgttgtaatctggtttttgattaaacaacttttcatagggagagagtaggttgtttgtaggtgtgggaagtgttaattccatttttggcatnnnnnnntgacaaaaatattttattatttaatgt

SEQ ID NO: 61432 - DNA, 1773 bp, Cannabis sativa
  modified_base (157)..(158): a, c, t, g, unknown or other
  modified_base (536)..(537): a, c, t, g, unknown or other
  modified_base (621)..(621): a, c, t, g, unknown or other
  modified_base (1080)..(1094): a, c, t, g, unknown or other
  modified_base (1478)..(1479): a, c, t, g, unknown or other
cataaattagaataattttttaagtttattttattttattttaataatttcaaaaatgtattatttttaatacattggatttcgaatttagttgttcatattaatagaaaattaaatttgactcgaaaattaattttagttaattttggaccaactnnaattaagtaattttcataatatttgttggaaaattaatactaaggatggaaaataaattttatttttcaaatcttcctagggtgtaattttataaatattaaattaaaatttatatttagagctatctaaattaataatgttaattgaataaatatatcattattaaaaaaaatagattaaaatatatatcaaatgaaaatacgaccattaaaaataaagagttttagttataaggatattcgatctctattgttggtcttacatgataattatttcaatgggacctcgagacgctagacttcgtcccccatatagatggtcttacatcgaacattttataccgtaaagatctagaaagataagtattttgtaagttnncgtctctattagactctcccatactttgactacctagagataaatttacaaagtatgaaataatagtggaagctcataagatanaatggccttgactctcgcctaaaccggacaacaattggatttttatcttgatcgaacaaaaggttgctagaatagtatccattttagatgatctgactactctattcaatgaatgatatctttgactctcgcctaaaatggacactatatcagtttgttagaaaccttagaaattatttaagatgtgtttgttttgtattttcacatgtctttattacgtgctaagtgtttaataatttctgaatgtgtatgaatttatactgaatcatgttgttttctgttattaattgttgtagtttaaattttgagtcttcattgttggtcaaacttaatttgttatttttaatgggacaaataccaaaagattgccatccactagacaaatataatagtgttagatctcgacaaataagtatttgtaaatgcaacatttggttgtacatccaaagatgacaactnnnnnnnnnnnnnnnaatatgaaacaatgaaaaaatttataaaatgagaataactttgactctcacctaaatggaacatcattggattcttattttaattgaaattatcctttatttttccttttaactttttcatttagaaattgcttagatagtatatcattagataagaaggattataaatcatatgcttatgatgtcattctattttttcttattaaattgaatggcgcagataactatattccaaacattctatctcaaaatgatataaatcctcgatctaatagaatctcctacttgcatatgcttactataggcaacctttgacttagagttagattagtagtggtggtccatgttagaataaaactcaagaaatatttggtataaatttanntctttgactttaaattttagattcgaaatagaaattttaaattttagtttccagatactttgaatattatagtacaacttttacaagtttaatatccattttctttaatggatccaaactgtatgttaatgtatggattatgagttttggatttcgtgagcagaaccaacttcgactattctaggagctctttgttgtaagtagacctaagtcatcaaaagaccacaaccaccgtttaatatatctatggcatttgcatcttgttcataatagttttgataagatcattctctg

SEQ ID NO: 61433 - DNA, 1043 bp, Cannabis sativa
  modified_base (814)..(814): a, c, t, g, unknown or other
ttgacaacaccattgctacaaaaactactcatcatcctatttcactagttgatcctcattcttcttctaacaacacattgcttcagaaactacgcatcctcctatttcactcgctaatcctcattcttcttctgacaacaccattacttcaaaaatcatcatctgtctattactcatactccaaactattcaaacaaatcatatgagccaagaaatcctcatcaaattccttccttaagtcttgttcctatcaacgagtaccgactcaaccattcaaccaattcacatgagccaaaaactcttgtccacatcctaaacaaagaaatccaggtttactcgaggaaaaagaagaatctaggcaacattgaacaagctaccactcaaacccagcaaagtcatgaatataatccaattccattcattcttgaacaaacactggaagatgctcgagctgaacccattgtggaaaaagatgtgtctaacaatttaagcattcccattactctcaagaaaggtgttcgctcttgcactcaacatccctttcataactatttgagttactcaagcttatatcctacctatagaggttttatcaccactctagatcaagtttaaattctaaattcagttcaagaagctctacaggatcccaattggaatgctgccacaatggaggaaataaaagcatttgaaaataataaaacatggatcatcacagatctgcctaatggcaaacacacagttggttgtgaatggatattcttggtcaagtataaggctgatgggagcattgaaagattcaaagcccgattantggctaaaggattcacccaatcatatggcattgattaccaagagatatttgctcatgtcgctaagttgaacaccatccgagttctcttatctattgctactaacaatgaatggcctttattccagcttgacgtaaagaatgtgtttcttaatggcgaccttgtggaagaagtatacatggacattcttccaagatttgaggaccgattctcaaagggaaaagtgtgcaa

SEQ ID NO: 61434 - DNA, 723 bp, Cannabis sativa
  modified_base (587)..(588): a, c, t, g, unknown or other
ttgtaaaggcaaagaaagtagaagtatgtatcaccatgaaaagaatccaattcaaagtcctcaatacttattttatccacgacttaaccaaagtcatcttcatcaaattaaagcatgaaaagtgcaaaccattttaaaatcaacatcaataaataaaagggttgtctttttgtttttttttttttccttgatcttcttactattacaccacactcaacttcccactaaaatataaaaattaatacaaataatgaaaaaagactcttgttctatatataaattatatgcagattaattgttaccgaaaagaaatggctaattagaatttttgtctttcgaattttaatatgtaccaaattatgccatttgaatttttctgatcgttaaaaattccctctgaactattaagattgttgaatttaagaatttttgtccaattttaataaggaaagtctaacataaataaaagttcataatgtatatgattcgacaaatgtcaaagtataagaaaaataatttaatagatattaaagtccgagaagcatgatttagtacataaacaatcactaaattagtaaaattgaatnnaattagacaaaaattcttaaattcgataattttaataattcagagagaatttttatagtacatgtcaaagtttaaggagaaaaaaaatactaattagctaaaagaaaatgcacccatattaatgcatatatcatt

SEQ ID NO: 61435 - DNA, 2665 bp, Cannabis sativa
tatatatatatatatattcacacacaaatatatccacatatctattaatacattcacatttatattcaggcatatatattaaaaagatatatatatataatatatatatatattgattaatggtctgaatctgattagattttgttgtattcactgaaaattctggcaattacacctactgcattttcagttaaatgaaaaagaatagttaaagagttataatatatgtctatatgtgattcaagatgatagaatggagcacatataattttttcatttttccttgttttaaacccatcaaaactcattgtggattacatataaataattatataggactggcctacgtgtaatttattgcctgtaaatggtctaaagctcacagtttatattatactgctgctaacacaaagttctttttttcttttggaaaaaaaacaacacagtttatactatactgctgctaacacaaatatcaccattttttctcaaagacatttaatcaaacacctttattacacagcttgtattctaatttctaattatagtgccaccactatatgacaaaacccaaaaaaataaacataaaataaatctaaatcaaaacctaattcaaaagaaaaaaaacataaaatttattttatagatttaaataacataaattcattactcacattctaaaggattgaactttttatacaaaatcggtggtcttccgccgcctatcgaaggactccatagccaactcttgcactccaaacaagtgagagtgattattgtgagagagacgaaaatgaaaactaaaaagtgtagggatttttgggcttaccgacggcttggagggtgtgctccgacgatgggttggacggcaccgatggtcagatatggccaaaaaaaaactgttttggctgagagagaggccaaagatggagagggttggaggaaaatggtgaggaatgagattttgggctgaaatgaaaatggacatttcaacttctttttttttttttttgaaaataaaacaacttggccccacacctgtcgtgccatatgtcgtgccaatgtgcaaatggcacgccaaatgggcccgtccatgtcgtgccaatggtcaaatggcacgccaaatagcccaaccatgtcgtgccaacttttttgggagggaaatttcccgccttgacccaacgacatgttttcaaattaactttggcacgatatttgggtgcccattgcacttactgtcgcgccaacatccaaaaaaattaaaagaaaaaatggcacgacatcctgtgtgtcgggccaatataaactctgagattggtaccactttaggtcgtgccattattggacgtgcctatatggtattattgttgtagtgcatatataaaaatatgagctagtttattcattaccaactgattttgagatgaatctcatgtttctcaaatacaaaaatcttgtatattgttttatatcattttagtatttttgtcaataattaagagaagatatggtgaaaatgaatgagagaaaggctcaagaacaccgtaatgaatggctgagtaatgagttgatatttataaccagtttacagaagttgttgaaacaaccaaaataaacaatacaataacaaagcataagagaaaaagagaaagctaacgactaactatatatgctaacatttttccaaatccaagtttaactattttgtttgccgtctcaaagtttgggggataacaaacagagtgtgccagagaaaaagtttttgaaggcaggcagagtatgtccatggtgactacaactttaaaagagagtatggccaaaaatctcaaccggctaaatgagctcctttactgttccttctgtttcaggtaactttatcatcactctctagctgaattctcataaaaggcagaatttatgcttgcattccttttgcttaattgttgatttgcaagtaaactggtgtggtgtgaaactggtggactttgtgctcctcctcaattcatctagttccttccaagtttaaaaatgcaaagacataacgtaaagtggtgaacttatctaaatcgatgctacttaatcagagtcttatgaaactaattgatgcaattggtacagaataactaataagtttgattttctacttggtcattcttcagaagattatgcattgggaaactttgtggccttggcctacgtttagtattcaaggggtgaaaaaattggtttagttaagatgtttagggagggtatatagaagaaaggatgtgaatatttctgtttgtaggctctagtatagatcctaaatttaagacaagtattattaatatgttgtagtagattgagacgctgacttgagtgtgctactacatactagtggatcttctccaggttaacatcttattattggaggagaaatattgggcctgttcctggtacaaataacctcaaacctggtaatatataatctagttattagctttggcatattgatggacctttcagctagctaaacacgcatacaactttgttgttgtgctaagtaacaccaaagtcttcaaatggcagaaatataatatggacgcaaaacttagctgaaacaaaatgcaaagaatatagcatcaaatctatattttaatttaatatattgagagagagagagaga

SEQ ID NO: 61436 - DNA, 745 bp, Cannabis sativa
ttgtgttgtaaccttttattttagcttatatatttattatctttataattaatagcaacacaaaataaaaaattagctcattacttttaatatattttactaatattttgtatttaattttattttttgtaaataacattttaatttaattttctttttcaaattactataatttttttttataatttcatagccttttatattaaacatatttctctataaaataaatattatttatttaattaaattatatataacataatttagtatgacatttaaaaagaaaaatatataacttaatataaaaactaagtatttgtatcttacacttaatattatcttaacattatgttgatgagcataatatttgacatacaactatcaaaataattatatctatataatacatatagtacatatatataattactataattttggtttggttgttagaaaaattgataataaatggaagataatttgtatataatatagaatacaataataatatataataattaggtatgtgtactaaattgatctatagtaattacttcaatttgatagtgcaatgctattaacttaatctttctctctagatctctaaatcagaagcaattttatttatctgatcatcaaaagtatataattgtgattagactgtgtatttatagagttagggagtggacttagctacataaccctagttagactaggcctactcatcaaaggctttagttaacta

SEQ ID NO: 61437 - DNA, 1384 bp, Cannabis sativa
ataaatatggaaactagaagagtcttctagaaatgatacatcttccccctccaaactcacgactctaaaactgtcttcttggctcgatctgtagaaggtggaaagtatcctgagcacggaacctatgtaactctcgaaaagacacatctggatgggcttggtccactttaccattattgaaggtcccactgattggtctagaaagctgacatggaatccacgtgtcccactctggaaacatagataaaatttacccccaagctttcataatgctgcttatgatggaagcttgttctgatcccttaatctggacgcgtggatcttagaggaagaaaacggtaaccctttccaagttactcgtccatggaagctgacttctgcctgcgatgatggtgcgtccacatggtagccgagtgtgggtcagggcatagttattgaggagtcgtaatctaggaaggattatatttcggtggcagttcactgtcttggcacgaaaatcaaaaaagggaattttaatcattacttcacaccttgattttgaaaggcattaaatgcaaagatattcatagatccttggtctccctaactattggatgaggatcgccctttattctaaaaagaacttggccatccactccctcctcacgtggatcatcttcttgtggtataaataccatgggtaaccttcaattaccacttttgccttctctttcaaactttcaaactttcgaatcgcgccggactccctaccatctttagagctttgaatcgcattcaaggtgaatcatcctggatgatgcagtagactactgcctttgcctgttgctgagaattagggctcgagaatatccccatcttccatcgcagtgatcaagacggccaccgcaaaataaatctcaagcctagaatttgggaatgaaattgactcgttgatagcctctgtttctcatctttaggagaggtacgatcatcttcctgaaccgaatccaacaataatcagtttaaaccaccccttgtctgcatcagatacatcctgttttctcatgtattgtactttacaaatttttaactttaatttagatatgcacgctctgtttgggatgaaattagggttttctcgtctgtgcaaattccaccgtaagcaaatttaggagttgtaggttgctttacttcctgaattttgcctttaggaatttcatcaaatgttctagccaatgtcttttgcccaaggtcctcatggttttgggtcgaacatcaatttgtgtcatctcctttcatgcattgttctgggtttagagtttggaaggaatagtgtgtttagttgggacctctccaagaagtttatggggaaggacccccagctccctttctatattaggtagtt

SEQ ID NO: 61438 - DNA, 1354 bp, Cannabis sativa
ctttaataaaatattataaaaatcactaactaaattataaagcaacactttattgtggtgctaggagcagggccgacccaagtattgggcagcttgggccattgcacaaggcccccatttttctaaggcccaatttttttttatttttttttttaaaaaaaggcctattttttttttcttcatttttttcctattatttatacacaaataaaaaaaattaattaaaaaatttatgaaacaatttaaaaaaaaaaaaaaagctattgtaattttaatatatatggtttttctttttaaaaaggactcaattttaaaattttgcactggctaggagcatggtgtctcatagcaatagcaaatagcaatgttctttatttatttatccaaataggcctttctacaataaataaagtatatagcatttagggttctattccatcaagtgcataaatcaacttgggtccaaactttctctctttcatttcaagatcctacagaatatcctttccttttccttgtcttgatttttattttcttcagtaaactgtgggcttcaaccaagaaagaaagagaagcatgtaaacgaattaggaaggacagcttagactactactactagtctatatatcatatctttagactcaactgaggcctgaaaaaaaagcatattcttcccaagccttctgggtcttttactgcattattatataaaaggccaaattatatccaattttattttttccatttgtaggaatttaattattttagtcattattaacaaagatgcttaaatcagcaaaaacaaatacaaattggctctaaattgaaccgcgtgcatgaaatgatagatgaaaactgagctgataaataataatcaaaaggacataaagagaatctcctaaatcgtttatccctattttgggttgggcctgaaaagttgaaaagcccaattccctttcaatcacttttccttttctttcttgataatcatttcttcgtttaacgttaagctttaaacaacttatttcattccaaattacatatggagacttgatcacagttgtagaaacttacagaaaatcagtaataaagctggtgaagggaaagtaagaaaaaaaaaagggttatgtcacgtgcctcacacaaaccattacattacatgtcacgtgactgaaaacatcctcaaaacggcagcgcatcaaaaacaaatgcatgctgtaaaagagtacaaaatgattaaataaaaaagaaagaccagccaaatagaagaagaagaagaaacagaaagtagaagttgataagtggtacttgagaaaaaggtgggtagcccaaaagtgaaaaaagaaaaaaaaaa

SEQ ID NO: 61439 - DNA, 529 bp, Cannabis sativa
tatatatagtgggaaatgaagcaaatgctcattgaagatttgatgacatccaatttgaaggactttgatttttcaaaggcattgactgataagttcaattgacttgtcaaagagacaatagcattggcaaatatccactttctatcccaaaatcaatgcttttgtcaatatttattactcggtccatggaccatgactgcaagttgggcgctttctacccttttttttttcttaggaggaaattacgtaatttatgattttgtttttgaaaataggagtttctcaaaaagtttattttttttaaaaaaatatgtttaaataagtttataaacattattttttttagaaatttttacaccaaaaatacaaaatacacactttattacatatatatcttcacacggttaaaccaatatttatacatattaactttattttattacacttttaccacttgcacacacaatccatgcatggagccacacacgtcattgtcattgattgatgacttatatcaatcacaccttac

SEQ ID NO: 61440 - DNA, 1282 bp, Cannabis sativa
accgtgtataaatttagtgattctcctatatacacttgtggtgtatgtggtgttgagattgctctcacatctcttatatatatatgctatttatatgttgtgttttatgtgtagcttattgctttgagttgtaattcttctcttcatctctattctctattttatgtgtatattttgtttagtgttgtaacattatttaatctatgattttgtcctttgtattatttatcatagagttgtaatattgttggtttggtatttctattggagcacaataatttccaacaaattaaatcattaaattttatactaatagttttgttattaaaaatacagatggtactcccactaacaccgccgccactacttgctcagcgacgactacttcatcaatgcagtcaacttcagttagatcttagcaagtaatagtaagtaatatttaataaatattaattaagatttaataattaattatatttttaaacaaatgtttacttaagattttattactttgattatttattaagaaagatgcgaaaatttgaattttaaaatacagatgatgtcctaacggaaaaagagaggagccaaagccaaatcactcgacaactttcaagttttagctttagagagcatgtcaatgccattatataatatttattttataaatgtttatatggacattaaatttataagcatttttttagtttgagacattaatatggactttggattttatggactctaaatttttatggatggattttaaaatattttagctttcacttttatcttgattgatgaacataaagatgaagtttgattcgatgaacaaattgtttgttggttggattgatttggtttaaagatgatttgatgaacaagttgttatattatatatgtttaatttaataaataaaaaaagtaaaagaaataattatttgaataaaatattaattttttttaaggagttgactgaattgaccgagttaatctgttgagccggccaaccgaaacccgccaacctacccctatttgggtccgggttcgggttcgtttttttagacccgaaacccgtgaacccgtaacctgcgaacccgaaacccagtgaacccgcccgatgttcaatcttaattatagataaatagatgtcatttgtattgatgttatataatgacattaatgctatttttttctttttttttaataaaaaattatggtaaataaagttatataatttataaataaaacaaataaaatatttattataacatttttcaag

SEQ ID NO: 61441 - DNA, 1139 bp, Cannabis sativa
tgcttagcacgacaagcgtgctctgcatggtatcgtggcgtgggagacaaactctaacattgtacatggaaaaaaggtgtggtcagtgggcccgtagcctggcacgcgcggaccaaacttctgtgggttggaagcgtaacccgaattgacgcaccctggagaaagattcatatccttagcaggaataaaaaggggttatgtcttctagactgaagaatgtcactggttcgcgaacatctcttttgtggtctcctttgggaaggcttctcttgcagggacttattctataagttttatgctgctatcttcccggagcgcaaggcaagacactttggtggcttaataaccccatgtccttcattaatttatatccatgtgtcgttccggtgaaactgcaaataacaaaaagaaaattccattaaattctaatagcatttttgctatttctaaatttgatctcatccacattgatatttggggcttttccatattgaaagtgttgaaggattttgatattttatcaccattgtggatgaccacaatagattttgatgggtatacatgttaaaaacaaaagctgaggcacaacaatatatccctcagttttatactcttatacacacacaatatgcttctaatatcaaagcaattcattgtgataatgtaaaataacttaacttaataactcttgtgttcaaacacctcatcaaaatttagtagttgagcaaaaataccaacatatcctaaatgttgctcgggcattggcattccaatcctctcttcccctagtatattggcctcacctaattaacaaaactatttatgttataaataggactcttacccccttattacaccacaaaactgcctatgaactcttgcacaataagcagcctacctataatcacctaagaacatttggttgtttagcatacacttctctaactagcaagagacataaattttcccgcgtgctcatgtctgcatattcattggttatcccaatggtatgaaagcatacacactacttgacttggccagtaatgctatcttctattccggggatgttatgttttatgaaactatttttcccttaaaaggttcttaaacctttgatctcaacaccttttttgctaaat

SEQ ID NO: 61442 - DNA, 708 bp, Cannabis sativa
aaaaaaaaaaaaaagatgaaaaatcacccacacacacattaaagtatctccgtccctctcttctctccttttcaaatttaatttcacttagaaacaaacaaaatcttttagagattatttcacatatacataaaaataacaaaaaatttataaaaatatgatttcacaaaattttaaatattttttgccagtccaatctttcaatagtgtagaagtaataataataacactatttatatattattttactcctctaacacataaattttgctattattttacttgaatttttcagacctttaaaattaattattaaattattcataatgttataaattaatctttctctcaaattttattacacataacaaacaaaataatgacataataattacttagccgttactgtcatatcatgtataattaatttttaaaaaataatttaattttttaatttaatgtaattttcttaatttttaaattttagtttaataattttttaaaaaatacattatttttattattttttttaattttaaattatacacctcattcgtgaattatacatgacaaaagcaacaaatgacatagatgagtaaaaatttcaatccatatgggtccataataatggcagttctgttttagaaagggaaatttgaaaaaatatccataaaataccttaaatttttttccctaatctaatacatt

SEQ ID NO: 61443 - DNA, 1889 bp, Cannabis sativa
ttaatctcatattacccattaacaacatataaatctgaaaaaaaaaagatttgaaaaaaaatgggttaagttcaaatattatggagcttctaaataaaatatattaactctgatactaattgttcattatcgtagatatgagcaataaaagaaacatagtacatactaattatcaatattcataatcattaatccaagataaatatttcatgtagagcatccaaaacaaaataaaatcacatacctcccattaataatctatttatgtgagccattttgattccaagaatctataatgaggattaacacaaaaacaatattagagagaatcataatgtggagctattatctctttttttcactattacaaactttttcacttaagacatatctatatatgtcacacccttctaatccttaggggttatacactaattgggcttaagtggttcaataataatagcataatttaatgagccaattatagttataagggtgttctcatgtggcattaatatcataaataactattcccattatggttgctgataaatattgagtacatagttaataattctgtttatgatattaagcctatgattatattagtccataataacaattctaattcatactcaaagaattgaccaatttatatggtttcgaaacctattaaaaacaaaaaaataaaaaacaagaacaaaatagataatttataaatttgtttaatgcgtacatgctaaagaagatttgaggcctcaaatgaaaactttaataggtaatttgtgaccaagatagttcttctttgttgactttgtcaactttcaatgttcgtcttcttcccaaatcgtcttctttgttggttataaagcctcctccaattttaattattcggacgaatcgactgcttgtaccaattgactgctcaattgattagactaatagtttgctcaatcgtatcgacatgtattggttttctatttccaaatccacctggtctatatcactaaacgctaaatcgattttacaaagacaaaacggtgaaggtcaatattggaccaatctacaacccaatcattaagaactacccatacactgaacgatgaagttcaatcaaaaaataaaatcttatcaaacgaatatgttgtagttcaacccactcacttgcattgaagatccactcgcctcgacccactaacctgcaatgacgatccaaacttattctcaaatggattctgttatctaagttttgtgaatatggcacatggcacgatcagaggaaagaatacagaaacgatgagaataggtcaaaattatcaagaaaaggagcgcagatttgggaggtagtgggagatgatggctcccgagagtaacttcctttagtgaaggaccctgtaatgatcgcttaactttaatatgagaattagtaaataattaaggtgtaatttggaattagacttttaattgtaattcacataattatggtgatatatttgaattaaagatgtgttattatgttatatatgaaattttatgttttttggattttatgcccggtgatagtggaacgcggcgtttggccgatagagtcagtttttcctatgatttagtattttagaaatagcggggtaattgagaatgtcaggaatattggttattttagttttgaccaaaggtggcaaagttgcttcttggtgaagcaagggtaaaatagtcttttgccttgagttgagttgacctctgtctttttagtgacttagaagattaattttaagtttatgaattctaattttatgatatattgtaaactatgagataaaaattagggttattcatttttacaaattagacactcactttctctctccaccactctctctctctctctc

SEQ ID NO: 61444 - DNA, 944 bp, Cannabis sativa
  modified_base (462)..(487): a, c, t, g, unknown or other
  modified_base (891)..(913): a, c, t, g, unknown or other
ttgagatcaaacctaaccatgtcaagattaagatcttttgatctaagatcaaccagtaatcttgacttagaaagatacaaaggtaagattataatatctttactaagatcaatatcagccccagtctaatttatactctatacatactttaccgatactaacatactttgccaatgttatgaaaagaacataacacctatccaaggtgtaagtaagctttatcagtgtctatcacatcagtgtacattcagtgcactaatgaatcatgggacattatcttttgaagcatataatcacatttaccttccactgtgttgacatcactgtaattgtgaataattatatgttctgaacttaacagaaatcttacactttaaaccataaacatgaaaactacatgtaaaaataaatgacttttaatcttctattgataataaatcagattatattgaaatgagtttnnnnnnnnnnnnnnnnnnnnnnnnnnctcccacttgcactaacataaaaccagtagtgcatttcaataaatcccttgtcttgatatccagatcaagtgtagtgtatttgactaaacccaaattacaggaactgtaagtctgtggtaagtaactactttctccaccattactttcttcgtgttcataaaacattatgcaacatcattttctatatgcattactcacctagagatactgaattctgtactgcttattaagtgcatctgaatatacagaagacatatctctaattctactcaaaatggaatagagataacacaattaagaactttcttaagtttgaataactttccagtgctttcgaaagaaacaaagttattttgcttcactaatggagcttaaattattatagatgggtttttacatcctnnnnnnnnnnnnnnnnnnnnnnnagagtaaccaccatctcgaataggttatgag

SEQ ID NO: 61445 - DNA, 1531 bp, Cannabis sativa
agagggagccacatcacaaggagggatacggtccaaagctcagaccaagtaagcaaacttactagaaaagattccattaggctcctcggtccaaattcactggtctttgccatggccactaggcttacccccttcaaaatattacaaacagtttcaacatcaaaaagggaatagagcttgaagagatcccaatctttagtgtctaaaagcaagtcagcaatcttttcaaaatcatatggataattggccacgagtctagggcaaaagtccttcccttggatttgttgggaccttaaaagtaagtattttaatgttagaattctttatcactcataaaatatgcaataacaagattcgatttcatagataagcataatacatattattataagtgtataaatatagatctaaagaatgtctttgtcgatccaaagagaagaacgcaaatagtataagcgtaccttaatccatagatactgaagatcttaatccatcttgtagagatgatctttgttgtgatttagggtaatgatcttccgagaatacaagacttaagttctctagttttctctcttgatgggggaagatgagaatagagtggcttttgtttcttgaggatcactaccaatatatgacctcataggaaggttataattttaagtatttctaattaacccctcaataaattagaaatatctcttaaggtatctacacatttagcccatgacactttaatatacaatgacacacaaatactaaatgatcagtttattttaggtcaaacttcaactagcaatacactaatatacatatgagcccatattgaggattttaatccaacaatctgtcacttgggctacatatatttttttgattgtacactgtgtaaccttataagcgcttaacttttgctatcataattatataggtatttcaaaacaatctcgtccagtgattatactgacataggatatcaaagcagctttcgcaacatttcgcgtggataaatccatcaatgatcacatatatcaatcgtggatgcgtagcatagaaactacatacaaatgtgatgatcttagcatgcttatctccaactggtcctcattaattgagataaattctttataatttctaactttatacttaaatctcaatagaaagaatacgttcagagtactcaaaacttaagttcatactttatttacagaattaaagcataaatatgtgtcagcttgatagaacattctaaatacaaactctcaataaatcaacacaatcttaaataataccacatccatatatgagcaacaagtttctgaaaagtcttaagtggtgtatatccttaatgatccagatctgaaaacccaatcacaataactagaaccagtttaaagcacagtaatccaatttagaattttgcatgaaaaaacctaatctcacaacttgaaattcaaagagaaaaaagaagaacaagcttaccttgagctttgatcctccaaattctcttaatttcctagccaaaaccccttga

SEQ ID NO: 61446 - DNA, 1265 bp, Cannabis sativa
tttaccagcacttcctttgttctttcatggtaaattaaaaaatacctcttttatttgtcaattaactaaatctacttataatttatatttaattaaaacatacctctttttatatattctgtacccaaaaggtcctgacataagagagtcacatggagagtatattatagtaacatgaataaaattggtaaagtgtaaaaaaagaagtaaaaatgatagattttaaaaagagggtaaaaataagagaataatataaaaaggtatagagcttaatttcctccatcaattgtgtaacttcaaggcagaccttaacattatgatattgatattgacagagcgactacaataggggtgttatttttgttcctgccggtagcgttcttctgttttcagcatttgttttttgataatgtagagcgactataatatcatattagtgcatgattaacattataactaaaaaattgttttttgtttttaaaaatagaaaattgtttttaaaattaattaggcatatttggccttattttttgaaaataatttttagaaaataaagttacaaaaaacaagaatttcgaaaacaacaaaatattgttttctgttttaaaaaacaatttatttttgttcaatattattttagaaagcactaaccaaatgtgactttgttttgaaaacttcaaaaactattttttgttctcatttgtaaaaataaaaataaaaaacaataccaaatatgctctatatttttgcattgattatataaaaatccataatttcatttctttatgtttatgtaagttttacatttcaatgaagacttctagtacgagctgaatatatatatagtgtcaacaagatggctctgaaactccacaaaaaaaaaaaaaaaaggtatgaaatgcccaagaaaattgaacaaaggaatcgaagtggtgagagaacaactcaatataaatagcattatctcatcctcccagtccccacgctcgatgttttgtcgatctcaatgaaaaagaattgtatacataatgcatcctcaaaagttgaaactagctgaaattgaataatcaataataatgagagagatttgtagaatggaattgtatggtgtaataattgtcaaaatatacatatatgagattgatatattgttggagtagaggagtggcccttttctctttgtcactttcttaacgtatcttgtacgattaggcttacattctcctcaaagtccagaataataatattgaacaactaataaaata

SEQ ID NO: 61447 - DNA, 667 bp, Cannabis sativa
atttataaattttttaaaaaaaatatcttttttttttcttttttttttctctttttctttctctttctccttctctttcttctcgaatgaatcccctaaaccgaccctccatctccgcctagcctcagatcaacaaaacttcgatcatcacgcgagtaaccaacagcaaccgaaccacctccctccaccttcagcaccaccattacctccattcaccttgtcagcacccaaattgcaccagcaactccatcaccaccttcgacctaaccaagctcataaccccaacccaacctcaacgaatcaagagggtgaaaaagagaaagagaaaaagattttctcacagtgatcaagaaccttagacataaggtaataagcgtagaaagtgaccatccccattaccgtcaagcaaagaaacccaagtccccaacctaaccctctaaaagcgtacaacaaagtcagaatcgtcggtccaacaatcgccgtcgtaagatgaaacccagcgtgccaccactcccctgttcacaaatttcaaaatcaaaatctaaacttttttaatattaataaaaagagaaataaaactctcacctttggattgaagaacgaaggctgctccggcgtcgttttgacggaatgtttcgtcggtttgaagaagtgaaggagaagtttc

SEQ ID NO: 61448 - DNA, 1068 bp, Cannabis sativa
ttcgcgttctattgttttgaacaaatttatttattaatagatgttataatttttattcaaaaatagtaatattattatgttctttttacaaataccgataattaaagggtgcacttaaatatgcaacgaaatattattattcgatataatttttagtaattaaataaatattatatttggcgcgatcttattaaaaagcaataaaaaaaaaagaataacttgactcaattatttaaaataatgaatttcatcttaaataaataaaataaattagaagaaatattaggtgtatgcacatatcattattcctaaatcctaattaaaatgtcaccatttcataaacatcatataataatactcaaataaatatataaccacttgtgcaaattgtcttaaaattataattgcataataaaaatcacatgcatctcctcctactccaaaccacgaaacgaattattattagttaatattatcttcatatgcaccatgaattgacttcccacttttgcatctgtttgatggccttcaaataattagatctgcttcattcatgacttctaataattgaattcacagcctaacataatagcaattaatatttataattatttgtcaaaaatagacttttataaaatatatttcaaaatgttaaaaaagtctttagatccaaagagttaacaaaaataaataaaaatgagaatagaaagtatattcttttataacatactataagtcttaaaaagcgcgcgtgggaagccagttactaatctcagctctgcatatgattataacccctaaaaatctaacgagattataatattaacaagtagctgtggaagaaagaaaagccggttctcgcggccaagcaaacccttcgcccacgcgcgcgtgtagacacgctcatggattagatggataggttgatagctatggataggtaggtaacagaaagaagagcttctctcacatacaacacagctcacacaaaaggaaataaaaataaaattaaataaattaaaattaaaagatttcacttcagcgcttttgcgaataaaagtcgaaaca

SEQ ID NO: 61449 - DNA, 593 bp, Cannabis sativa
gcaatgactattgataattatcaaccttcatctactagtgatgtgttttcattatggtaaaaataattttgggggatgaaaattccaaggaaaatcttacattttgtatggagggattatcatgaaattctacctacgcgtaatggcttgtttagacggaatatcgcctttagtacttcttgtcagctatgtggttttggaggagagtcgaatactcatgcaatttttgggtgtccctttttacaaggcatttggaatcttttggaattctcatttctgcatgaagtaaaaaaatagattaatttcaagaatgttttactttatgcttctgaagtggtgggaagagatgcttttgcaaaattaattatgtgttcatgggcaatatggacagaaagaaataagattactcatggccaacaaataagacaaccacaaaatgtagttgagtggataattagttattatgattcgatcatttcaatgaaggatgaccccaaaaagagtctccaaactaatggaatagaggagctttggctgaaacttctagatgtgtccaagaagagagtttacactctaaacttatggtggatgca

SEQ ID NO: 61450 - DNA, 2017 bp, Cannabis sativa
attgaagtaagacttgatagaggcttggtgaaccaatcttggttggatatttttaatttagcaaagctctacaacctgaaaactactatatctggtcattatctcatcttcatggatttgttaactgacttaaactcacaaacggtacgtcgttttaggtttgagaatgcatggattcgtgaaccttatgttttcatattgttaaagagagttgggaggagtgtcgagggagtgatttacaaagtaaggtggcagttttttcaagccatttgcagcgctgggggaaggaatatactgggaattttaaggaaaggattgggaagtggaagaaagagatgaatagatggaagcttggttgtgatgagatgtctattaagaattttaaacaggctaaacaatacttggtggaaacgtatgctcaaagggaagtttttttgcgtcaacgatccaaacaaatgtggctccaagatggtgataataacaacaagttttttcatgcctcagcttcggcaagacggcgtactaattccattcagaagcttaaaaatttagcaggtcatttggttgattggaacactggtttaccagatgttatgaaggattatttcactgctctttttgcttctgctcaaactgattggtgtgaggttacgactttagtgcaatctcgtgttacgactatccaaaatgaagatctcttgagaactgttactcatgatgaggtccgcaaggctcttttccaaatgcatccggataagtcttcggggcccgacgaaatgactcttggtttctttcaaaggtgttgttctgtggtgggtaatgatattttcaatcttattctttcattctttgaaactggttatttttctccaagtttaaatgctaccaaccttgtcttgattcctaagaagaagcatcctttagatatgggggattttaggccgattgctctttgtaatgttatttacaaaatcatttcaaaggtcattgcaaataggcttaaagctatccttccttctattattttggaaacccaaagtgccttcttgcaagggagattgatttctaataatattatgatctcctgcgagattatgcactatcttaagaggaaaataagagggagagatgggttcatggttctacaacttgatatgagcaaagcttacgacagattggaatgggggtatcttagagctatgcttgaaagaatgggctttgatggaagatggataaacttagtcatgtggtgtgttagttttgtctctttttctattgttcatggaggtcatgaaatgggtcctattgaagcctctcgttggataagacaaggagatccgttatcgccatatctttttattctttgtgcggaaggattttcatgcctcttacaaagctatgaacaaagtgggctcttaacgggttgtaagatatctcgacaagctccaactatttcttacatattgtttgcggatgatagttatatttcttgtaaagcaacagaagatgaagtttttaatatcaaaagttgctgcttacgtttgaaatggcttcaagccagaatattaattacaaaaagtcttcagttttttacagctgaaatactagtgctggtgtgcatgatgctatttgtgatttacttggtatttttgaagttgatgaaaatggttcttttttggggttatcgtactcgattgggaaaaataagaacgctattcttggcttcctaaaagataaagtgaggaaaaaaaatcaatggttgggaggggccgctgctgtcaagggctggcaaagaagtgctccttaaatcagttgctcaagcactttcaaattatgctatgagtgttttcttgttaccaattgatacatgtaaggagcttgaacgactcatggcaaaaagttttggtggagcacggattctaatcaaaataaaggtactagttggatgcatgagttggagtcgtatgtgtcgtcacaaagatgttggaggtttgggattcagagatttaagagattt

SEQ ID NO: 61451 - DNA, 1151 bp, Cannabis sativa
  modified_base (314)..(321): a, c, t, g, unknown or other
tggaatcaacgtcaaatatataattatgccaaaataactgtaaaacaacactaaaacaaatcaaacaaaacaaaaggaaaaaagaattaaaaaaaactaacaatcttctgctcattcttaacaccaaatgcaatagcagctatatttacaagttcagtcctaagaaatcagaatagaaaactactaaaacaaacctaaaacaacacaaaaacaaatgtaaaacaatgaagcaaatataactgctcagaaaaacataaaagaaccacgcacctcaaaatttttttgtcactgagctcgtcaaatgtatttatagnnnnnnnngaataaaaaaactacaaaaatagccaaagagaacgaagaagaaatgaatttatagccctcatcttccacacccacagacagaaccaccacagcaataccaaataaattaaaatgagcagaagacatagatatgaaaacaaaaaaacctagaacatctacaacaaaaaaggaaaaaaaaatgctaaaacaattgaaaaacaacataaataccttcagcactttgagtatctcaaaatattcatcaagctcaaaattagagtctgaaccttcaatgaacggtttgaaacgttttgatttctctttttcaaagtgaataattgatttccttttggttggaaactataaaagatgtagggctacggaatttttttttaaaatattttttatccatttttaatttactaacaaaagcaagagaagaaaaatgaagaagaagaagaaactagaacaaaaatggaagaaaaaaaaaagatgaagaagaagaatggaagaataataacgttaaaagagttttatttatcacttttttaaattttaattcttattaaaaaaaattataagaagtgacaaccactttcaaattagcatgtattgtgccttatttctcactctttttttttttttttaaaaaaaaaaaaaacaattgattttattaaaaaaaataaataaataagagtatgccaaaagtatgataagcaacatcacatcaaacccttttactaattctttttaattaaaaaaaacatataaaaaaatgacataaaattaaataagagacaaaatgattatagatgcaagttttatattgttttgaaaaagacagtatataa

SEQ ID NO: 61452 - DNA, 917 bp, Cannabis sativa
  modified_base (717)..(720): a, c, t, g, unknown or other
aatctttaaaaataaaatatatttaaaattttaaaaagactaaaatcttaaatgaaattagcaatacgtggctcggcacgtacattcacctagtttatgtgaaaagtccatatattaaattgattttattgctattttgtttgtcgtagttttttatcccctttctatgatcaattccctttttattcaattttctgaaatattagttgattaaatatttattttgcatagtcaaaagagccgaccaaattaaacgaacgtcaaaaagtgtatgttatatgtattcgaatcttagaaccggttaaagagattgttcaggattctcacttactcaaaatcaaaatggcccctctctctctctcaatgtgtatatatatatatatatataccacacggctacgatgagtttaataaatataaatatatgtatatatatattaccacatatatattctagtgcctacacccttttgcattgcaaaaataacacaaaaattattgtatataataccatttcaacaaaaaattatccattgatcatataaatatatataaacaccaattaagaagaagatcataacataacaacataaaatcttattaatctaattgccatcatgcgcatgagctagctgtctctcactttaattccttgattcacattgatctccaaaatttgatgttaaaagccagtctcataaatatatatatatatannnntatatatatataaagatatatatgcaaagaaaaagtttattcaaatctgggagcggtctagctagctgtttactttttcacctattggcccattatcatcactatactactcagtcagtactatcttctccaccactttaccaacctaatatctctgttaaaacttatgttgaaacacgtacatacaaaaattatta

SEQ ID NO: 61453 - DNA, 767 bp, Cannabis sativa
tcatcaactattacagaaaattttacatcaccaatttcttcacgaattgcatttctcactttatttcccaacacatgcaaaacttgtttttgtgttgttggtgatgtatatgtggcatttcgtggagctttatccaaaacttctgctaccttatcattataggaagttatgaaactcaatcactctaaaaagttttactgattaattgaagttttagattcattgtgacctctaaaagggcatgcttgaaatgcaagccacctaatcccctcaattgatgttttcaaacaaagtctatcgttagcaatttcttgtgatgtgaagtttgcaaaccttcttccaatatgtattggttggttcatgagattcgcaactacttttttagcatttctatgaggtgaatttatatcgtctccaatatgtgctaaaaatgcacaattttttcctctcacctttttccatgatcgaaatccattaatagtaaatgcatccaatctaggaggtgcatctttagagtaaaataaaaagcatggtagaaaaaatgcagcatctactttaggagaatattccaactaaaatggaaatagcttaaaccaagatgactgaaaagaacgtgaatgagcttcttctaattttttatagctagagagtatactctgatatggaccagctttaatgtaagctttacgaacttcgtcacgctactcaggtggatactcccatattagcgggcgtattcccggatcacgctccaataaattaatatc

SEQ ID NO: 61454 - DNA, 923 bp, Cannabis sativa
  modified_base (308)..(316): a, c, t, g, unknown or other
aatgataattttatttgataattagttttaattattaaataaattattttggcatttataggattgaaattagaaaatatagtatttgtgaaaaatagcaaaaagctaacagtgttgggcccacatatggccggccactatagtcctattttttctattattttatcattttttattccaaataattcaatcttaactctaagtgaattagtataaaaagaaaagtatagtctcattatccaactaatgactctaaacctagttttcatattgtcaaacaactagagagtttgagacttcttcttctnnnnnnnnntcttctaattcgaattctatagtcttcttcatcattaacattcaagccttagtgattgagtgcatgtccacccataacaagttagtcctcaatcatagtgtgtaagattgtgaagaatccaaacaactaaaaaagtttcgggctcaaatcttgattatacactgtgacaaaaggaacaaaaattagagatctgagcggaatgagtcatttaattatgctgcaaccaatgtaaggtttcttatactttatatatgtttaatttttatcgttttaaaagttcatatttatgatgttaaaaacatacttattagtaaatctaagtcctggtaaaatataatccaacaaaatgatcatattaatcaggcagtaaaagatataggacaatatataacaagcatacatgatcttggtaatctagtttccacgtacctatcttctcctctccatgggagaaatccaggtaacacaacaacgaaaaatcttgggcacgtaccattaatgtattgaaaagcacccaactaaacaatatctttgacaggataatgtgcttaaaaaaaatatttctattattccagattgtctagctagaacatagaaaaaaaaaaaa

SEQ ID NO: 61455 - DNA, 629 bp, Cannabis sativa
caccaaaacgttaacggtctgaactcgttaatgatataaatagactttttcaactaacgttgcagataaactttaatgaaatcttgaatttaatgccaagaagaaagaattttagaatctttgatgtgtttgaaaataatatctcataaatgctcttccaaccatccagtttctaaccctcaaaaaattcaaaaggaaaaaaatcccccctttcccttggactagagagtctaatttatagtcacccctcttctccttgcaccttcagcttccccatacaccctatgaccagtcgctttcaactattattacactgtcccctaagcaaccttccatgtctaggatcctaaattacactaaaaaaattcctttcattttttaccttagataaactaaaatgttttcttgttatgtaagtgagttgtcccgtcgttgtccctcctaacaccttctcagtagctctgccggtgtcaagaaagaaaggtggatgggtgaattgttgagactgcgggcatcaatattgtaagcgggtgaaggcacgtgggtgagcagacatgagcgtgggtttgcacaggtgcgggctgatgcgccgcggggctgggcgtgcgcgggtacgagttggcgcgcag

SEQ ID NO: 61456 - DNA, 563 bp, Cannabis sativa
taatatactaaaaaaatacaaacgtatttataaaatataaaatattaataaaaaataattaataaattaaacgggtccccgtccctgccccgtttaacattcggggataaaatttgatcttcgtttctcgtttagacggggaatccccgccccattaagggcgggtccccgcggggcaccatccccataagaaaaatgtgcattcttacttgggacactgagatggataataattgggacaaagtagaatcataccctgtacaaaatggatcccaattccctgtcccaattattaggtgtatcaatgtcccaagtaaataaaaacattacaactcaataagtctacttcttattttaacattttggtacattttaacacatgcagtctactctttttttaaacatatatatcaaacttttttagtttttcaacatatgcaattgttgtaattgttttaatatatgcctaattttttcagaaaattataaaaaataataaaaaaaaaaatgacatccctatcacatgttttaacttatagaaaaatatatattaatttaaaaca

SEQ ID NO: 61457 - DNA, 1057 bp, Cannabis sativa
  modified_base (53)..(60): a, c, t, g, unknown or other
  modified_base (135)..(148): a, c, t, g, unknown or other
attgtcaacttttgtaaattactgtccactatgtatttataaatagtggcagnnnnnnnnaaaaaagggggacgaaaaaactcacatgaaagaggccctaaaaagaatgcttaaaaatctgaataagattgactnnnnnnnnnnnnnnaattttaactgcaaaaccatgtaaaaaaccctgtgttcatatattatttttctatagcttttactttttctgtgttgaattatcatcgtgaggctcaaattttgttaacaaaaatctgcgttaacatcgtgaacctctttaaaatcttgtgttctttaatgtttattggttcttaccttatcttattatatttcttatcacttattaactgactcattttcattggctaaaagtaatgtcaacattttggtgctttcattgagagcaataatccaagtttgctctttgcattaagttttatcagacacacaaaatggtggtgcaaactcgcaaaggcgtggttgatcaggttgatccactattggaaaatcctacattgcagactcctagtaatacaagggtcccagcagttaccaatcctgaacaaccaaacatgcaaccacctactgtgggtcaaggtgtgacatcacctctggctgggatcacacccggtgttcaagagactggaaacactagttcgacagccgatctgggtactctcagtattggaatcccatccgcaaccaatgttcaaacgaccataggagatgatactgagattcagaacctctgcaatgctcttggactcatgcaaggtcatactaatactttgcatcatgatgaggaagagctctatgctgcagtgaacctggcgttcaaagagcagaggcgttagttcattgaatggagggatagggagatggaaacgttgaaggctcaataggtagccatcaacgaccgaacaagataggctaccatactgatacgaaaagcctaccaagttgctaagcagcaactagtcgcaacgtctagcatcccactgggcggctcgaaaaaaattcttgttgggcatactgcccaaactcttaa

SEQ ID NO: 61458 - DNA, 707 bp, Cannabis sativa
gccgccaatatcccttttatttatcacgtatgataaaatttgacagaatgaccaatttacaaaattgtgaaaagttcaaagctcatttttaacaagctgaaaaattcaagggcacaacaatacataggtcataattcaagggcaaaatcctaaatagtatttatttttttttttgaatgaaaatagtatttattttagtataatataataatgtaaatataggaaacttttttcttgtctttttctttttacagtgtcttttttttttttgaagaaaagcgtacttatattagattagaaactatcaaaccttgcggtcattacaaaatataatatcaggcatagaggaaattggcacagagccaaacctctgatgggaaaatgcccagttagccacattatgggccatacaattatactgtctacgaacaaattgaaaagtacaaccaataaaagaggtggaggtgtttttacaaaaagagacatagttatcaagctcccaacaggactccttcccattaagaacgttgatcaccaccctcgagtcactctccacaataagaaactcaataccacgagctttagcctcctctatagccatacagcaagctgccacttccccacagagagcattagaaaaatccagtctttttgtagaaacccagatcaccttgccgacgtgatcccttgcaaccactgcagcgcac

SEQ ID NO: 61459 - DNA, 915 bp, Cannabis sativa
taccaagaggaggtcagccttttgtaagttgaggacaatattgtacactgtttccttgtataggttagcttccattgcactacaaagattatagcttttaggcgcgacaacatctggaacgacgtaatattgttcctgatagtgaggacatgaggcacgactttacaatttcattcgagataatttttttttaaaaaagataacaaatcgaacagaatctcgcttagtcctagagtcacttcttggccagccagcttgtgcacagatcctagacttataggctcaccctggccagcctgtaggcttctcttggtgtaacgccctaacatttaggcatgctacccaaaatgattaagacaccccaatcccctaaacggtattactaataaaataagcgcagaaattaaactttaaacgaaaatggaatgaaaataaacctgtaataatttttgaattaatcatatttgcaactatgaaacaactactcagaaccacaatctggaaaaaaaaaatcaataagaaccataccttgtacttttttaatagcctccaaaccaggccaaacaacttgatcattatcaatcttaagctgcttaagcccatgagaaagtcatcaccctttaaatcaacttgtttgcccttgacattgccaacgtccttggacttatcacgttcacttgctacaacaccctcacattttttctcaccaatatctgtaacatcagcacccccttatcactaaccacatcatcatcatttttatcatctttaccattaacgctactacgctgttcacaagaaccatcaccattggaatcaacaacattattagaattattatcattcttctccgaatctggacctatattatcttgggtaaataccattttggatcccgtattttgtaaaagttac

SEQ ID NO: 61460 - DNA, 825 bp, Cannabis sativa
tgttcaataattggctcaatgccaccaaataatatacatcttcaagaggtaaaaataattgcaaaaatcctccacgatgatcctccattggtccttcttacttaaattcaagaaactattcatgaagagaatctttactggctcttctaactctttaccactccttagagtgattgcactacagttttcgttaagatttacctctatattacttagcgaatttccttgagatattttatgaagcataatagccagttgtcccacttgtgtttcaagaattctggtggatgttcttgtctcaatcataagatgagtttgtagattggtgagaataagcaaagcagcttgtagatcaattgttggagcaggtggagcttgtggattttactgttgagaagtagaagcttaattctgatttttaaattggggttgttgcccttgattatttgtccatccattattaaatgaattggagaaaggatttttgaactgcctctgaaaattagctatggcttgaacttcagcaagattcatcagaatgttatcaattgatgtgtgcatttatcaaacatatgagacctctacaaatttcacaactagtttgagcttggatagcattaatagctacaattgtttgctgcaactgtttagtgagagtaacaacctaaacagtcaaagcaataattgtatttaattcatatattccagttgttttcttcttcctagatgctctctcatcaaagcactgatgattattcatagccatatcttctaaaagtttatagactccagttacactcttactcatgaatgtgcctccagaag

SEQ ID NO: 61461 - DNA, 826 bp, Cannabis sativa
aagtacaaggtgtgtgtggtatatatcactcagtggtactcagggtacgaaactaaccctaccaacactcgtacagtaaggtacgtagtgtatgtggtatagttgatatgccctagtatggaacgttcctatttatctgttaagccttgtaaataggtgtgtgggcgcctagtcacaactcgatattgtatgatatattatattcttttcttactgagtctaacgactcacagttctgcttttatgtgtaggtaaaggaaaggtgaaagctgaacaggaatgatcctaagctgggacgagattgtacatgtcatggcggcgcgacctggactgctctgtctcgggacatctaaggttgtggttttgtagtcgctgtgcgacctggatattgtattttgaatattttgtataaaagttaaaaaacgggatcccggaacttgtaaataattttgtaaagttataaagtttagtattttatataaaagttttaatttgacacgattttcgagaaagttctttgattagcaaagatagcactgtaattaaaaaatcactatagtgtgccttagcattatggcattacaatacttcttctctgaaattaatgggggctgccaaaaaatacttatctattgacagaatataattcacttcatgctgctgagctcatagcctatttactctttgaatagttcatttttcctaccgagtaatattttcctaaaggattgttggttgattgttggttctccacttctcaaaatcatgataattttctttaacactatcgtttttcctttagacgttggttcctcccacacgtctg

SEQ ID NO: 61462 - DNA, 841 bp, Cannabis sativa
tgacatttataggattgaaattgaaaaatatgacattagtgaaagaaaagattaattatgaaataaagtggcaaaatggtaactagttgaatccaccttgtatggctggccaattagtgatttttgcctaatattttatgctttttttaatccatataattaaatcctaatccctagaagaaatactataaaaggaataagatggctctcattcccatccatctcaaataacctagttttcattctttgtcagacaactagaaagagcctccttcctaagtgatttttcgaatatctcttcttgttcttcataaaatttgaagcctttagtgatagagtaccatgcccactcatatcaagtcaagtactaaatcatagtgtcgaagattgtgaagaatccaaccaaactgaaagagagaagatccaggttcagatcttaataatgctcagctacagaaaggaatcaagggctagagatctgaaggaaggagacattattattatgctgccatcaatgtaaagatttcttataatctcttatgtgtttatttcatcgtattaggaaatacatatttagggtgttagattatagttaataatcaaacatacatgttagtaaatctagatcctggtaaaataacttccaacatatcgtcggtatccaaatcatcaacagaataatggatctcaggggacacaatctaccgataatcaagcaagagcagactcattcaatgaccacacgaatgcgtatttcccggacctgcctgcctcaacacaagagtcataccacagtgaatcatattactagctagttttcccattaatgttttaactttta

SEQ ID NO: 61463 - DNA, 1724 bp, Cannabis sativa
cggtttggtgatatcttattcatatttatttggctaaaatttctttgagttatataaattatagtagatacagattttttttctttttttgaaaggtgtagatacagattttttttaaggttaattaggatttttaccttctaaattttgatatataccaaatcatgatctcttaattttttttactgttaaaaattccccattaactattgagattatcgaatttaaagaattttgtccaattttattcaattgtactaatttagtgattgtttatgtactaaatcattctccccaaactttaatatctaccaaatcatgtctctcgaactttgacatgtatcaaatcatatcccctggactttcattcatgttagactttctttagtaaatttggacaaaaatccttaaatccaacaatctcaataagtcagatgggatttttaacgatcagaaaaattcagaaagcatgatttggtacatatcaaagttcagagagtaaaaattcaaattagccaatttttaattgcatttcgtccactttttaaccaccgagtttagcagcagatataaacatatatatagtatagtttaatataaaaaaaaaatcacaaaagctaatatctgtacatttagggttaacaaatttgattttacttattttgacacttaaataaaacatcgtactacaatcagtctacaattataaattttggttgtcaataacagggcttcttgtcttaataagtttggtattgttattaataatattaatcatattagaaattctttcagtagcatatcactgtcgcattgtattcggtcaaagaactatgttgctcattttttagcaaaacgagcgttagaattagatgaggcttgtgtgtggtggtcgggcttgcccatttagctgtttaaatttggctatcttttgtatcttaatcttttggcttgatgtctttcaaaaaaaattatgatagtaggtcgtatgaaaaaaataaaaataaaaataaataaaatagaataaaatagaataggtatatttacaatagttgctataatttataaaattttgcattttatagccaaataaaagtttgggagaattttagttacaaaaaaaaaaaaaatgaataattcaagaaaaaaaaaaagtttatttacagtttttggcatggataaatagtgtctaacactattaaagcatccacaataagctattagctatgatagctaaaaaattaaaaaatttgctccattaagctaaaataattaaagagtttagccaagtattattgtgcattttgtagtaatttttttgttttttaaattataaaagtaaaaatattttttaaaaaacatgttctataaaattgtttttactttttaattttttaattgagaatcgaaaacaaaaaaaacctcactttaaaaaaaaaaaaattaacaattttttttcttagtcaatatttaagactcaaatcccaaactaggtcttggacatggccggccataatgatgtgcaaggtgagctactatagagagcccttaaaaaataaaatgtacaatatattttttctttgatgcccaatagttttttttttaataaatctaacttttgaaggaactaacaatttgtcattagtcacttccatcccaattctcaaagcctattttcaattctattaatacttttaagcaaaaaaataaaataaaaatctatt

SEQ ID NO: 61464 - DNA, 911 bp, Cannabis sativa
taccgaaatagggctctacttagttgtgtcgatgtacactcgcagtagtgacactatcactgttgatgtttaggggtcccgtgacacaaagtatgtaatcaagttaagtttagggtattggagtcacaagtttcgtaacaaaatcactaaccgataacgaaatagagttctacttagtggtgtcgatgtacactcgcagtagagacactatcactataggtgtataggggacccgtgacacaaagtctataattaagataggtgtagtgtatcaaagtcacccactaaccgataccaaactagggttctacttagtggtatagatgtacactcgttaggtgaatagtctgtaataatgtttggtgtagtgtatcagtgtcaccaatttcataacaaaatcactaaccgatactgaaatcgggttctacttagtggtaccgatgtacactcattaggtgaacagtgtgttatcaagatgggtgtagagtatcggagtctccagttttgaaacgaaatcactaaccaataccgaaatagggttctacttagtgatgccgatgtacactcgcagtagtgacactatcactgtagatgtttaggggtcctctgacacaaagtatgtaatcatgttagctttattgtatcggagtcacaagttccgtaacgaaatcactaatcgataccgaaatagggttttacttagtggtgccaatgtacactcgcagtagtgacactatcacagtagatgtttaggggtcctgtgacataaagtatgtaataaagttaggtggagggtattggagtcacgtgtttcgcaaataaatcactaaccgatatcgaaatagggttgtacttagttgtgccgatgtatactcacagtagtgacgctatcactataggtgtttaggggt

SEQ ID NO: 61465 - DNA, 1190 bp, Cannabis sativa
gaagctttgattactcttcaccagggtgatgacactgtaagttcatacttcactaaactgaaatgtatgtgggatgaaatacaagaaattcttccaagaattccttgtacttgtgctacttttgtagataatcttgcgttcttgaatcaagaacaagttcttcaattcctaacatgtttgaatgagtcctttttccctgttagagcacaaatcttgcttatcaagccttttctatccctgtcgaaagtcttctccatgattatccatgaagaacgacggaggaaactcaaaaacccccaaattccccctctcattgctactgtccaggacccttctacctcagctgttgcacaaactccatctgcatcagctgctgctgcaaaccaagggcgcaataaacgcatgagaccctattgtaccaattgccacaaaccagggcatcttaaagagaaatgttttttcttgattggattccctcctggctatggtgataaaaagaaaactgaacatactcaaccctcggccaatcaagcatatgcttccacagatcttttgtctctattggccaacatcaccaaacaagaagacattcagaccttaatttctcttctgagtcaaaaattacagcccacttcctctactgcagatgtttcccagccatttgcctccaacatttctggtaaatcgaaatccttttctcaaaatttatggatcgtagatagtggtgctacacaccacatttgttgcaatattgatcttttttaccatcttaacaacaaacctactgctacctccataaaactacctactggaatatgtatcatcatcaaacaatcaggcagtattcatttttccgacactttaaccctacacaatgttctttatgttcctgaattttagttcaatttatttagtgttcccacttttctcaacacactatgtcacaatgttttctttactcaaaattgttgtcttattcagggttctcagaacaagaagattgtgattgctaaaagagttggtcatctctttttcttgctgcagcaacctaatctgtcttctactgtttttcatcaatctttgcataataactcttgtaataatgtccattcttggcatgcccgccttggacatccttctatgattactacaaactttatcaataaaatgcttcatttcaaagattctaa

SEQ ID NO: 61466 - DNA, 1537 bp, Cannabis sativa
aagatatattataaaaatatgctttcattgagagttgaactcaagacctcccgcttactaaacgggtgctctaaccaactgagctatgaaagccttataagctttttatgctattatttctctctcaaatttatatatatttatctacttatatatttatataataaatacgttcactgtttgttatgctaacacaatgagtttaacacattttctaagaattttctttttggtgtcaattaaaacaataattcatttagcattaaccagattaaaaatgtaaaaaatctctattattgggctagccatgatgaatggatcgttctttgaaataggacatgccaaagacaatctatttctttcacaatgaaaatataccctacatttctcaaacatacgagttacactggcaacaaactagccaaagcaccaatggatcctcacacaaagttagatgcactactacaaaattggcttttcccaacagtttataactgtcttttatactatttgccacggttcctaaaaccgttggctatgtgggtgtcataaaaatgcagaactttataagacagtttataactgttggaaaaagttatgtttacaactgttggaaaaaatctttttaaatgactatttataactgttgctaaaaatattatgtaaattaaaaaaaatatatttaaattaatttattatatatacattattatctaattacaataataatataaataaatttcagcaaaaataataatataaataaaaattaatgaaacaaaaataaaacataaattcaaatgattatgtttacaatatctttttagtatatacaaatttttcattaacaaacaacaaattcttcattctcaaataacaaattcttaattcacaaacaaatccaactcaaacaattacatgaaataaattataccaaaaaaattacactcaaacttatatttacagatgttttgagtctcaagattcgaaggccagaatgctaggaacaggggctggccgaaatgctcactggagctcctccactgttggtggaagttcttggtcaaagtggatgcagaaggatcgagccaaaattgggtttttttactcatttatcttctttctcaaacactatacaaactgtatcctaaacaaaaaaaatagtcataagtaagctaatctgaactaagaaacaactcaaatggttaaccaaacagtaagatgtgcttaatgaaatttcttatacataattatccccataaacttcatatgacccccagtaaacgttccttcataagcaatgaaaatcttagctatgtactccaaaaatctcacattaaaagacatatgaatacaaaatgttatatcagtagggtctagtagagtccattatagtctccccacttttctccttcattttcccagcaaccaaacacaaatcaatacgaaatagacctatttacccaaatcaaaagtaaacccaatatttacaaagaactcaataccgtaagatatactctttttttttaaaaaaaaa

SEQ ID NO: 61467 - DNA, 1173 bp, Cannabis sativa
gaccttgttctcaatttcaagaaccatggaagtattaaaacaacatcctggaagctttagaaagagcacccaacgcccaggttgacatgtgacatggcgcactgggttatgcttatccaattctaatttcttcttgagcattaatctagtttttcatagtaactgagagctatgaagtcaaaaaatttctatacttaaataaaaaaatagcgaaaaaatatattttcttacactacatcaaaaaatatattatataaaaaattttaggttaaactcaatttttctttttttaacaatttttttttttgttttttttccgccaatagagcaacatcattccatataatgtaataataaatttttttaattaaacagaaaaaataagtataaaaacttaaattttgttaataatactttttacgagtaacaccaattaagattgattatttttttatttaaaaaaataaatagtgtgctcttgcgtactttctacatgtacatattttcttttatagcattgctattaggtactagtagtgcctaacatcttctcgacatgtcgcgttgcgatcggctagcgatagtctctaaaaattattatattaaattatatggaactcaatacttagttaaatcaatagcgatattaacacataaggtgcgactggtgtgctttagcatttctctttcttttattacaaaaatcacattcacaaccgtgtcattgttggtacatatattcgatgtcaatcaatatcattatgattgtcaatatattattattattattattatccttaatactatatatgtttggtgagaaaagagtgtctgcatctagaaagacaaagaaagaacattctcttttgctctggcaagaaacaaatattcttgattgatcgaaattctaaagcatggaggagatgccccaaatctatatcccaaaagtcaaattgggtagccatggattagaggtaatacttatttttctccttaattaacccatttcatttatctaataaggcttagcgggatattattaattttggtcaacgaccatcatcaacaaacaatatcagttcatattcttaaaaacataaatatcagattatcagtatctgttctactcccacttttatgtaggttatatattcacttatgcagcttttggtt

SEQ ID NO: 61468 - DNA, 983 bp, Cannabis sativa
taggttgaatactcgcacttgtctttccacgtaaattgcttcttgtcactaataatatcatataatttggtgttgtcgaaattcactcgacaacataagctatcactagtatcatccaaatgaagatgggcttggaattttaaaattctcccactcaaataagctattgtgatactatgtccaagaactttattggtatccatttctattactacaataacatgttaattggaacaaaattaggatcaagaataagttctaataatttgctaattatattacatccatgtgtaatcaaaatatgtgtgtattagagatactatggtgtattgagcttagtctagagttcaaaatgaactacatatgtcaatagcttcttccacccctaagtgttatagagatcctgtggagttatgaatataatctagagttcaaaagacataaaagatcattgaattgcatatattacttcttaacttcttccacccctatcagatcaaaagatatttttattaaacaaatcttaataattgcttaagaattaacaattattcataaacattaaatttaaattctaagtatttatgtggtacatctctttggagagaataatataccatagattttgcatcaataatgatacacaaacacacacaaaaacatgataaacatctaaatataattggtattggcatacaagttaaagaaaaatgaatctcaatttcataaaagcaattcataacaaaatatcttaaagaaaaaattttattaataatctcaaaattgtcataatgaattgtctacaataatatgaaatatggaataaaatcccaaaccaataattgaaactaaattgttcataaactgaaacaaataaatcaaaaataaattagattttgagcttcatcttcacttggacaatctccacccttctgtccaaccatccgactcaacttgctaggataacaatccaagtttaagca

SEQ ID NO: 61469 - DNA, 1278 bp, Cannabis sativa
  modified_base (799)..(805): a, c, t, g, unknown or other
ctttcgaagttgcatgtagacttcctccgagttgtctttgtgtttgaatgggttacacatgtcagacgcgtctgttcgcgactcgatgtgaggttgactgggcgttccttcgattttcggctaataaatgctctgacacaattactgttttgaaatccaattttctctcacaacggtttgacggttgcacttcattgcttttgatttcccatatacgcttttggggggaaccgcgacgtctgaggttcttttaaaatgattacccctttttgttgttcgcctataaataccagtgagcacttgttcacaaacccattttcaccaaccttccttgctaagtaagttcagagcgaaaagagaggtttttagcttcaagtttgctgaagtgttttcacagaaactgctcgtttggcttggcgtaacctgaatcgagacgttcaatccttgagtaagttctcaatttcttttacgtttactttgcacatttactttctgaatgcacttttaacttcgctattgaagatatgtaggaaaccctaagtttagaaactctgcgtttttctttgtaacgatctgtgctatttcatcgttcataatgcttgcttttcgaactacataatgcctgtctttcatcttgcttattttaagcttcatgaaattctttgccctaactcacagaaatttcaaacttttgagttttaacttttcactgaatattcatattctttaatccagcgagtactcctggtcatatttgcctgttttaatgttcgatatcccgaccaaacactcatcttgnnnnnnntcttttgtagatgaacccaggtgacttttggggaagcgaacaccaaatcgaccatgatctgcttcaactcttgcacgaggatcatcctcgtctttgttctagtccaacctctttgagcgattgacattttagcttaagtcctccgtccagccataggatgatggctcgtacaaaaaagataatgcgtacaatcgacgcatctgaccctcaagtggcccggcatgctaccttacccagtaccgaacaagattcgtccatccaggaggaggagggtcatgaaggggacgtcgaggtccaggagattgaggaaccatacgatgttcatcctagcattccttcccaggcggatgaagaggaggaggttgcacccccaaactttgggggatacgatgaggctggggagccagtcgatgcgatggcgacgttctggttgagggcgtggactatgctagtgaggaacttactgctgcggt

SEQ ID NO: 61470 - DNA, 1328 bp, Cannabis sativa
taacaatactaattgtattacatacaacgtactatgcagtataattacttttcttacctcatgttctagttcagttatattggtcgacctacttggagtacgatcaatgatcttggccatatgtcataacaataataaactaataagtgtttatcccaaaacactgcataacagttgcaaaggacaacctaggggttcctatcaaattctgtatttcaaatacactaaaataaaacttatattttggctctaaaacatacaccatatggtagatctcattgcatgcttcaaaacggtatatagaacgtccaaaatggacaaccgagtgataagttatgactaaaatacgattcccgagatcttggggctgcctgaaatggtaaaccaggttcaccagaaccggttgacccgtttacaaactgattgaccggtttatcaggggcaaaaatatgatttttcaagtttacgcactcaccaaaacgctaccagaaactgtccaaatcaccccaaacttcatagggcacatatatataccatatatactaccatacttacgtaatagaatctaaaatcgagcctgtaattagcaaacactactagtgttcggacctaagttataaaaatttctaaactcaatttttaatcaaaattcacctcaatgttagcaagaaaacatcagaactagtctcatgactacacgagaacaatcttataaggtcagaacctttataactattccaattcgcaaaacctatacgaaaccaattgttttacacttaaaatgaaattaaatcttaccttaatctttcccgctagaatgattttctatcctgctactaccggagcttagatcgctaggttttggattagaaatcgaaaaaaatggatataagagaagagagaatttgttgacgaaggaggagggtttcattttggttcttcttctatttataaatgtataacgtataatgtatagagatatacttattagtgaaactgataagttttatataataaaaataatattataataataatataataaaaactttattatttataagtatcttacaattcttaattactaaaaaaatctatacttttagggcgctaagttaaatcccacatactcctaattaccccaatatatacattatcaacttatcataatattcccataaattctttcagttaaaccagttatgacatttctggcgcccgatcgtgtctccaaggtcgccaaacctgaaaaatatttttattacactggtaactcatattacattcacatataccatataaatctctgtaatttataaattacgctt

SEQ ID NO: 61471 - DNA, 1097 bp, Cannabis sativa
caacctattttttgctataatgattaaattatttacataggggtcctaaaatttaattttatcttaggtcctacacaccttagggcaaactttgatgatatattattaagatatttatttttgcataatttaaatcgatagatcccacattttcaatttaaataaaagatgagtgatatcgtcaacctcctattacaatctcttagtcagccttcgtacccaaaaacacagaccatttttttcatatttgtttttattacggtgttcattataactacagcatcatctctgtaaattttttacaaaatttaaacagtttacattatcaaaaatatgcttaaagttttttgagtatgtgtggtaaactggaatatgaggaactctgtttttcagtagtgtaaactattcgaatattttcaaaatttataaaaataatattgtaactatagcaaatactactataaataaaaattgaaaaaaaaaaatattttagtatgtgatttgggcatgaaagttgacactgagattttaataaatgaaacctagcaaacccaagatttttttttggcaagacaaggaggcaaaaataaatttaaaaagaaaaaaaaaatacttttagtgagatttgaatccttaacctttatcttatatgttaaattaataatatgtctataaatattatcgcttattataaatatacgttgtaactaactaaaatacatacattttttttctaattattttttcagaaacaactgtcttgcttcacttctatgtggatctgtccctgaccatggacataaatgaaagtccacgagcacttattgcattttgattacatttattaaaaatgtcactagagtataggagtccttgaacctttttattcgctgactaaatttttgaaggcatagatcagtggtgagggaagtgtgagaaaaaagagaaggcatgggtatatctcaagacctctagggttcgtttggtgcacaggattagattggactggacaagattagattatgctgaaagtaatcatgtgtttggtttaagaatagactagactactttatttacttccttttagaaaaaaaaaa

SEQ ID NO: 61472 - DNA, 2065 bp, Cannabis sativa
tgactgtctttttgagatatatattctcacttgaccaatgtatggaggtttttttatgtatatgtagtctaacatgaccaatgtatgactttttttatatatatatatatatttctttattataagaatattattactgttattatgttttttatcattgtatattgaaaatttgaattctgaaaaagcagggggaagaatggccttagtatttacaatatctctcttacctcatattgtttgccgatttataaccatcatttcaagtagcggtttctgttagttatagctcgactgtagcctttcccaacagttataaatttcatttaaagtgactttttccaataattttcatttaaagagacttttttcgacggttactatctgattgaagtctttcccaatagctataaatcgtcatttaaagtattttttttaatagttgcaaactatcatttaaagtgaattttttccacatttataaaccgtcattttatgttccgtatttttatgatacccacatagccaactgatttacgaaccgttggaaagtagtataaaaaacagtgatggtgaaagtcaattttgtaatagtaattttaatgtctcaacattgaagaatagtattgcaacatagaaaagtatgcaaaaaaaaatattgcaggaatatcacaatttctagtattttaatttagttcaatgcataagaaaaacaactattacagtattaaatttttagctttgtgttaatttaaaaaatagttgtgcaagaaaaataattttttcctaatttggctcctcctataattaggggtatgttccaccactatcaaaataaagagaagcgataaatatagtaataaaaatttaactggctactaatttccactgaaaacacccaaataatttaaaaactaataatgagagataaagttggtactaacaatgagaagaaaccgtttacaaagtgttgcttaaaataagttaaatattgtgtggttattctacaactaaaattgaactccaacttaatcgccacaagttttatcccaattcctcaaaagttgcttcattgtcacttccatctacaattgtggctcacccttaaaattgaagatcaagaacaccactgttcctatacatatatatatatgcacaatgtttcactaattaaaggttattaattcagatatcaataaaaacaaaaaaatcaaagaatcattttgcataataatcaaatagtacatactagcatggcgttatttgtacgtgaattaggaatgatgagtacaacaatattatgtgcggtactagttataatcttaggttatagtaaagtgtgtcctttagtagagtgtcgacgattggggcaagacgaagcctcgtctcaagataaacatgagcaatggatgagtgttcatggacgtacttatatagatgatgtggagaaggagaagcgcagtaacatattcgctgacaatgcagcctacgtagagaagtttaatagccaagaaaatagaagtttcacgctgaaaactaattcctatgccgatttgacagacaatgaatttatgaacgctcatactggaggaaaatataggaggtctaataggtcaagttcatctcagtttgattcatcttttatctccgattctgtaactaatgttccttctagcatcgattggaggcaaaaaggagctgttagtcccataagagaacaactccaatgtggtgagtttgcatggatgaagattaagtatttgtatattataacaatatcttttgattccacaatttgatcatcttatagtgaccactttataaagattgatagataaataagaaactagctagatcaatggagagccagtccaaaagtcaataaggaccaatacatacaagaaaaaataacatttatttacttaccttttttaagttaattttgacacgagattttttttaaaaaaaactaaataaaaaagaaaattggagggtcatggcaccctccggctccagctcgagcaacaagctcctccatcattggttaaccatattgtaaatctta

SEQ ID NO: 61473 - DNA, 1041 bp, Cannabis sativa
aataaacacgaaacctaattttttttccctttgttttattcttttctgctttttattttttctgtctcttgtttaagcggctttcctccgtcttaagtgagggcattaatctattgcagagggtgatcagtctaagacaatgatctctcctcttttttcaaaaaaaaaaaaaaattgtgctacattttgtgaaaagatttatatgataaaattaaagatagcctcatagttgatcaaaagagaatccaacaactgttttagatctacatctttctctgatataatttatgatatccttgtataagttcctaatttatcttcaagttaggagatttagagaagataagattttgggaagattcttggataggaaacattttgctgcaagagatgtttccagatttaactttactttcttctgtaaaaaataaatgtatcaaagaattctccgtcgaggtggagtgggaactaaggtcagctggagtctacagttaaaagaaataaaaatttaaatggtagggaagtcccgcattgctccccatgcactttgttgaagggtagacggatttggattctagacagcacttagattcttgtatttctgcatttaaaagatttaaatttgtataccttggattttgagaatgattgagcgaaaggtctatggagaagttccgccccatcaaaatcagaagtacaagtttttgggtggcttcttgggaaggtttacacgaaaatatgcaaaaaaagatgcccttgacaagccttgtctccaggtgggtgtgtttgctgcagatcaaatggagaatcaacaggctattagttaagttttgggttaagcaacttagggaattcagcgaacttttggtattgagttctacccaagtgcttgtatgagtggtattagagccatgcaccctcaaatgggaccgatgttgcagaaggggcgacctgtgaattaggcccagagtagagtgggccgctgtagacgccggctccaaaggatggtgtatcgtcaggattccacattgaccaagtatg

SEQ ID NO: 61474 - DNA, 1021 bp, Cannabis sativa
  modified_base (911)..(920): a, c, t, g, unknown or other
tcgactatgaaacacttagtgtataacgcacaaactaagtataacagtcgggtggactcgagacctaacaagcgaggtgcctatctcgctataggaaggcgcattcctgcaacttcaaccaattaactttagacatcttttcagtgagacttataatcttgacgagtcagaagctgacattcaaatgactatcgaggaactctccgttaataagaactacgattatcagaatgaagcagtaagttttcgaacaaagaaatggcagggtgtgcatcatcaacctcggaaagatagaggagaaaagcttcagctcgcttcaaggtcattggaaccaagtttctgtcgagacctcccagaacgctataattaaaatacgtgtttaacacacgatcattttgacccagtaaaagcgggaaaatcacagctgtgtgattttcaaataataaccgcatttatactacgtgatatgtaatcaactcccatgattttagggggaaaacgttgtaaaaattacagtcaactttctacttaactgcctgctacgtgattataaatagtggcaagtaagatcaataaagggaagaaaaaatcatacgaaaaggccttgaaaaactatcagaaatctaataagattgactcgtggactatgcagagttttaactgcaaaatcacgtaaaaaatcctttgtgttcatactctttcctacttttatttttctgtgtgagattatcactattaggctcaaattttggttaacaaaaatctgcattaacagtggagaaagttgttgcttaccacaaccttaaagttcttgttatttgggtttattcaaacacgctacacttgatatgagtatcaagagaatagattggttgaaatgcacttttaattttatgttagtgcaagtgggnnnnnnnnnngattttatgccttaaataaaacctatttcaatataatcttatttgttataaatagaaaattagaagttatttaagttaacatgtatttttcatgattatgg

SEQ ID NO: 61475 - DNA, 667 bp, Cannabis sativa
ggcaaaacaagcagccccacactagaattcccctatttatatatatatatatatatatatatatactagaaggcaactacacgtgcaaagcacgttatatttttttttgttaattcttttatttaaaaactttgatttaataatatgatgtttaaacaaaagtattatttataacttttactacatatttgataacataagaggtttaatcaattaaaaatattacatcataagataagtttgttactttattttttaaaatattagttgtatgtaatttataatttaagatgaagatttagcaactttctcttattttgcttctttaatatagtatagattgaaattcttgtacctttgagtcttcattttcttttaatcaacataaatttgtagtgtttagtacttagcttacaataatttattgaaagtattttcaataaatttagtcttttcttaaaaaataaattttaaaagttgatatagcgaagaaggtcgagctatacatacttctatgatttagtcaatctaattttgtttgcaaaaatatcagaagatgtgagattcgattgaaaccttatataaattaaagttatttgtaggttatgtagactaaactctagtgatattgttttataaatctatggtttacttactcgaacagatt

SEQ ID NO: 61476 - DNA, 998 bp, Cannabis sativa
tcttggtttactgttttctgggctcctccagaaaaactagttcactgtttttggaaaaactgtgctaaaaacacctaactttgaaaattttctcaaatctaccctaaattccaccaaactctccagaatacctatttcaagacataattaacataatccaaccaaaaatagtagctgaactccctgaatctaatttcaccattaaaaacctaagtttgagcttaaaagttcaaatcttaatctttctcaataataaccatacaaattagcataaaccaacataattatctaagaaatagcctcaaaaaacaaactcaaacactactaattcaaacaataacccaaacccaaaaacatgcatgaaactctaatttcctatttaaaaattcaaagagaaaagggagagttaagctaaccctcttttaatctatgaaaactctagctaaacttgtttaatttctgatctgaaatggagaagaaaatcccttagttgcttgggattgcttgggctgaactaagaagagaagggaaggagaaggagtttctaatttttggttttctttgatgaaatctaattgtctaacataatataaatcttatatccagatttaattattgaacaacaaaacaaaatactagaattttcactacaagataacttttgtgggagtattctaagcctttttttttttttttttgtgtaaaggtcgaatcccactatgaggtcttttcctggaagatttgatacaatgactctatgaacaacggaacatccaaagaagaattgtagttttatcggcttgctgattaattcattgcggagtacttaattattttgcaacttggaaatactgcttcttcttcttccacaatttaaaatactatcttattaaataaatgtaaaaatatatgtaaaaataaatgtaatttatagagttttgtattaaattttttgtaaaaattttgtgtcattaatattttacaataataaacaactt

SEQ ID NO: 61477 - DNA, 867 bp, Cannabis sativa
ctagcgctgcaaccactttagaaaactaacctgtaaatttgaaaaaaaaaattaaaaaaactgttataattaatattgaccgtaaaactacttaaaatataatttaattttgtaaattaatagtaaaatttttcaaatcttacttttattttgctatttattatttcgtccaaaaactctaatgtttgctagacagtatttagaatcgaaataaattaataaagatgtaacagaataaataaaaaataaccagaattaatatttataatatattatttactaaaattgtttagaaataaaataataataatttttcttatttactttatcaagaaacgtaattagaatacttaaattgactaaattgcaattttgagttaaactagagtatatgatagttattttgtaatatatattttaaataaaaaacttgtcgttatatatttaatattaaaaataaaataaaaataaataaaaattaatacccttaatgacattctttaaaatattggtaagagaagtatttcttttcttttatttcttatttaattaagttccctctttcataattttatttaaataagtaaacaaatgtaagggaataactactttacaattaatttttaggattaattacatggaaagacgtacattacattttatatatagatatatgatcgcttattaaatttgagcatataccgaaggtcatttatcttatattcatactcggtatactttatacattcaaatagccatacattttcttttgagtaatttgtggcaaaaatacttaagttttatcccgagtagcagataaatacttaagtcgtatttttggcggtaaaaataccttccgtcacactt

SEQ ID NO: 61478 - DNA, 1042 bp, Cannabis sativa
taccttttttccaaaaataagaaagctagacaactttccttccaagtttagatacacacaaataaggaaaccatattaatacataccagccaaaaatacaattaataatgaaatatttttgtcaattaaatatgccaaaaatggaattaacaatcaaagctccaaaataattaagaacactaattgcactaaacagacgttgttcttagcagaatgtttaactgtctaaaaaatatcagtaactttattcttaaccttattaggaccagattgttcttcctcttgtatcaccttctcatccaccttagctttaggaaatcaaatcttccttgtaattggcttctcaacccctatattcttcctacacttaattgataaatgcccaataaatacatactgatggcttccattcataaagaaaactcactttcatcacctctcatgttcattctcaaactcaataacatttaaactttatttttactacataagagatcaaaaaaaaaaaaaaaaagaaattatgccaatctaaattaatgtaaattttaataataattagtttcttcttttaaaagaataaataaatagtttattattaaatttaattatattatattatgttatattttacattttttatattggtgttgtttggcttagcttttaagattaaaaaaatatatatattcttctagtagtatctggataaaaaaataaaaagttttatattaatttaaaaattattttagaagcagttaggatttgtagttttttccaaaatacttttgaaaagttatttttaaaattaaaataatttacataattctcaatttacttacaaaaagatcttttcttaataatatccaaacactttaaaaaatatattttttattaaaaaaagatattaatataatagttatccaaatattaaaaataagtcaaagctcatacattttatatgtattctatataaagtgtgcctatataacagaattcttggttttatgagaaattcataggtgactttttatttatattaaaa

SEQ ID NO: 61479 - DNA, 1209 bp, Cannabis sativa
ctggtaaaataaattcaaacacagccctcccgagataaccaatatatcctcgccctcaatagggggagattgaaatctttggttatttgggttgttgggctgattggactggtttagctcgttcccttgacgtttcacatattgtcttaaatatccccgcaaaattagactctctatctcgtcctttagtttctgacactcatcggtcgtatgccctacgtctttacgaaatcgacaaattcttgttggatctcatttatgtctcgcatgtctcattggctcaggtttgtggaatgcaaccctctgctcatttgcgagaaagatgttttcatgtgtttcattcaactcggtgtacacggtgtaaattggcacatatttgtcatgctttttctgcttcttcttatttttagatgattctctcaagtcatcttttcttttggtgtttgaatcacttggattatcagccttcgtcgacaaggtacttattgtggtagtacttgtgctgggtttgtttcccgagccagtcttcagcaatttcatctcatttcttgcttcctctttgcgcataaacacttgcactctttcgttgaattcattaatgtttcttattggatgaccatgtaagtcatcccacaactcgcccccaactgtcgaaaggtcggttgtgatccctacttaaagagcaataagctaaatactgttattcaagttcctaacctttgtagcggcagtgctgaagcaactcaggtaagccttaatcgactcgcctgattgttgctttatgttagttagggatgatgcttctggtcgcctatctctgacagcttaaaattgtttcttaaagcccttggaaagttgttcctaagaagttattgaatggtgagttaatttatcgaaccagctactcgttgccccagtcaatgaagttgggaataaaatgcatcgtggtttatttgagacattgctggctcgcattatggtattgaagttattcaaatgagcaattgggtcagtagtcccatcatactgggagacgtgtggatttttgaatccctgagggaattcaaaattcataatatcaggatgaaatggctcggtttcctcatccgagtcatagccacgtaatttcccatgctcccgatcctggtagtttctaaatttgtctcccaactcaatgattcgcaattgaatggggtccatttgttgttg

SEQ ID NO: 61480 - DNA, 561 bp, Cannabis sativa
tattaagtttgatgtaatgtatttttatttagcggacgtaatatttgctattacaaaataaatagattattttaaaaaaaaaatagcataataaaatagaatgcaaaaataaacttatatatagtattaattatttttaacacttatataattattttttaaaatcttgtttaattaaataaaaaataagtttctcaaaagacatttcttccatgaaaaaaattgattatgctatacaaatatattaccaaaataatggcagattatattatctttccaatagaaaaaaaaaaataaaaaataatagcaaatttaagtttattaaataaactagtaaagagctttcatgtaaaaataatcaaattttatttaatacaatgagaacgattttactcactaaaaaaacaagtattatattatacataaaaaaacaatgtgagtatttaattacataaggtaattatggggaaatagagttaactcacaaaagaaaatagaagtagtggaaagataagtgaattaaataaagggtattttatataaatgtatacattttcttaa

SEQ ID NO: 61481 - DNA, 1141 bp, Cannabis sativa
tcggtttgaaaagggttcacctagctcagttcttaactaattaataatctcttatacatgttagctacctgatatatgcatcgatcgccgaatatatattatatatataagctattagtatgtacatactttacacactattgatatatcgttagctaggccaaatgattacaaaaaaccatgctttttttaaaattaattattatttttttcttcataatatatataatattgatattatggtggaaaaaaaaaaacataaataaagacttggtgagtttatatatattttgaccacatatgcatatccgtcgtattaattttttaaaattaattaactatagttatatgtcatgactcatggggccataactttttttttttttactttatatatatatttatatggtataattgtggactcacctgtcataagtttgtctatatatgaatgaaatcatggacatgctacatgctatatatctctttgccaacttgcagggtgaagaagacagaaaatgacttttacttttttgcaatttatatatatataattaattaataggggtcgtcatcttcgatcaatttatattgttatatatataattcgtagatgatgttatatattatatagtactggacacacctatataatagcaatgctactacacactcctattatactaactaaactaaaatacacaccctgataagacgatgatggtcttaatcacgatatctcctaagcatacatattttaataattttagtactagttggatcaaggtgaaaaataaaatacttcacacgcataatttaaaatataatgagaatttaatagttggattagtttccataataattgaaattgtttaattaattaattaatttctccactttgagtctttgactcacgatgtccccttaattaaatggcttttataattattattttttacgaatacttataagttatcctgacatattcactgcttgctatataagaaaattaaatgatcatgcttaacgttcctttcatccttcatataaatactatattagttatccaattatttagctaaatctgtgatcatgtttggtgcatgacataaatattggtgggatattattggacaattta

SEQ ID NO: 61482 - DNA, 1045 bp, Cannabis sativa
tattatattgttttgcaatctccccctctatatataaatatatgtgtttatatataatataaacttctccttttataattaatggtatgaaaattaggtaaccgtcctagcctagctacctctacaacatattttaataattaataattcgtagatcacaatttatttgaaagatattcaaactatatattatcattatcaaatggtagcttagctatgattttttttgtttgtttgtttaattaattttttcattaacgggaatattaatcttgtgaatgaatattgactcgccaaaaaaaaaaaaacttaattactcgaacaataatcgaatacttatatgtttaacggactaacttaaatattttatttttgcgctattaaaaatctaatctcttcgctcgtgctcccaaatactattataaatcaaataaccgaacagagttgactctatcaatttaaaacaatgtaaaataaatactacaaaaaaaatttataaaatgtataaattaaatacacatattgagtacattgaacatgcatatcatgaagcacttgaacaaaccacacaacttatcttataccgaatatatcgtataacaatcgaacaagtaatataactaatctatatcgagcaactatctaacactatcgaaatatcatccctaacctctgaaaatactaataatcgaggaagcatcgaacacgtattgaatgcatcgactttacgcaaaaaaaaaaaaagtgagagaaacctagaaacgcatatatgattttctaaccaacaaatcgacaaaacacacaactaaatatatatacaagggaaaaaaaataatatacttgaataaaattaacattaacgataaatttaacataaaatcatacacccatttctaaaaccttaacaattttgaccttctccacctattgatttctctggagaggattcagaggtggaagcaaaaggatgcgactgagagtctcttaaagaaataatcggagaactgataggagttctttaaatggatgacgaggttattcaaat

SEQ ID NO: 61483 - DNA, 1007 bp, Cannabis sativa
gtggcgcctacttttttaaacacacgggcaggggcccaagagtgattaaccgacttccaagcgctagctaccactaatctgcttctctcatcacgagtccacccctcctcaaacttgaagcatctcttgatcttaggttggactccacccgcctgaaggaacagcggcctgtggtctgaattactagtatggaccgagcttagagtctcttggaaaaagattgaaccaagcaccgttggctaaacctttatcgagggccgacttaacatgacccctaccagaacgatgattatcccaagtcatcatgtctccttggatagccatattgataagaccacgggaatcaatgagattcgagattatcgggataaacgggtcccttcccgaggacccttctctttcagaatcacagagaacaaaattcaaatctcccaagataaggcaaggacccccaaatctatctcccaatttcaaaaattcagtccaaaaatttttctttgcatgcaaatagggagggccataaacacaagatagtaaccaagggtgggtgggaggatccgaataaactaaaccagagatatgattgcgagaacaagatatacattcaaaactgaaaccagacttccaagccaaaataatacctccagcagaaccggacggcggcacacaaatattaaaataaaagtggagggtctttagagtacgtaccagaggcttagcatccacttttagctctgacagaaaaataaaatccggacagcgagatgtgatcagggacttcagttccagaactgtagaggtctgccccaaccctctacagttccaagcaatgcctctcattgctcatgtggaggagattcgacattctcctccacagggttacgagagtaggcagacacactagaaccagaatcttctataacaaacgagccaatcagcgggtttttcataattccagaccgactcggagaagaggatgaattctcagaaggctcttccgacaccac

SEQ ID NO: 61484 - DNA, 1294 bp, Cannabis sativa
ttttattggcgagttgaatggttatcacgaatggatcgacgtgaggatatctcacatttttctcatcttcctccgtgaatgtaataggaggctctttggttttcaccttcttggaaggttctggggcaaaggccgactgctcattctttatttctttcacatatcttttctgggcattattgctttcccctgcgatatgtggccctcccgaaataaccaagatgtcctctccctcaacgggaataggttgtaaccactagttgtttgggttattgggccgactgggttggttgtatccatggccctgtcttttcacgtactgcttaaaatggcctcgagcgatgagactttctatctcatcttttgattggcaacattcttcggtggtatgcccaatatccttatggaatttacaatacttgttaggatccctcttactcctcgaattcctcatgggctcgggcttgccaaaggccaccttctgctcatgtgcaaggtaaatattctctcgagtttcattaagctcggtataaatagtatagattggcacgtacttatcatgcttcttctgtttctttttatccttcgacggttccttaactccgtcctttctcttcgaaccagaagccctcgagttatcaattctcatggaaagagttcctgttgaaacattgctgggtttgccttctgagcttgttttcaacaaattcatttccttttgggcttcttccttccgaacaaacacctgagccctttcgttgaactcagtgatgcttctcactgggcgtccttgtaagtcatcccacaactcgcaccccgcggtcaatggatcagtagagatccccgcctaaagggctgtaagttgcatgctgtcatccatattcctatccctagctgcggccgtgctaaaatgacttaagtacaccttaagtatttcaccagactgctactttatattggttagcgaggctgcttcaggtcgcctatctctagcagcctaaaattgtttcttgaaatccctagacagctgctcctagaaagttattaaatgatgagtaaacttgttaaaccagctactcgccgctccaacaagcaaggtggggaacaaaatacaacgtaaattgttcgtcacattactcgctcgcattaaagttattcaaatgcgagaccggatcagggttctgccatatgacgagacatgcaggttcttgaatcccaaaggaaaaggggtattcattatgtttggatgacacgactcaagctcctcgtcagagtcgtatccagataatttccc

SEQ ID NO: 61485 - DNA, 788 bp, Cannabis sativa
aataaggcaagataatccctccgagcatagtaaaaagagataaggggagagagagtcaccttggcgaagaccccgggttggttgaataagcccgtgcttctcaccattgataagaactgagaaggacacagttgttacgcacctcatgattttttcaatccatttctcctcatacccaagacccctcatcatggtgactaagaagttccactcaactctatcataggctttggacatgtccaatttcagagccattttcttaccattgccgaacctttgtgtcttcatgcagtgtaggcttttgaacccgattatggcattatcttgtatgagtcttccccccacaaatgcgctttgctcctccaatatcacttgagggaggctttgtttcattcggccagctagacactttgccactattttatacacaacattgcaaagacttatcggtctaaaatctgtcattcttgttgacttggggattttcgaaataaggcaaattagagtatcattaatgtccttcacctgcatcccttcattcagaattcctaaacacacttttgttatctccggacctatagtagaccaatgttttctgtagaaaagaccaggcaaaccatcactaccaggggctttttggggatgtatgtcgcgcattgctttgaagacatcctccgttgtgaaaggttccaagagcttttcattagtagttcttgatatacggtggggcacgatccgttgaaattcttttaatttcgcgtcagtagcttgagttgaagtgaataatt

SEQ ID NO: 61486 - DNA, 1783 bp, Cannabis sativa
ctattaataaattagacgacttgttaaaaagttacgaggaaaaatgaatgctatattatggttaaatcaatttgaccattacgataacatgataaaattgtcacgtaccttttaaattatacacatcattgaattgatgatagtgattcctaaagaagtattaagtttgataaacataatagtaacttctgaagagtgtatatgttttagagaataatataattattttattcgtgtatataaaaatgaaacttgtaatgattacttatatgttgtagtgattttacattaccttatgaaaattttattgaaatgcaaattatagtgaacttgaagttcatgaattgagttattaacatgatcaatcatatcatatgcaatgaattattaaaagatttgactaaattttattgaagaactagaaaattcttctcattgtaaatttataaggctcaaaagaagaatgtacatatatttgcacatagaaaaaatgaaagtatattttcatatttttaattttagaaaaaaaatatatgtagtatttcatttagtttctcttttatacttgtttataagataaacttatatttttattgataattatttttctaatataatttattttaatatatatgattttatttatttatctagaaaataaatatatattaaattatttttgaagaaaatatttgaattatatttctttaacaatcttgagttattgttagatttttaatgcttagtttcttatcgatgtgatgatcatatgatcatgaatttacaaaatttataaaattatgtatttctaattatacacgaactcatttttagaaatgaattaagttcatgactattgaacctaaagttcaatgtcatttagtgtatatgagtttaaacaaatattaattcattgtgatatattaaaatccctacaagtgtattaatattattcgatatcacaatttttcaaagttatctcgatcagggggagggaagcagttgggatcgataattttttaaaaaaaaattgatccttgcacaaagtatataagaacaatatagttcaaaatgatatatgccaactgcaaatcaatattattcaaagttgagttagaatgagtctaaaagctcatgaagcgtaaataaataatgtagaaattattaataagtgttcatttgatttgtcctaaagttgttaaatctagaggtactcatggagataccttaatgttatgaagtattgataatttaaaaatgataaccgtgatgaaaacggtactctaaaagagactccctagagaagttagacataacatatttgatcataattgaatttttttttttttttttgatgaatcagcagtgttttcattactccaatcaaccaattttacaacctaagagcatcccagttgaaggacctcaaaacttcgtatgtaatacacaatatgagtataactctacaaacttacaatgatctaaaccaatccaactcttgctgcccaattttcttaggcaaaaagctatatattctttgttttaccatatcttcaactgtacatacaactctgtctacattacctacttttgagttccatatttgatcattcctagccttccaaacatggtacactaggcttaacaaagcagctgagagcactttttcttgaacttgctgcctttgcttctttctatccaccgggtgagccttgtgaaatccaaagaggatgcattccaccctaaccattctttgattctttgaagtccctggcttgaaaaa

SEQ ID NO: 61487 - DNA, 519 bp, Cannabis sativa
cactgaatctgtcccgcttccctcagcattctcttcgtcacctgactcacgatcaagaatctcccaatcttctcccatctcctcaactttgatgtcaaaagcatgcctggaatgaacgagatattcttgggcggacaccttggattcgttatcgagaatctcgattgtcctcggttcagtgagttcctgaaccatcctttctatctcttcagaagatagtggaccaaagctatagttttagcgacagggacctcctcttcaaaaatcgaggctggtatgaagctgttaattttatcttgttcgtcagcgaaagccccacctcccgagtcgagcatttgacagtttgacatgtcgctcatttgaaagatagaagatcttttcagtgtggtgtaagtgcaaaaacaagataagtgatctcacctgcataaaaaacaatactaaaagtataaaggattgacctggcatctcaagaaatggctgggggtatcctagtaacctaatgatcatgtcgttacatga

SEQ ID NO: 61488 - DNA, 1840 bp, Cannabis sativa
ataatttaataaaattaaaataatcaaataaacaaattttaaaatagatatggttaaacaattattattttaagaataaaataataaatacatgataattttctaaattttatgtcaaaatatctcatattaagccttttcaaatttctacaacaaatatctaagttatttaaatatataaatatttgataagtaaaatgatataatattataataaataccaattttctaacttatggtttataaataataaataatatcacaaaataataaatttatgaatttgaaaattattatggataggatatttataaaaatatctaagttaattttaaatttattgttatttaatttatcatataagataattttaataaaatgtttcaaatttaaaggataattatatcttttaatttaaaatatatctaatattaaaatacctaatcttattattaaataatatgtaaattttaagaaattaacaaatttttaaaatctaattataattcaaatataaaataaccaaattttaaatgcaaactttaaaatatcaaaaattaataattaaactattaaaataattaaatattattaattttaaaatttaatatttaggttcaaatattaaaaataacattttatattgatatgtaaggatttgaaatttaaaaaatcaaaatttggtgaaaaaaattacaaaaaaaaaaaaaaacgatttggctacctaggaaggctgcatgcagcccatcacgagcgtggacaaggggatgtgcagtgtgcttgatcgagaaatctcagtcacttgcagcatctaggcgcacgtatggggctgtctgaacgaggggcttgacaaggttcagacacgggattgtctcaagagatgcgcgcgtggagctccttatccgagtgacgacactcaatgcaccaaaattttcaaatccacatatctctctcgttttttatcgaaatcgagttttgtaaaaaccaaacttgcttaatttttaacaaggaatccaaataaattatttctagagcaaaaatatttttttttcatagaaaatttgtaatttataaacattcatcaatttacacataaactaacatgaatacatccaaaacaataaatctatcgttttaaatctatatttcattaaagtaaattattaccatggctctgaggccagttgttggaagttattttatcaggatttagatttactattatgtatgttgattataattctataatctaacaccctaaatatgaatttcctaatacgatgaaataaatacataagagattaagcaatcttcacattcatggtagcggaataataatgactccttccattcagatctctagcccttgattactttctgtagcaaagcattatcaaatttgaacctggatcttctctccttcaatttggttggattcttcataatcttccacacaatgattgagtacttgacttgatatgagtgggcatgttctctatcactaatggctcaaaattaatgacgaacaataagaaggaatttaaaaatacaaagaaggaagctcttaattttctagttgtctaataaagaataaaaactaggttcttttaatttgatgagaatgagagccatcttattccttttatagtatttcaactaggatttaggatttaaattatatggaatgaaaaagataaaataatggctaaaatttttttaaatggccacccgtacatagtgggcctcactagttacaatttttctattttattcaataatttatcttttctttcactaatgtcatatttttcaattataatcctataaatattaaaactat

SEQ ID NO: 61489 - DNA, 2691 bp, Cannabis sativa
tttagagcacaaaacccaacaaagagggtatgccctcacctatctatgggcctataaataactccattttttatgtacaagaggaggacaattttggctaaggaaaactctgctgaaattcctagtgagcttttcttctaagagagacacaaaaggaatacagagattatcactataaacacttgtaatattcaaacatttgccaaagaatggtatactattaactcgtggactaaggatcataaacgtctgccccgcataaaaaatctatattatttacattttgtatttgcttaagctcttattaatcagttttaaaaaatctcgataataaaattaaattgactcaactaatttgatccaatcaaatggatatattggattggatcggttttaaccattgaatgcatttactgggttgtctattggaatggactgaagccatatccaatttgtttttgccattatttaggctatattcattaaatagaaaaagatataaaataagcacaatttaaaacttatttcttatagtgataaaaaaaaattcacatatgtaataaacattagtgcaacttaatttatgatcacataatcaaaatatgataatataatataaatccaatccaatctatataataatatatacacatatataatttgagatacatgttcatttatatataattataatggaatgataattgtatcagtttagttagttatctattgcatccgaccttccatcctacaaatgatctgatccaattatatgtttaaaatttatatcttattagatctagttataattggatatccaatttaattaattggattagttgtaatttgatggatcaattttgattgtttgtgttaatttctaaacaaccttaattattattattatattctatggtgatggtaagctatgtctttcaagtagatatttttgattttatacacaattagttgcttttgtgtgttatcaatcagtcttttattaccggctcctaataaataattagcgtcaatatccaatagtggttacttaatacttgctctcaccaaatttgatagccaatttcttcctttttaatgctctcaaaatttcaataaagaaaactcattcgaaaaaccatcaagcaatccaatgtccgaaccaatgccaatcgatccttaccaaagactccagattgtacagaatggcgacggaaccatcactcgattattcaaatttccagatgcacccactttacctgatcccactatgtctaccgcacctatagtactttccaaagatattgcccttgatcattcaaaatccacctggctcagagttttcataccccgtgatgcactggataataagctacgattgcctcttatagtctacttccatggcggtggattcatcctattcagtgcagcctcaactgtgactcataatttcacattcaacttagccgccgaaatctttgccattgtagtttctgtggagtatcgtctggctccggagcaccgtctgcctgcagcctacgatgacgccatggacgcactgtactatatcagaaccgccgatgatgattggctgagaaactacgctgacttgtcgaaatgcttcattatggggggcagtgcgggagggacaatagcttaccatgctgggcttcgggctgcagcggaggcccaacgtcttcggcccatgaggatccgtgggcttatattacatcagccattttttggtggtgtccaaagatgcgactcagaattgaggctggtcaatgattctgttcttccgctttgcgttagcgatttaatgtgggagttggctttgcctgagggagttgaccgtgatcatatgtattcgaatccgatggtgagtgatggttcaaagtcgttggagattatcaagtcgctgcagtggaaggtgatggtagcgggatgggatggggacccactttatgaccgtcagattgaatttgtgaaaatgttagagaaaatgagtgtaagtgtagtaggttattttggtgttggaggacatcatggggtagagatgtttgacttgtctaaggcaaagctactcatcttggctataaaaagtttcatatgtccttagagatgaatttgaatttgagagaagatattgatctttagattaaataaagcagcgttcattgtctatggctgtgttgtatatgtgctcctaaataatgattattgtgtttttcgtttttatgtctaatggagagcatgaccgtattaattttgtggattattgttaattagttcgttttgataattagcatgtattgtgctaagtttcattatgattggaagtgatgttactattagagatcaccaaacaattgagtgattttgctatttggttatgataattatatgaaagaacaaatgaatctaagataagcgaatggaattaaaattacaagaacaataacttagtttaataattaaggttatttatttatttagtggagttgggaagagtgccataagattataagatttgattgtggtatttctcaaagttttattttttttttaacaagggaataactttattcaaaaaccaaacaaagtacaaacaaaggcagtcccaccccacaaagcacaacagcagtcccgaacaagggaactgctctccaaaaccaactacccacactcaatgat

SEQ ID NO: 61490 - DNA, 553 bp, Cannabis sativa
tgttaaatctctctgccattgatgaaccagtaacaagaaaaccagaacagtggagagaaacaagaaagagagagaaagacagtaaagatgagaaaggtagaagaaagacagattgaacaaaaggcaatctctctattgaatgaatagacattggcattatatagccaatgaattacatgaggagaattagttaggtacaacagaatcagttagagctactaacaaccaaagtaactgataacagaattaactgattcaatgaacagtaacaaactgtaactaaccacctgtaactaactaacactcctaacatggagtaacaaaattatgtgactctcattaatagcatgtgactctgtgagcattatagtggtatattgatatagttgatatcataatgcaatgcttattgtttaattattaagagcataatatatgaaagtcattttaagtaatcatgcttggtaaaattatgtagtttttattgtaattttctacttagtacgtgaatctcatattttagtattttactattgttttatttttttaaaaa

SEQ ID NO: 61491 - DNA, 1377 bp, Cannabis sativa
ataaaagttcagaaataaaaaatatcataaaatatggccaactttaaaaatgccacatttaagtaaaatgtttttacaaactcatatttgatgtaatttttaccaaaaaaaatcctaaaaaaaaggtcctaccaagttcggaccagtcatcgcatcattaatcgtttagtcagatttggcgggcccacgtggacatttttttattattattattattattttgataaatgacctatttattttaactcctactcctaatcgtatgatagtagcatgaaacatgtatataccgtacaagctcactcctgatccaacaactctaatatcttcgatcatgtaaacgacgtcgtttcaatctcaatctctctccctttaccatcgccatcactcttcagatgccgactgcaaccttctagtattctctctaatgaaaattcttttcttttctgaatttttggttttttttctcctcttcatttatctctaacttaaatcctttttagattcccaatcgccacagggaaaaaaaaccatttctgaattttcccttttcccgagtctctgttatctgggattttcttttccttttaggttgatttctgggggttcattatccatggcagccaagtttggttcgtttagatacaatttcgcagagaaacgagagagattgctatcgacgaataagggatattcggagctgggttccttcgtccccattgaagacgatgaagaaagccagtatgcgtcttctcgttgctgctctttccgattgctttccgataggtttgttagttgggttagaaaggtacaagaagtttcagctaaggcctggcagatgggtttgtccgatccgagaaagatcatcttctcagcgaagatgggtctggctctctcgctcatatcgttgctgatttatctcagagaaccgtttaaggatttgagccgttactctgtttgggctattctcactgtcgtcgtcgtctttgagttcagtataggtacgtttttgtgtatagtattcacctgtttttattaatatttttattttgtgatttatattagctactgaatcaaagtacatgagtttctttttaaggtcaaaaagtcagagagagaaagagagactgtacttgtaataaaaaatggtgaagctgatgatggtgaaagcaagttataaattacatcttaatatttaaaacaagaaaattgaagtcaaatgaatgttatctgacaaatttttcttgtgtttattcatgtatctattggctttctccacttgaaatattaaacttttccttctatttgactttcctttttcgttgttatagggcgaagtgtttaccctatgtatgtgtgttttttctttcgtttttt

SEQ ID NO: 61492 - DNA, 1083 bp, Cannabis sativa
gctcgtgggaatgctataatgttcggtcagattaatatatttttggatcttttaaaaaaatgcctaacatcctacctatcttctttttccttattttttttattattgttttgtttgtgataaagaaagtaaaaaaaaaaaattaatcatttaatatatattaattaataatataataatattagaggtacttactattaaaatattttagaacaaaaaaatatcaaaaataataagagagtttgaataaaatattactttttttttttttatgtgatatgaagatttttgacactattaaaaagtatcaccgttagagatgctaaggtaccaagtactacaaaagtgacaaattattataggtgtattttaataatgagctccacacattttaatttaataaataatataaaaaattactaaataataaaatatcatattaatattgttacacattaagatgtcaaataacaatattcttatttgataagttaaaaaattcaactaatatgataaatatagagtctcacacattatgttttaacaattaatataagaaatttttaactgcttataatgcaccacatcaagttagtattcgttaatacatgtaaaatgacttgtagcaatgctgaaatatatcttttgcatataaaacaaatctaaaatggtatttaatgaaaaaaaaatatataagtgatcctccgaccttgagttgatatttcatccatatacagatggaattaaatattggaacaggcaggtagggatataatcatgagcattattattcggcacgagtagtgcctagtacctttaagacgtgccgtcttacgattgattagtgatactccctaaaagctattatattaaattatatgggacccaatactaaattaaaccaataacgatattgatacgtaagagggtatttatcaccactgataccttttagcatttctctataatcattttatcataaatcttaccgtacaaagaaatattaaaaagtaataatggtgcctagttaatattttccaaaatgttatattattattgattaaattaatagtggtgcttagt

SEQ ID NO: 61493 - DNA, 772 bp, Cannabis sativa
  modified_base (707)..(719): a, c, t, g, unknown or other
  modified_base (745)..(747): a, c, t, g, unknown or other
ctaatttaaatttaaatctcaaccaaaaaaaggatgaaattaccgacaagaaagagagatccaaactacgaatttctttacatttaacaacaatcaatcccaccgtaaaatccccaaccctaacaccatttcaagctaatcaacttaagcatcctacacccaatccccaaatctgtgatcattgtacacctcgccaaccataatctctccaaattcttagcttgagcgaccgccgctgctccacaatccctcaacttcgtcgcatctaaggctttgatgactagagagccgccgacggtatgacgaaaaccttagcttaatggtcagcataaaaatcgtaccatttatggtgagttcgcagagcgcataaatggcgcatttggatgcgacacaatcggaataagctgaatctagaattccgatgagagatcagacctcatggttggttcaagtttgacagaaagggagaaacacaagaaaaattataaaatatagtatttaaaagttttattacaaaaatacggtatattttaaaccataaaaatgtaaacatttgtaaaaatctataacaaaattaattaaaaaaaaatatatgttataaaaaactaaagtcttcatattttcctaatttctacttgacctaaactacatccaaaccaggtgcataggggtgttcacaaaatatccgatccaatccaatccgcacnnnnnnnnnnnnnccaatccgcaaaatgcggatatccgnnnttgtgcggattggattggattgaaa

SEQ ID NO: 61494 - DNA, 811 bp, Cannabis sativa
tggagacaaactatttttctaacatacaatttagcttactgatcaatggagaaattcatccgaacaggtaaaaagtgcgataactttgttaacccgccaactatgacccacacagagttgtactgccccatggtcctaggcaatccaaccacgaagtccatggcaataccttcctatttccatttcagaagattcaatggctgcaacaaccctgtagtactctggtgttcagctttcacttgttgacaagttaaacaccttgcaacatattcagcagtaccattcttcattacaggccaccaaaacatggccttgagatcttggtacatcttcgttgttcatggatgaactgagtaaggagtcgtatgagactcatttaagatttctctattgatgtcatcatccataggcacacaaacacgattcataaatcgtagcattcttgtgtcatccatagtaaaatcactagtctttccagccaaaaccctacctcaatatttcactaactctggatcttgcaattgtgcttctttgattcactccaaaagagtatattacagggtaatattagccaattaccctacaacgaactcaatcttagctcgggtcatctcatctgctaactgtttggagatctacttcactatatttatctgactttggccttttctactcagggcatcagctacagctgtggccttcccaggttgataaagaatctcacaatcgcaatccttcaccaattctagccaacgactttgtctcatattcaggtctttctaggtaaagaagtatttcagactcttatgat

SEQ ID NO: 61495 - DNA, 1277 bp, Cannabis sativa
taaaaaataaagggtcacaccacaacaaccaactcagctcgtggtaatgccctacttgcttatgcacgctacaatgattcttctaattattgtgcacacctttgctaagcaaagaatttcttgaaaaatatgccaaattaaaacttttagaattaaactttcataaatacataattttacataataatcaagatcccaatcaaaagttacagcaatatacaaaatattttttttacaaaagttattcgcatcgcgactacaagatgtatacccatgttatcccgagaccgaacactccaggcctaaccatcatgataagtacaatcatcctcaagtactagactcacgggtgctcagccttcacctttccttgaccgacacatgtaaacaatatttatgaatcgactgactcagtatgaaaagcataaaacatataaacatattactaacttgcatttagtcgcccagacacctaactacaaggcttaaccgatgattaagaacgtttttaacaaaagtacgacctatgtaccacatgtactaagtactagtcccgtactagtgttggtagggctgaatcacacctcgagtacaactgagtgttgtaccacatgcacttcgtactcgtcacatactagtgttggtaacgttgtgtcatacccctttaacatcatatattgtaccaatacactcagtactgcagccgtactagtgtttgtagtatatatattacataatacaacatgcatataatatacatgcagctatacatatacacattttatactaattcttacctcgtttcctgatttaagtgtgttggtaaacctgaatggaaattcacttgctgaacgaaggccctatgtcacaatcacaaaaaataggtgaacaactttctaaaaccttttcggcgacttaaatttaaaactagaagttttcctatagataaatagcgtggcaataccctaaatatcaaggaaacgggttggtcgtttttataaaaatggcagactgtttttctgggtccctacaagtaaaaacagtaaaccgtttctccaggaacaatctgccattttctgctgcagaaacaaaataagtctccaaacaacctcaaattgaccataaatctcacaccaagctccagaacacctaattagggtccaacaagtataccaagtataactcataatttcgaaatcccccattgttaagccaactcaaacttgctgaacaccacaattagccattatatttaactcaaatataactcagaaaac

SEQ ID NO: 61496 - DNA, 1193 bp, Cannabis sativa
aatgtgaaatttttgcttaacactctaaaagctcgaaatgaagcaccagtttacagccctgatggatacaacaaaacacaaattgtccttaaggcaacaaagacaaatttcaagacaacacaaactaagaatcaactaaaaaattcatctccgttatgagctaaagattacaactgatttcagattattacacaaagttaaactataaacacaacaataaaaaaaaaaatacaaaaagggagatctcgttgcaccgcaacagccacctaattaactcaagcaaagccccaaaactggaagccgacatccatcgagaatcggctgtaaccaacagtgggatcgttgacccactaagccgtgcacagagccctaccaactgcagaagacgaactgaactacaacttcatgctcacaggctccaggggcggagccacattataccattgggtggtcgtggcccccctgaattttatggatacaattacaataatttttcactacatagtatatattacttattttatttagtaatcttccatctatgttattattttactatattttgatttttcaaaactaattttattgataattgtgtacacacattttaatctaatttctaattatatacctaaaatttataatgtattttgtagtgagatctacattcttttaatgtcaagtaaattaatatttaaaaataattgatctaaaattaattttaatatttttactacaaatgtacacaagtcaaaatacaatgcaacatacaagtaataaaatataattaaagaagaaaaacatatataatagatattatatattattaaagcaataaggcattattaagcatttaaacttttatatgtaataacttgtgattaatttttgttgtttaataaaaaaaattgagatattatatttcttcatttgttttgtaatacaatattttattttcgtatgaatatcaaatttgtgcttataaaattcaaaatataaattttaagattttttttacaagaattatcttacttgattatatatatgatttatattattattattattgagtgcatgatatggaatttttaggtgttaaatctatttgtttaatgtatttttgtattaaaactattttataattatatgaaaaatatatttgatacagaattttcacacaaggataaattaat

SEQ ID NO: 61497 - DNA, 768 bp, Cannabis sativa
gcaaagccatcctggatgtgctcaataatcactctgccatatcctcagtcaatgatgcaatcttggtcttaatccctaagaaaaagaatgcctccactataagtgattatagaccaattagcctttgctccaccctttataagattatatccaaaatcctggccaacagaatgaaaactgttcttgattccataatctcccataattagtatgctttcctctccgataagcttatctttgataatatctttattgccaatgagctcatcaatgccatccagtatagaaaaaaaggcaagtagggctgggctgttattaaacttgacatagagaaggcttttgacaaagtagaatggagctttgttcaagccatccttaaccatgttggttttcccccaacttttatctccttggttatgagatgtatgtccactgttgtgtatcatacatctattaatggagccctttctaaaagcattactcctactagggcatcaggcaaggtgatcctctttcaccttacctcttcctgctagttgcagagagtctctctacttccatccaggtcagggagtaaggtaatcatttgttggtcttaaaatatgcaaaaatgctcccacgatttcccacctcctctttgctgatgacagcatccttttcacccctgtcactcaaagttccagcattgccatcaaggatatgctcagctcttaccataaagctactggccaaactgttaatctggccaaatcctccattttgttctcc

SEQ ID NO: 61498 - DNA, 1879 bp, Cannabis sativa
catgttgcctctgataatttgtttaagtaataatttcctgaaatgtaggacatactgttgatcttccaacattttgattcctctgatacattatgcagggtcctcgtgattatttctagcttataaagttactctttttactttcatttttgtttatccttttagcttgtgacttattgatgtattgcatccaatgaactctgattttgttttcttaattgattcttttgtatgtaacaaatgtctacatattaccattataggaatagaaagctggcagttttgctgtattttgtctatggtccatattgagcatgtttcttccttacgtcacacacacacactctttacctaaagtaaatattctttattagtcttaccatacacttacagagtgttacctatgcggtaagtttgtagtttgatctttggtgtttgtctcaattctaaaatatgcagaagcggaagttgtctgacatgttagggcctcagtggagtaagcgagaacttgagcgtttctatgaagcgtatcgtaagtatgggaaagattggaagaaggttagtttatatttgtttgtaattttaaactttatacgataaatgatcatggagctagcagttaacatttggttaaaagagagttttaggataaccacacggtcatttaatggttctattcttctgtcattataacagtgttatagttactcttaaccattgcatattcttttaacaaatatttttgctaggtggcttctgcgattcgtaaccgttcatctgagatggttgaggccctctattctatgaatagggtatgtgtagttaactcctaccttccttgtgctagcctcttttaactttactagttaaatttagattctattatttttgcttatataaaagctattgaccgagtttactttgctccttttattttcttattatcatcttggtgtgaatatcacaatctaagaaatctctgttttttttttgaacaatttggttagggttagcatattgctctacaacttggaccaatttaaatttttaataaatggatcccaatggatacaaaatagccagaaaaaaacgaagcattgcattcttcatttatctaaattcttcattcttcatttttttggtaataaggaatactctttacaaaattgttatgttttccagctcatctgacacttcctctacttataaaatgttctgatttaaaccttttcttttggctgtatttccaggcatacttatctcttcctgagggtactgcctcagttgctggactggtagcaatgatgactgatcattactgtgtactagtgagttaggattcctttttttgttaaacaatttcagtgcttatgcagttagtttgactaaccattatggtgacggtcagggagtaagtgacagtgatgaagagagcaatgagactggaggagaatttcaagagcctcaaaagggcacacgaggaagatctcataatagcacaaataaaggattagacaggactttgccagatctttcgcatttccactcagctgcatcacataatgggggcctgccaatgttaaaaaaaaggcgcacaggtgggaaaaatgatttgctttcaatcgcttctgcgttattgtgattttctgcagatctcaatgtctttttaacgttttagcaatgatatgtttccaatgctacgtggaatatacaagttattgcaatagttttggtgcttccttttaaatcaacaaagtcataaaaaaatatacctggaaagcacttaatttgctgtgtgccagaaagtaaattcattatttatttattttttcaccttgtttagaagaaggtattcttgatttcctttttagaaaaaata

SEQ ID NO: 61499 - DNA, 853 bp, Cannabis sativa
attttcatgatgagctagttctttataatactatttaagtatgtaaattattatatatatatatatatatattaacaaattaaagtatccaagtttaaatagatttgacaattaataaaatttaataatttaattatgtttatcgactagtcatacaaaagctagttataatagagatctagagataagaaaatgaattataaaactaagaaaagatatttttaacatggttcaagtgttaattaaaatattaattcacgagtcaataatattgagttttcacaaaaataataattacaattgaacaacgggtttgctctgaaaaaaaataccatgtgtcgcaccatttttatggtgatggcgagtagctttataaatggatcaagttagatttgattcagctatgattcgaactaatccatatcatgtaatgagccaccttttgcccgccctgttagatcagatattcggattggatcagatccgactatcttctttttcatttaagaattttaaatttatatctaagcttataattttgtattagtattatttaatacaatactatgtttgatattggcttgtattaatagattgtgtaaagttataatatatttctaataaactcaaccctaacaccaactacgggttgggtccaagtccgggtctgggtctgagttcgggttttggtctgggttcgggtcccgggtcccgggtctaggtctgggtcccgaatccgggtctcgagtctgggtctaggtctcggctttgggtttgagtttaattccaagtctaggttcggttctaggttcgggtttaggtctggtatctggctttgggtccggcattgggc

SEQ ID NO: 61500 - DNA, 868 bp, Cannabis sativa
aatgagggacatcaaaataacatcccctaagctagccatggtagggaaggacaagtcaataattctaggctaaatgctttggaacagttgatagaacaattgatggtgactaataaccaaatgacgttgaatatgattcaaatgaggagccagtgccttactctcctagaatattggccttgccatatctgcaaagattcaagatgtcgaccacaaccaagtatgatagaagtacgaatcttggggtacacataagtgacttccacacttatgcgtgcccagtgcccaccaagtgattgatgacttcagatgtgtgttatttcatgtaacacttattggagtagccaagacttggttcaaaaaatttaagaggcactccattacctcatgggaccatttctcacatgacttttagaaggaattttgcgccgccaaggcttaaaaattagaatgttcatcccttgccattgtgaagcaacaactgggcaagagcttaaaagcttagatcaactattttaatgctgaggctgccaaggccagagacgttgtgatatgatgttggcctaatgcgtacaagtgccgcagcatgtaaaatagcatgtccccaagctaaaattgggagttttgttctcatacgtaatggtcttgcgattaactagaggcgcttaataaataattttgctagatcattttgtgtatgtacatgagaaacaggatgttttacatttatccctattgacacaaaataatcattaaaagcccgtgatgtaaattcaccagcattatcaaggcggattgtcttgattgcatagtctgggaattgtgctcgtaatcgaattatttgagcaagcaatcttgcaaatgctac

SEQ ID NO: 61501 - DNA, 873 bp, Cannabis sativa
tctatgctttctttcagctagaccattttgctcatgtgtggtagggcaaggatgtctatgaatgactcctaattgattgagaaagggtgtgaaagacctgtactctccccccaatcagtttgtagggatttaagtttagtaccaagctgaagttcagctttagctttgaaaatgtgaaacattttcaaggcttcagatttactttttagcagataaagccaggtaaaacgagaatacacatccatgaaatggatgtagtacttgtatccatttgtgtatggtgtaaaagatggtccccacaagtcagacaccaccagctgcaggggtgctgaatattcagtgttagattgcttgggaaagggaagtttgtggattttccctaagcaacatgcagaacataaggaaggcaaagttttattgaaatcaatgtgtttattacatgattgaagaacagtcttgacaaccctttcagagggatgtccaagtctgttatgccacaaactaaattcagaaaacaatggggcattacatttaacacatgacagatactgaatagaagcagtgggagataccagttgacttagatatgcactggcttgagttgaggaaggaggacttggattcaactcagaagaatgcagctagatttgagaagagtcaaaagaatacaggccattcacaaggtgtcccttcagtaaggtaagatgagtcttcttctccttgacaaaacatatgtcagcatgaaattggaaatagacatcattgtctttggcaaactgagacacacatagcaaattttttggttatagcaagcacatgtaatagattgttaagtaaaagaggatgatgttggaagttattttaccaggaact

SEQ ID NO: 61502 - DNA, 725 bp, Cannabis sativa
ttcttttttttttccccttatttgggtttttttgttaatgttagttagttggtattactagctatatatatatatatattaatattttgaggatcatgttagttagagatgtgagttgtaatcaaagagataaagagatacacagagagaaagagatttatgttgagagagagagttctctgagctgtcttcagagaagaagatcgagaagccactgatgaggcatgctcttagtcagtaaacactagattggtttcatagtagatgaactgaacccagtgatcaaagggtgttcagaaacaagggattaggcacttcaacacattggtagaggatgttcgaacctcttaaaattggttgtgttcttctttatgcttttatgttcttgtactgtttgattccttgttctagttaaatatgtgcagtgctgtgttgtgtgtgtcagtggtgattggttcgagattagagttggttttctagaaaccaacatcttgaaatagggttttaaacccctttcttagtggtgcaacaatgactctatcgatagacatcaatgcaccatgggtctgcctaatctgggcccaattgaagttatttttcttacatttgacccatttgaaaattggtttcttcactcgaacttttgctatgccataaaaaaaaattcccacaaaattttttgggcatgtacgttttggtagttgtaatacgtttagaagtatatg

SEQ ID NO: 61503 - DNA, 1710 bp, Cannabis sativa
  modified_base (940)..(942): a, c, t, g, unknown or other
ttaggataccatctcatcttctcataactattatttacaaataatcaagtccatttcttgtttgttctcttattttttataattgtatccaatggtatcctatcgcatccaccgaaaaaggccatatagttcatgtagaaaatagtgattcgaattgtgtatcgatttcatagaataatacatatttatatacaaagttaggagactaaatatctactaaatatctaattcttttacagctaatacacatctaatatctaacagttcaaattcaaagttattttagttatggaactaggaaaagagacatagtaaggcactcgagtttgattgaatttggcatatccctaattattttagatagcctttacatatactggtagggtaacaatagaactacaaacaagtttctacaccatcttaagaatataatacaccaacacctcccaacagtatccacattgagatcttgaacagcatgacataaattgatttctagaaatatgtgctaagatgaatcatatatagaattgcctgtgatagtagaatatttgccatgatacaactcaccactttccatcaacggccatcgtactcttattatattaagagcaatttgcggcttaaatacttaagtttagcttccagttacaaataaatacttaagtttaatttttagcggtaataatacctaaattatgattttggaacttctgtaagtacctggttaagtaaattgccatgtgacaatttctgagtggttctagtcattaaatttttattatttaaaaaaaaattagttcaaatataccaataaaaaatgacatggcatatttaagggttaggtacttatagaattccagaaatataacttaagtattattactgccaaaaattaaacttaagtatttatttgcaactaaaagttaaacttaagtannnatgccgcaaattactcttatattaaccttattttcaccttacaactcttcctccttgatgacccgttgttctgttcttcttgaaacatcgatgctagtgtgtgtaaccgcttaacttgtggtagctagttcttttcataaatatatttttttttcagtgtgagaaatgaggaatttcatctctatgtcctaaaaggttgcgtttggatatatgcagtagcacctgtattatgtactctcttcctcagctttcatttcttcttctaggaactcaaaatcttgaagaagatgaaagttatggtctttaatcatgtgttcatttaagcgtttagcttttatattttagaatacatagtaggttttgatgcattgtatcataatccattacaatatttattggccatagtgttgatagatgaaaaaaaatcaattaatgtttcttcaaagaacaactgttggttctttggttctcctttcaagtaggcaagtatcatgacaagaaaggaagaaagaaataaatcaattgacagataccatttgtctaaaacaacttggtagaaatcactcccaaaagataagcctagagaagggtgcctaagtacttatataccactaactaaccaatcccatatttagtcgatcctaacacaatgagctaaggtttcaaggagaggaattgtcaagtagcttgtggttttagaaatactttattatccaaaagtttattggatttgttggaatattaacatgattgaaaaaggaaaattgt

SEQ ID NO: 61504 - DNA, 1023 bp, Cannabis sativa
acatatatagatatatttattaaagtaattatatgttagctaatttttttttgaagcatatatgtacaacaattactatgacaatagcatgtttatttttttttccagagtcatagggaggcaacaccattcaagaatcaaatatttccttattatgatgatttgtgcacaatttttgggaaagatcgagcaactagaaagcatgcagataccccaactaaggtagaggaaaatgagaaaaaaaatcaacatgttaatcttgatgatgataagttcaacttatttcataatatgggggatacatatgctaaaaataagagtctatgtcatttttacaagcacaaaatggaccaagagctcctccaatccaatcagatggctcatcaaagaaaaaacaaaaacgttcaagtttagaagatattactgaggcaattaaggatgcttgacaattcatcaaagaaaaaatagaattgtcttctgttcgactaagtcgtgcgattggcgagaaaatgaatgacaaacaaatgcgagtcaatgaagagataatgagaaccacacattgcttcctatgatggatcgtcatagggttgctcgcatgattatgagtgataatgctcttgtttcatttttctttagtctccctgatgaagagaaagatcattggattagagctttattaattggagctatctaatatgtggctatgaattattttttgaattatttatcgaagctttctaattgtatcattgataactttttgaaatcttttgaaagacttaccacttcttactcttttggatgtaatcattatattgctaatgttaaatatatgtaattctattaaaactttgaacataattataattatatagatatataaatatgtgtgatgattaaattaaatagataaaatttatgctgaaaaaaatatttatatgtaattttattattttattttttaataattagatttaagaatgtgcatattctcatcacatgataaatatatattttttttgg

SEQ ID NO: 61505 - DNA, 1226 bp, Cannabis sativa
atttagtgtaattaagtttttatgccatatatatcaaaacttatctttattttcccatatttttgtaaatagcccttaatgaaatacattgcccaaatccattattatattgccttgtgattaaattcaaatcaaataaaagaaatttcacaaataatagtgattctatttccaatcataagatcaaacagaaaaaatgtgggccacggctcatgtaatgtaattgatgggcccgtttaatggtgaagcccacacttgtttgaaaaatataggggtttttataaaaatactgaatttgagtaaaagtttacaattttactcatacgaaatttttgataaaattactatctttttataaaacaaccaaaaaaaaaaagatataaattaaggatacctacattaaaaaaaaaaaagtaaaaaaggaaataaaatcacccgtatgttaatgttttgcaccattttattttttaaaattatcatatatatcgtgttgtaacaagtgatagctcattcaaaattgaggatataaattcaaattttaaataataataagctaataataagactttcaatgaaataataatgaatacatagacacatttgtaaccctttattcgtgctttagttcagatacaatgctaaattacataatatcacataaaaccaaacatgttaattaaaatatttccaaaccaattaaaatagtattaatattatttccattaatttaatcaattagattaattatattatcaagaagatagagcaacttcttcaccattattatcaatgtcgtcggaattagatattggcctctgaaacttgcaaaacttacacagagttgaatacaacgacgtcgtttggtacttatcttcaccacccatcatcggcattggaactccaatcttcacggggctcacatacccaggcctataagtcttacccaaaatcccttccacagaatctgacaaatccaagaatttgaattgagtttccaagtgagcaaaagaatctccttctgggatttgatagttatggattctattctcttctttcccaataggtttcactctaatgtccatttgaactagacctgtcacagttactctaacactgttataatcgtcagttctctccaaaacaacttgtcgttttgtgagagaactgtcggttctccattcagcctcaccgtcagttgggatttggatggactcaccatcccagct

SEQ ID NO: 61506 - DNA, 2151 bp, Cannabis sativa
atcaggcaagtcccatgtctttgggtcacctattggtaacatagaaccttcatatgttgcaaaaatacttcttttatgtagtagtatgagcaatattcatagaatttcccgtgtctttttgatattacagtcattgcataagaacatgacatttcatcatattgacatcgttgacaagtgcatgttcttttctggatatccataatgtaggatcttttcaattcttttactgtgtatatgactagattggatgtttttacctgtataaatgtcaaagaggtaagcattagtataattttcttgtgattttttttaagcaacagaatgtgcataagtagtatataattgaagttttaaagatacctttagtttcttactacattcgagtttatccttcaatatcttttctggtattgatgctaatgttgtgaatgtggacaaagctctatttttgttttcccatgaccatttttgaactaagtagcgtagacattccaacagtattccaatcggtagctctctcatttctttcaatgctgagttcacagactctgctatgttagaggtcattgttgagtagcatttatttgggctgtaaggccttgtccatttttctaggccgacttcactagttaggtaaggacgaattctagtatcaatgttgtctaagtccctcatgtaattgtcgaagtcagtttgattgtatgctttggatgcacagtagaatgcatctcttagattatctcctccttttctgaattttgtttttatattttggaataaatcgaagcaacataccccgtgcatcaagttagggaaaattaactttactgctttagcaatgcttttgtgtctgtcagaaattatgcactgctcttcttgctcaccatgagattttttgaggttttgcatgaagtattcccatgatgcatcattttcagagtcaactattaaaaaaactagtggaaatatgtgtctgtcagcatcttatgcgctagcaattattaatgttcctccatatgcatttttaaagaaatttgcattatttttgttcctgcaagatcatgaaagtatgttagagctattaatatgtttctttttaagtataaatttgacattagataaattgatttacacctaggttgcatttttgaatcacgtgtagagtgcctggtatttcattgtatgaattaggtgggcaacctattaccttgtatgtagctttttcttttgctctccaagcttttttggtaagagattgacacactatagtcttctgctacatcatcaacaatttcatttggcctgtagtttcgcttgggatcgctaatttttctcttgatgcagtcggctatgatattacttgttgcttgagggtgatcgtcatggatgcgttttattgagcatgtgtgatcctctataagttttgtgaccttgaacaaattttttttccttattttgttgccaagaaataccatttacaatttatatcaacacacattaggctgtagtcttttgttgataatatttttaccatgtgttgttgattcattttgattgcatatagactcatggcaagctttattgtttctttgtcttggaaaatttgcccatctcttattgtgtcaatccatggatctttgatgatgtttgttttgttttcccagcttgagttgagtgcttgtccagtcttttctgtgatgtagttagcaactgtgagtgcatactctgtccatgtaggtaatgtattagatcgttttatgagaaagctcttggtatcagtgtacctgtgacttggtaatctgtgtacaaataattatctacaaattttctattgtagtaaagtaccactaacaaaggttccatgattctattatataacagagtaatagttttatattggagcaatcaaatagtatataaactatttttttagttttctttttatgtatgaaaaaaaactgtaattttttagttgtctattgtgtgaaaacagtctagtagttgtcatcaagttcccttatttttgtttcctccttttgtacgtaagaagagcttgaagttgctatgtcgatgctttaatggtgaaactttgaatgatagaactttatatttgttgttgttcggtgaatttttatttcgtgagagaag

SEQ ID NO: 61507 - DNA, 884 bp, Cannabis sativa
ttggattaaattatttggcattttatttgataatgagaaatctgaattttatttggaaattaatgagcatgaaatgacaattatgcccttgtgagtgagtatgcatgttatttggtcctagagaaaatggtcttttgacctttattgatttactttgataaaagtgaattttaaggaaaatgaaaagaaaaattctggttttgtttcccctatagccgaccccctctctctctctctctaaactctcttgattttcactttgacttggtgagaaaattgcttggagcttgcttgaattaagcttgagaattttggagtgtttgtgcttagttcttgcttgagacttaaggtaaattttacagctttgattttagcttagttgctgaattttagtgaatgaaaagcatgaaatttatggagttaatcttatgttgcatgttagaaatccttggttgatttgagcatgatgttacttgagtctttggaatttttgtatgtttgaaccttggttgaattctagggttttcttattgtagaattcttagtttaatatatattatttgtttcttggaaattgatatttggagctagcttgtaagttctagctcatgagcttgaaaattgggtgtgaataacatgatttttgtgttgaattgtgggatttgtttttggtaaattcagaggcgtttttagggttacattgagtttaaaatataattgtagggtctgattttggttgtttaaagcaagcttgagttcatggaactcaaacttggagctttaatggcactttttgattcttggtgtaatattgtgtttaagctgtagaatatgtttaatatgttatatgatgatgctttggaaagtttggtggtgattgggaa

SEQ ID NO: 61508 - DNA, 535 bp, Cannabis sativa
cattttaggggcccaaataaaataaataccttttaaaaaatatacatatttttttaataatttttaaaaaactatttatctttatagtaaaggtttaaaaaaaaaagaattcctatagcctattttaactcaggatcggccttacatttagtaaatgtattgtgtgtaatttaattatacatgactatcgatataaattaatatattttatcgatgtattgtttattatgaaaaagataatttatattacaaagataaatattaatatatctgtctaaatttttaaattttaagtatttatgaattcaagtttgtgttaaataagttatttcatttactttataaagtttttaaaaaatgagaattacaatttatcttttgaaacttaataacataaatggttagaaacatattgtaacaacccaacaaatcaaatttcttattagcacacataaagctacatatttgtatgaggataaggaagtattcgaaatacatcatcccattttgaaatcttcaatatcccattttgaaa

SEQ ID NO: 61509 - DNA, 1409 bp, Cannabis sativa
  modified_base (961)..(966): a, c, t, g, unknown or other
taaaccctctccaaggaattcataaataaaaaaaaaaaaatagtcatcttgaagttttggagaaaatatgttctttaatttactaatttgtgaaaacaaaaatctatataattaatttattctaagtacctatggaataaacttcagttttcttattaacacacatttttacggctttccatgaaattgtggtgtaacctcagggaggcatgtgaagagtatggtagagaggttgaaaagctctcgatcaagttgatggaactaattgccataagcttaggattacaagcaaacaggttcaacgacttcttcaaagaccaaacaagcttcatccggctcaatcactatccaccatgcccgaatcctcaccttgctctcggcgttgggcgccacaaggatgccggtgcgctgacaatcctagctcaagatgatgttggaggtcttgaagttaagagaaagagtgatggagagtggattcgtgtcaaaccaacaccccatgcttttatcatcaacgttggtgatataattcaggtatggttttttcaaagaaagactgttatttgtgtagcttttttatggtaagaattgatggttgatgttctgattaagcaattcataattcataataattgtaatattttaggtttggagcaatgaaagatacgagagtgtcgagcacagagtgatggtcaattctgaaatagagaggttttcgatacccttcttcctcaatccagcacactacacaatggtcaagcctttggaagagatgactgacgatcagaatcctccaaaatataaagcatataactggggaaagttctttactacaagaaaaggaagtaacttcagaaaacttgatgttgaaaacattcaaatttatcatttcaaggtatctaagtgagcagagcaggccagacaattactgtagattaagctttatatataataataataatannnnnnataacaataataataataaataatgtatcctatatggagtggaagtaattaataaaaatggtgttttcttctgagtattgtagatgcaaaattgttatttcaaaatcagccaaaataagtagttatagttgtatagctattttatatttatacatatatggaattatggctaatactcgttgatgggtactaaaaaaagtggcaatctaatgattgatatttatgattattaaattaattttaaaaattaatatttttttttattttaacctattacttgatgacgtggcaattaattttttttttcttatatttgttagtcatattcatgactcatgttttctaagatcgtgcaaatctatttatggattataccatctggaatattgactaaatcaattattcatgaattttcttcaattagtcctctcgaacatttgttg

SEQ ID NO: 61510 - DNA, 2012 bp, Cannabis sativa
tgggcatatatgtatgatcaaccgaaatcaatcttgaaatacatagtataatgcaaacaaaacaccttcaaaaaaatgtcctcgaccaaacctttttgacgaaagaggggtcaaactgttataactccctgaccaaacctttttgacgagagaggggtcgaatcgttataacacctcgatcaaacctttctgacaagagagggatcaaacaactgtaatttttggttaaaagcttatctcacaagaaaggaaaatcaaaagttatgattagcacataaggttgaatactaacggttcgcgctaagggaaagtattaagcgagacatcaaagtgtcttgaaaaaatacttaaactaaacatgtgggtagaagatttaactactcatgtaagcaataaagatatatacaagatgacaagttcattaaaaatatatttgaatttgcttaaattaagatcatttctgatgatcgcgaggcggaatcaatgatggctcgtagattgagggttgggcagataagctactctcgcatgaagtagataattaactacttagcgtcagagaaaaatgcgaacaatggaaacccctaatgaactttatgcatgtgattgtttaagttgtgaatgaaatggaagaaaacatccacatattaaagtttaaacttaaaagtatgaggcattaaaaaagcaaagctggccatccaactttgcaaatctgtctttacaaaagaaaagtgccaccaggttcaaaccattgtcttggccaaagggcgccattttctaaaaaaaaaaaaaaaagaaaagggagataaaataaattaccaagtctacatgttgggagacttggacatatcttcttcttcttcttcctcaaccacaccatcttcttcctccatcctggtcttctcacaaagagctaaagtttcctcttccttctcctccaagaagttggtgtccatattagggttcaccatctaggcccgatatatggtgcgaaaaccaaccttgtcgtatcgttctccggtctcaacttctttttcagcgagcttcttctcaaattcaccggcttgggctttgatggtcttctcggcttccttttttgccttctcggcttcctcttttgctttctcggcttcttgcttaaggcaggcattctcctattgggcatcgtctcgttgcttactcactaacttgcattgggatagtaatttgtggacctcgccttccaagtattcgacccgctcagagagttgtcgattggaagcaaaagaagcaaaaaaagcctggagaattacaaatagatgaatatgaaagaggtataaaaagaataatataattataataacaaggccaacttaccatgaagttatagtccaagctccttgaaagcatctcttttggactcccaaaattgagaaaatctgaatcagggggaacaagagtttgaagtttgcgccagcaggcaactccatatgcttggacaaattcagacccagcttctcttgttgcgaacgacaaggtctcaatggcctttctcgaagaaacaatagcgtgggttgcctcaggacgaggagcattagcatcagaaacgaccagaggaggaacttgttcttggatctctttgtcagaaacctcgagatcgatgggctcggccagtgacttcttcttgtgggcaatggttttcctttgcctcttgagaggaaccacttcggtagctgtaatgaccctagggttggttaccctcttcttccccttccggtccatgatatcttcataactcatgtctgcaaaacaagccaaagtgttacaattattaaaaaggccgatgaaagagggaggaatacaattttccacctaagggatttaccaaagtcactagaaggcgagctatcactagacgaaggggtagaagaaccataatatccactaaaatccctatagcctatactcttgaatatatcaaaaggattgattggttctaaatcccagctcgcatctatatgacctgccctatc

SEQ ID NO: 61511 - DNA, 1355 bp, Cannabis sativa
aaaaaaaaaaacccaaaaaaataacaaacaaattatatacagtttgtactctgtacagaatttttaacatttttataagttgttagattttgtttacataaaatacggtctttttatgtgtactcttattattttgttgttgatttgttgttatttgtatattatttttttatgttatttttgtgttactttcatgtatttttcttgttgttttttgtatttttatagaatacaacgtaaaaatatactttttttttataaaaattagtgtattatgtaattattatattttattaataggaattaattaaaataatagtctgcaatccaattaggatatttccccgtttaagacatgactaggactagaattaaaaaaacgagccaaaaaataagcagcctgattcccaaattatttgacaaaaatattaaaaaaaattagatggaaaagattacagcatcacaattaaccttaagaacacttatattcaattttatctatcgctcagaagatacaacgatattaattgttgtagcagattcattcaatctcgtatcttaagcactcaactattgtgcaagatacataactgcactactaacaatctctttagtcgcaaagaacttgttattcctaaccactaacagtgatttgataacgaatcatcgaaaaacaaagaagaacaaataacaaaaacaaaacaaaacaaaactatatcgtacatacaagattaaaacactaaaaatcatgtcacataaaatctaaaactgtcaaaactacgagaatatcgaacactatcaagcaaaaatatttatttttatttttaatgtttgttcgaggtagacattgagtgtcattgagcattatcaagcaccaagaaaaatatttactttattaaacacaatgtacatacatataaataaatttatatagtttttcttttattaaatttatatactttttttttggtgcttaataataaatttatatagttatatactatacatatcaccgactcctaaaatatataatatactatgatttgataaattaaatatttttccacataaaagcaaagatttaatcaaagctcatcatgtgctatactcttttttttttttctttctttttttgttaaaaatggctatatatatgtttcaactttggggagccaaaaaactatatcaacaaaactaaattagttaaataattaacaatatttatatcatagttcaattttattatttaaaaaaattaattacccaaagcgataattttttagtcataatatatttttttttttgtgatcataataaaaggttacttgtgactaaaacagaatatttagatacaa

SEQ ID NO: 61512 - DNA, 732 bp, Cannabis sativa
aatagtaggatttggaaaaagcacctcttttctccgccggtgtaatactcttgagggccatcggaatcgctatcggagtcggcggaaagacgattgagatcagaaagagtacgaataccaccagttctactggtggaagccttagaagttctcttgtccttggaagccattgatgtttttgagcacttaaaacataaacacagaaaagcaatctgtaatctgtaatggaagaaaaaggaacacttctccaagtcaagcactttccctctctctccccgttacttctattattctctcactaatataatacacgcgctttcaagcgcgtctgtcactactgctacgcgcctccttgtcacgctgtcgttgatattttttttttctctatttctgggtaaccaagattttttttatactttcttttttattattattttttttatgtaatacttgaggagcaaaaaatattattacttatttatattgcaaacaagaaataaaaacatttaatttctaaaatatccgttagaataattaacattcttaagagtaatgtattaataatgtgtgacaaatacatatataatttttttttcttttaataaaattacactaaatataatattaattcaattataaaattttaagcattgtataaatattgttatgtttatccaaaaaataataacataaaacaattttttataataattttaatttttattattattt

SEQ ID NO: 61513 - DNA, 899 bp, Cannabis sativa
  modified_base (363)..(370): a, c, t, g, unknown or other
ggattggtaaaaaaatattttttaaatatgttcaatgagtttaaattttaaaaaaaaatgttataaaaaatattctatcttataattatccacatttaatataagatattcttttatttttcaaattttatataacataaaagaaatacatttaatgagattaaatttaaattataatattttataagaaaataacatttttattatatatccccatttaatattatatatctattttttttatataaaatgtggctatgtaacagaatttttagtttaacggtatttttttagtttcatatgttaattttaacagaatattacttaactgaatattttttaataattttataatattattannnnnnnntaaaaataaaaattatgtagataagaattatatagatatttatataaaaaaatttaatttaaatttaaaatacttaaaatattgtagatattttatataagaaaattttaataattcatattttatattagtcttctgattataattaatgtgctaatattatttattttctttttttctttcttttcaatcaatgtataggtggagtgaaacttaatgattttatcaattgacacatttcacatttttaaaggcacatgatcttgaaatataatttatataaataattttttaatatcaaaattgaaagtattttaagtcaaactatatttataaggtaagttaaatttgatatatcatgattatatgaagtactaattattaataggagacatacatatacaataatattaccgcaatagttaaaaaaaaatctaaaaaattaaatctcaaatttcatttaaaaaaattaaaaaaatatatattatttaatttaatgcacataacatcaacctaaatatatatatgt

SEQ ID NO: 61514 - DNA, 1027 bp, Cannabis sativa
aaaaattaaaaataacatcagattcattttttgaaaaaaaaaatgtttaggcaagtaagcatttagggagatctcccctcaatcgttgatcttttcttgctggctctcataaatatctccccgcattggtcccgctaccatggctgaatatcgaagtagaagttctcaccgacgttcatggaggtcaaaaaaacttttacatcgtggtattgttgattctagattgagatatttgggttgtttggagaagcatcatggattatggagagtttcttgcttattctattgataaggagaacttgttttgggaaaaactctccttcacactgtatttttgaaaaacaaaataattaatttctttatttttgtttattttccacatgtaatgaaaaaataaatttcaaaccttataaagttataataaaaaagtgaaaattattttgaaacttgtaaaatatttatagaaatgtgctttactatattaaatatttagaataacaaatggttttaattatggaattattatggaattttttcaaaaatacacgaaaaatacacgtaaaatataaaataattacaaaaataacttaacaaatattatatatttatagaaatgtgctttactatattaaatatttagcattatcaagatctgaaatgtggatgcagcctttttttgaagatgaaagtcggtttgactttggtatggttgctagagattatacgggaaggctacttgaagcgtgctgtcagccgattcatgggcagcagaatgttgcagcagctgaggctctgggcgtcaaagaggccctcagttggattaaaggaaaacaatggtatcaagctgttgtcgaaactgatagtaaagtgactgtgcaagcagtccgtagttcaatagccatgaaatcagttttggtatccttgttgatgattgtcgttgtttgcttaaagttatgcctaatgtcagtttatgttttgttaaacggtttgctaatcgagttgctcactatgttgctaggcaatctcg

SEQ ID NO: 61515 - DNA, 884 bp, Cannabis sativa
  modified_base (535)..(541): a, c, t, g, unknown or other
ataagttggtaaggcgcaaggccaacaaaaactaagaaatttatgaaatagtcctatagcggtagcattgccccagacataaggtgagtctgactccaagctccaaaaccaccgtagttacggttgggcatctcttcatctctaggaagacagtgaaagactccggaagcagaaggcttgatgccggctactgtgacaatcttctccagttggtggtcgcaagttagagttgagtgcaacacgtctgcctcccagctgttggatcgacaagtgcacttttcttggaacactgttcctttcatcacctcctccagggtggccaaggtcttcgaccctttgcctgaggactttgatctggacgcgggggtagacatatcttgcagttgataaaattctaaaatttcctaatcgaagctgaggaaaccgtgctcgtgaaggttgcctagaacctcactcatctgaaaaagagaaatccagcaattagtccccaaacaaaacccaaacattaatagagggaatgggggtcccctaaccnnnnnnnagaggccccctccggatgtctgcccaaaaatgagaaatctagggatgctcctaggcaaacaccgggtgcaaatatcccaaaggtagcgaacatggaggaaaataaaaaaaacgaaagaaaaagcaaaaggaggggcctaagtatgaaaatcgtttcatgccctagattgtccctaaatggagaagtcgttcacaagttagaaagaaacagtagaatacaaacaagaaactacgacttacgacggagttcaccaaaactagttcaccatagaaatctgattcgactaaaagcattaccataaactttgccctaacatgaaaatgagtaatgaaagcaaaatgaa

SEQ ID NO: 61516 - DNA, 1010 bp, Cannabis sativa
taaaataatttccaacatgtattaatgtaaagtgatttgtaaaacacacagaaaaaataaaaactaaggtttttcgaacaataccaaccgtaactaaaattttcatgtgtatatatactcatatataggttaaaaatatgatttatctataaagtatatcatactaatcaaatatatgtaataaaattataaaaatattgagtattatatataaatatataggcaaaaatatatttatatacaactgtataaatatgaatgcgtccatatacatatgaatatatataggattattacgagtatggatataaaagtacttatatacatatatatagatatatatgaatgtatatagaattatgaatataaatattgttgacccccaaaaattactaagtgtaatttttagagtcattagtgttatgcctaaaagtttaccaagtgtaaattccaaaatacaacgaaggggatgtgttggtaggaggaggagcaaaggcatggatcaagctccctgtgccgacgcccgcaagcccaaccctccctgtgtgcctagcctcatcgcattcactgccgcgagcagaccctccatgcgccccctttaccctctttgcttcccctcatacaattagcatattcacataaggtcagcatgaatatcttgagtgtttacataatcttatggacatatgggatgaggagtaataaattagaagtattcaactatcgagagggccatcttcggtacgatgccgtccaccatttgggccaccaaacctcgacactttaaggaataggtccagaaaagaaaagcaagcatactcagtgagttcaagctcccaggcttactgatacgaggagaaaataagtgacctttgcttgaagaacaagtggatagaaactactgtagctggtatgcaaaaactgttgagtggcatactcaaaggaaaatcccaagcctcacactttcgtcacaaaagccattgagtggaaaacgagatctcaactacata

SEQ ID NO: 61517 - DNA, 1381 bp, Cannabis sativa
ttggttcattcaacccaaccttaaagaaaaaaatgacttagttttcaagaggtggaaatataagaacgtgaacagtgccggttataagttcaacaaaaattggcaccaggcccgaccctaggtataggcgagctaggcccatgcctagggcccacacttcctaggggcccattaaaagtttttaagatctcattatttaaatgctatatttaattaaaattaacaattaatatacctaaaattggcctagcacagtggtagcttagagaaagataagattttattagttgagtacgtgagttcaacccctatcaaacctcttttcctagtattttttttttttttgaatgaaattgtttaagaaacaactacaagcccccactatacacttaataactaaagccaaagaaaaataaatgcataaatattatttaaagaaaagtctaacatttcataagttcatctccttttttgctaccaagaaaaaactcatctattttttttattattttctttctttcttgtgggaaaaaaattattaatcaagatataatatgattaataatttgttaatttttaaattttagactttatttttgcttcaaattgtaattatgtactttaccaatgattttgttgttaattttgattctatttttgcataagtaacatgatagttgtaagtaacttgatacttgtatctttgaatatgattgaatgtgttgagttatgactgtattttttaacaaataattttgttattttgaaaagtgaatttttagccttaattcttcttctgaaaaataacctgttacgtggattccggccgtttctatagctttctgcatggcgaccattatctcttacatcctcctattttgttctttttgtgtggccagttcggcttcgtgatcggccgccttttgtctctgggccagtagtttggtataactaccatcgtcataagcatcgtacccttcttggttttcttcatattcctcgtcatttgtttcatcttgctcttctgtatctacatttactcgtgaagtttcctcttcgtcccgtagattctagggattttagggaggacgaggttggcgtgtatggttcctagtctcgaccattgtaccttgaaatccctattgtcgttttgagactgaacaaataatttttgataataagtctattcaatggacttaacaaaatttcccaatcctagtctcataattttgagattatctaaacctatgacttgtgctatgcctggtaatttatttattctggtgcaaataacttactttagtaagatgttggagtatttttctaatggctaactctaatgacatgtttgtctgaccatataattacactgtaactgtgt

SEQ ID NO: 61518 - DNA, 2147 bp, Cannabis sativa
aatgatgtgtaaacagaaaaatatagaggaatgttattggacattaatagtgtcttgtgccttttataaatgacatatcctaaaattattagttagcgatattcttgaaagttattttcttaattatatgaaactcgatacttatttgtactaatagcgatatgacaccgatgagggttctaggaatcggtaatatcttttagcatttctaaacaatataaggacatgtgaaaaatatgtgaatatcattgcgaaaatggggagtgaattgtaacacacattacatttgttaatagggtaaatattattttggacattgtgttttgtaaaagttataaattggattatttgttttgttaaatgataaaatagactattattttttaaaattgtacaaatagaaccctgagtttaaattgtgacaatttttttttttaaatataatcaacttgaagataattcttaacacaaatagatgcaaaaaatttaaccagttttttcataacacctctaggtcagattattattaagttttatttagacaaaaaaatcaatttaaaatcctatttgtacctttttaaaaaatacaaagtctattttatcatttaacaaaataaaaagtccaatctataacttttataaaacacaatatttacacttattaatattgtatcaaaaggtaaatttaatatgaaatgaatgttagccaactttagtgtctatatataaaaaatttgaaggggcacatttctttgaaaagcacatagttaatgcgtgtataagtattgctttttaacaacaattatggctttgaacatacattattgttacaatatattttcatcatattcatatacatattcataaggtggaaaaatatatacttcatcatacaataacatgattaggaaataatacaaaattaatgaattttggtttagattaaacaaatatggattaaaataggttaaacaaatgtaaatttactaaattcgaaatagatacgtttaacacgattaaattactgtgtttagctccgttctttcactttgttgggctactatcttatcttaactcttaatgatattgttcgttttgggcttaatctctcatggttttatttttgagcaccttcccaaagtacctaatactaatggagtaggtagaacacttatatatccaaagcagctcatgcctaatctcccgatgtgagacttaggttgatactccaacaatcctcccctcaaaccaacaaccgcgtattcgtggcctaccctccaataataccaccttgtgtcactgctgtcattgatagaaattgcagcctgattgtcaagaagacttttgacacaagaccctaaacatcgatctccatcttgtaccaccgtaatcatcaaagggacacgctacttgaccaacacaatacccggtagactttcgatacaaggcaccatatagattttcaattgcgaggtcatcacattgatattttctcccacacatcgcaaatacaacctagtatcccaacgctcctgaactattggctcttataccacttgttgggttctgttcttccattttgacttccacattattatgatattattttctttgtacctaaccctcacggtttatttttgggcacatttctaaaaggcctcatactaataaagtaagtagaacacttatactcaaaataattctttcctaatcttctagtgtaggacttgggctgatacccaacaacataaaattagtcaatatacattaattaaactatgatagttttttttttttgctcaaaaattaaactatgataagttatgcacatcaaaataacaaatttgaacatatttatttatttgtttatttatgtggaaaaaataagtattaaatagataaaaaaaataatgacagtaatactacttaaactatataacttgttacacttaactccacaaactaaattttaggggacaaaatcctccaaacttcaattttgttatggtattcactatctcatctaaaaaattctgttaaatgccgaataggcatgtcagtatataaacagtgtacacatgacaagtttttaggggtccatataattttaatcatttaaatattataaaaaatatttttttaaaaaa

SEQ ID NO: 61519 - DNA, 693 bp, Cannabis sativa
aattgaaggaaatgaaattgtaataataaaggcctattaaaaacaatcaatatatcgaaagttaaaaatgtatataaggatattgtaatcattaaagcctattaattaatgtatatatgaaaagagaaaaatataaataaacacattaagattaaatcaaaaatttagaagtagagagattaggagataataacaattagggtgccatgtggaatcttttaggcattcctttatattgatatattgatattgatatattgatgattgatattgattatatattttaatattattatataatttattatattttcactgtattattaattattatttaatttataaatgacttagtattgttattataaaaattgataaaataaaatagtatttgaagtcatattaaatcccaattaaaacattcataaagtggaaatagtaccattacataattatgtaatgtaaaaacacacaaagagaaatggcctaaaggcctaacaaccagacaaaaaataaacacacataagaaaatgaaaaaaccaaaatcacacttaaatcacacaaatgaaaatggcctacatgcccaaccacctcaaaactccaacaataaatactaattaattacttatttttatcttcaacattatcaccagcttcttcattttcataatcaagaatgaggagttttctctt

SEQ ID NO: 61520 - DNA, 1341 bp, Cannabis sativa
gttgaagagtccaaattaaaaaaaaaatagtaagaatgtgagaaagaagattctccttaaagaaattgctaaggatcttgagccgcaagaaagcaaagacaaaacatcatttgaccctaaaaaaccacccaaaaagaagagaaagaaaaagaagcttagtagaaaaatttggtctcaaatgtttgaagttgggcaacaagtgattttcgccaactctttaatgaaggcctctaaatcacattattcataacacgggtaagtgacactctaaatcactttccgatgacttaaacttgaaactaaaagtttcccctatcgataaacaacatggcaataccctaaaaattaaggaatcaaccaaccaaggctctaaaactaacacgaatcgacaacaagaaaaattttgggaacccagctcctgatccggttaaccggtttacaccaggtaacccaaaaaattcaaaatcttacccaattcgtttcaaaaccatacaaaccttccagacctgcttaatataccccaaagaacatatctaaggcaataaaacaccacaacatgcacagaatcaaaatataccattaaagagtcaagcttcagttcttaaactcaaagcttgctcaaacctcacaacaacctttaaatccacctcaaatcaatatatttcaccataattaaacttcagaagcaaacacaaacactactccacaactcataaccctaatactcaaattcatgcataattcttaacttaaagcctttaaaactaaagaaagagattctaggaactttaccttgactcggatacattaaaagcttgctggaaattcctcgaattgagctgaaaaagctcaaaccctagctggtttccaaggagctcaagagagagagaaagagagagaggtttttggttgattttctattttcttttatttgtaaacataacatgaaaaaaataggtgatttatctaaataatatcagcctaaaaatcagattaataatttaaattaatttcactaaacgacaaaactctaattaggcaaaaagaccattttgcccccacttaagctataaagtcactaaaccacctaagggtaatttggtcaattgtaaaatcttgactaatcctaacattcttaatgtctaactatattgtcccgctatactaaaaatactaaaatatgattctaatggtcaaacgtcgcgttctaatgttgtcagcacaaaacatgcaaaaatataaaattttgtatacgtaatatataatgcattctgaattcaaataaatctccataaaatgataattcataactaatatacaagtttcataattaaaccctaa

SEQ ID NO: 61521 - DNA, 970 bp, Cannabis sativa
cttcaactacgattcttcaacttcgattctttcaactactataacggatcaatcatattaagcagattgtttaataaaaaaccaatcttctataataacccaaaaaaaaaaaaacatatataggtaataaattttgaataacttttatactgttattatactgaagttcagttattgaccagaaggtaatacatgtcttacaaaaggaatataaatcagctcaaagaatataaataattaaattgcattatttaatgtggtttaattaactcgttctaattaattaaaattgatataaaaatttaaactcgctgactatataagcatacacgagataagaataataactattgacaatatagttgacgagacaatatgtcaatctcggaaaaaatagagcatcctaataagatcctacaagacgagacatcaagaagcttgcaactcattgacccacgtattttatagagaatataaatacattcactgatctcgctctttatataacaaagtagctaccttgtaaataactctatgatatatatacttagcgttttctcttataaaaacagataaaaagaataactcacatttaacgagaaataacatttttagtcagcatatataacggtttaaaggataaagacaaaaagtagttgggtagttattagatattatcccatgtgcatataaatgaaatgtagggagtgtccatgtttcatgagcagttgtaagtgaattatagatcctaataaaaataactttcatcttatacacctataaatagaaacaaaattcatagaaaaatgggcggcaaattaagagaaaatactattattcttacctttattaaacattatactatgtattaaaataaatattcatactaaaaaggactcgtgtagtatatatgtagattttaactacaaaatcacgtaaaatatctaaaattcatattattattattatt

SEQ ID NO: 61522 - DNA, 1268 bp, Cannabis sativa
  modified_base (959)..(972): a, c, t, g, unknown or other
aactaataaaaaattgaaaaaaaataagagaattaaaggaaagaacaagtaatgctaattagagagatttcagagtgccacatcgacgcctcatatctctcctttatatagatgtatagattgggggtgtttacaccctctcttctatcaaaaaaaaaaaaatagatagatgtatagatatattggtagattttaaatttatgaaaattattaattaataatatttaatattacttaaaaatgtgaaaatttgagaaaaataatagagtaaaataaagtcattttaaagtgccacatcaccgcttcatatctctcatttatatatagatatatagattaaaaaaataataaaataattagaaaataactttgtaagtatggtgggatatagattttttaatatattaattgtatattattttttaaaatttcaatttaaaaaaaaagccaaaacgtggaaaaaaaagctaataactaaattttattttttgagttatcatttttgttttaaaaaaaaataaatgaattaaggaaaaaatatattttatattaattaatatatataaaattaataaaaaaaaaagagagagagaattaaggagaaaagagaaagatgattttaaattatttttagaccgtcacgtcaccgcctcatacttctcttgtatatatagatagatagatagatttttttctaattatttatctatttatttattttctcatttttttaattatattttttttattttttaaatataaaatacaataatttttttaaaactttataaatatctaataactaagtttcaaaaaattaaaaattaaaaaatctatctatctattctatataaaatgtggttatgtaacagaattcttagtttaacgatattttctgggtttctccattaactttaacagaatattctttattaatttataatattattatatatatnnnnnnnnnnnnnntatgtagatattttatataaagaaatttaaatttaaatttgttatacttaaaattcggctaccatctagtggaggacacgtgtcaagataaagaaaatatggatcgatgaaatcacttttaatggaataactcattaattgcgtaagtagcaaagtatacttgcaattcaccgactgtaaggtcttatgcgaggaaaagatatacaaactgatctttagtgtattaacgagaaaccatatgtcattgaatgcataaagtgaggcatcaatttcgttacatctgggaagacgaaagc

SEQ ID NO: 61523 - DNA, 743 bp, Cannabis sativa
tgcttggaaaaagaaagcttgctgaagaaaatcccctagggttggctggttcaagcttgcacgagagagagaaggagaagaggttgtgttttgatggaaattttaaaaaaattcaattattttaaattattatatattttttttttatttaccttaatagacactcgatggattttccataaacgatggttattctcctacctcgaatccgctagttattagatggggatttagcagggagggggacataaataggtagtagagatgggagcgagaattgcattctccgtacattaaccgtccaatttttatctctagtaacaactataaatagattttttttttatcaaactataaatagattttagttattgtaaggttttaattaggggtacacatgagtttggttggcgggattagaggcattttaatgggccatcctaatgactccggtttgaagaagttataaatcatttaatttttttaattatacaactcaattctacttaatacaataatataggggtggattgagttagattcattgggttgagatgaatattttagactttaatatttaacgataaaataatttaacctagtgtatacacaaacaaacgatacatgtatatacgtgtgtatgtgtatatgtaaacatagtgctttaaaaaaatcgaaggtggtggtgatatcattgtgtgggtagcaaaataaacaatagtgattgattctcacgttagact

SEQ ID NO: 61524 - DNA, 1157 bp, Cannabis sativa
ttgttttctgatttcacatactctgcttgctcctgttttatttccgattgttattcttgatttgataatcttgtcattgctaatcgtttaattgtttagagtttcattgatttgattctgtacatttagtcgtaattttcacacagcacgcaaatttttttttttgatatatttaatcacaccaaaaccctatctttgagcaagacttggttggactgagtgtaatataaaccagcacaactcacttataaaagttacttttaataagtgagattcatcttaaataaatatgattagttaaagaatattactacttcgatgtgacattttataattggttgacgatttcatatattttttatgaaataaaaatgtgaaggaccaaatattaaaatgaatcaatagcgatatatcacctcttatggtacttgacacgttaaagtaccccttatcatttctcttagttaaaattatttgacacgatatcaaaagagaaatttcaataaccatccttagatatttacccgataactcattttatatataaaaatattttataccaaattatttttacttttactatagtttccctaccccttcataacaaaaaaccaaaaaaaaatatatctctctctttgaaggaacccatccgagaggcgacgagaagacgattgacactgacaagactgaacttagtctgacgtcgacaccctaccccctccgtcgaagccccacctttatcaacaaagccaaatgtttagttttgttacttggacttgtatgtgtgtgtttttttaaggtttgagattgatgtggttatggtgtttactaatctgatttggggttcctatgctaaaaagtaaactgaggagttatttcgatggcttctcaataacttatcgatatgttatcgatgacttatgatggcttcttgataggttatttcgaatggtttttcgatgggttatcgataggttatcaataattttttaaaaatatattttttatatttttttgtcattatgataatttttgatacgactatgacacatttttaatggtttattaatggtgttttgattcttttgttattctgtcatttttataatttacacagtttagttttggttgaggagagagacactacaaagagagca

SEQ ID NO: 61525 - DNA, 993 bp, Cannabis sativa
tcaactttgtaattaactgctcactatgtaattataaatagtggcaaacaagatcaaaaagggaacggaaaaactcattcaaaagaagccctgaaaaataatcagaaatctgaataagattgactcgtggactatgctgaattttaactgcaaaaccacgtaaaaaacattgtgtgttcatacttgttattttataacttttattttttctgtgtgagattgtcatagttaggctcaaatttagttaacgaaaatttgagttaacagtttggtgctttcattgagagcctttgtggaaaagctcagaaaaaccttccattcttttgaagaaaaaccacctccttcatggttgaaaatccagaaaatattaataccccacatgaggaaactaatcatcgttctgggaaagagcccatgggctccaaaaggtctaccaactcgcagtctagacgggccacccgttccatgaggacccaacccgacgttggtcctagtacgtgggcaacacgctcgaggagagctcagtgtgggagtggccagaacccggagatgagggatgaagagctcaatcatggaggtgcctagtctatggaagaaggtacttatgaaacggaaaatcgccgcctgagacgccgtctagaagaggcacagcatttaaacgctgaataagagcgtgatacagcctcgaccagggtggcacgggggacgaattctcaaaatcaacctaaacctggagtgagaagaacgcgacgtaggcctcgtggctcacgaactaggagacaggaaaatttctgggaagaacaacctagggaaaataagataccccctgaaaatcaaaacaaacagtcagatgggaggcaaccggaaactgatgaacaagaaattcctcatgacaatgaggaggatcctggtactcaaccgggagaacgtaggtcacctgcgagaaatcaccagcatttttcccaaacccatagagcgaggactcgtacagac

SEQ ID NO: 61526 - DNA, 893 bp, Cannabis sativa
caaaaggttgagtgagagtagtacttacatgaggtccgacaatgcttgtaactgaagctgaagtttgagcaacaccactggctgtgctccttgctgtcgatctttgttcaccatgtactggagtttgttctgccatagctttcagaggaacggacacaccaccggtgttgacggcgctctgataccaagtttgaatacagagagaaagcagaggaaaagaaaaatagacagcaataatttttgaataaaacagctcaatgaattcattggctaggtattgtatttatacacatgtgtgaaccgtacaataataatgacctaataatatttacacaatcacagagcaatcattacaatcattacaagggaatattctaacaataattgattacaatatgtgaccacacgattctgttatgccagctcacagtaacttgagcaatatagtaaatttcatttcttcacaaacatggttttaaataatatgatcaattttggtcttatatatatttgatgtttcttgttagagcaaaatgtaatgaaaatgtaaactaaattggctaatctttaacgttagcaaactgcattgggtttcgtctaagtggtgtaggtggaacaaagtagttatataacaatgttctaaacaaatgagatatttcaaaaataatgaagatttggagatcattttgatgtgataagttttttcttatcctctttattcaatcagtttatagttattaattaatttatgtagtgtgtagtttaattgttgcattcaaatttcttaaaatatttttgtagggttcttataattgtttcaagtaaattttatgaatttttttgtttggtctacttacgatctaacatttataatttaagatttattgtaattt

SEQ ID NO: 61527 - DNA, 835 bp, Cannabis sativa
ctgtacagattctaggtctttcgattctaggtctttcacctacaggtgagtgcacaccttatctacctatgatgacacaaaggctaaattgtgaaacaacaatatgcacaaatcatgatcaacatggctctcatcagtatcatcaaaagcagaaaaataataagaataacaaaagaacatatatccgttttattttctagaaaatctagcagcataatggctatattttgaataaattcaaaatcataatctgcataaatatttgtacaaaaatataatttggcacttagtgttccaaaacagtccacaaaaatatacagaataagtttttaatttttcaaaaaatttacaaatcatagaaattagaatatgtctaatgttattcaacacatataaaatcaagtccaataatcaagttgagtccctacctctcctaagtcgttaaactttatccaaaaagacaatcctaagctctcaagtcccgagctttaattgtttaatctaattttagatatcactttcacctataccatcaaatggctaaataattatgatcattgtattctacattcaaaactgagtctaacgacatataacctgaccatattaaatgtttagagtttcgaaacctaactaagtgatgcacattaactatcggtggcggtagaaattaatgtactggaaacgtcgttaaagataggggtagtatatatcaaaataactacctcgacgagtagatcaaacccatgccaacaatttatcgaaacggtacatgatatcaccgaaaagcttccaaaaaggggcggagctacaaaaatgtcaccaaaaaaagtag

SEQ ID NO: 61528 - DNA, 1465 bp, Cannabis sativa
gggacatgatgaacaagaaccaactgctgatagatcttttctcaaacaaagtacagattcaactcaatatgctttgttctagcatgtagcactaggttagctgttaataaaatagtactaaggttgtcataccatagaactggaggtctagcaagtcaaatttgcaattctaaaagcagagaatggagccatgtaagttctgacactacttgagcaacactatgatattcagcttcaatactcgatcgtgagactttgtgttgtttcttacactgtcaggcaatcaaagttggagccgaaaaatatgaaaaattagatgtagactgtttatcatcagggtcactggcccaatgagcatcactaaaggtagtgactttgaattctaagtgtggtttaaagagtaatccatgtgatacagtgccactcagatatctcaaaaatttgttttccagcattacaatgtgtggtgagtgggtttgccatgaactgacacactttattcacgctgtaagaaatttcagggggtgtaatagtgagatattagagtgctccaacaatagatcgatatagttattgattaggaacatgatctccctcataagaaaataattttaatccactaatcatagtgtagacataggttgagctccttccgattgagctttgaccagtaagtctctgatgtatttaccctgagataaatgtagccctgttgcagtaggttgaacttcaataccaagaaaatagtatagttggccaagatgtttgagagagaatttggaatacattattagcatccaactgttgaatggaccagttatgagttaaggcaagtgagggaacaacacgaattgtgactagtttcacaacaggattaaaagtaataaaatagaatcctgcttgttgctgaaagcacttggcaacaaacctagccttgtttttgttgacagagtaccatcagggttaagttttttcttataaacccatttacaaccaatgggatttttcctaataggtagaggaacataggtccaagtgccatttttcttgagagcaaccatttccacaaatatagcagtgcaccggccactttacttctttaagagcatctttgacattagttggctctggagaagctaaaaaggccttaggtttatggatgccagattttgctcgagttttcatactgcatttattagtatcaagtgtagtagtgttaaatggcagggatagagcaacagtttgagaatttgttgaattgggagctggctggtttgcagaatacgtgggtggcgatgacatgggaatgtgaagttgatcaagattatgaagattagcatgaatggattgatcaggttaaggcatatataccggtttgtgacagattgtcaaggggaatcataaaagacagtgatgggatgggagcattttgagtattagtggaacactcaccaataggcaaacc

SEQ ID NO: 61529 - DNA, 783 bp, Cannabis sativa
ttccaccattttggtagagtgactattctattttgaatggaagaaaaaataattccaatgtaatatgagcaaatttttatgattttttatattaattttttatgcatttcaaattttatttcattctattcctattttgattttcattctcattcctattattatgcttccatttctcccaactgctccaataaatagtattttaaattgtaaattaaattaatacaaaaaataaaatataatttatatagttgctgataaaataaatatttataaaataattaatggcaatacatataattaaaaatatgtactaaagtcaatcattaatagctaattacaatattataattgaaattttttatttatctgtagagtaatttgtgacataaatatttaagtttaattttatataaatacttaagtttaatttttaacggtaataatacctatattatattttttcagaatttgcgtaagtacctaatgtgtgaagtcaatgactacttgggagtttttttattggtgtagattattaaatttttattttttatttcaaaaataatttaaatattaataaaaaaatgacacatagataatggctggacacttaacggagaggtacttatgaatgttctataaatataacttataaatataacttaagtattattacacttgaaaattaaaattaaatatttattaacaattgaaaattaaatataagtatttacgcaaaattatggtatgtgccaaagtattgcataatacatagcacactat

SEQ ID NO: 61530 - DNA, 1313 bp, Cannabis sativa
  modified_base (811)..(820): a, c, t, g, unknown or other
atataagaataattacttttttcttttattatttaattaatgtatagtttattatttttacgctagatttatgacagaagtaataagcataaaaacagtacaatttcaggctaatatgcggaggagaacagtgagtatgcttgattataagaaaaattgaaagaagcaatttctccaagaactattaattaattggaccaagcacatgagaaggccatgaagaagaccctttcaaattggactggtttttttttttggtaataattagcttttttaaacaaattctcattcatattaataatttaccatatttatattttattagcaaaatataaatagataatgtttgattctaatttaaagtaagaaaatatttgtttctgaatgatgattatgaccagtatatgatagattatcttttactttttgcatgatgaatcaattgagcctgaaaatatggtgtgagcagagagaacagagaggtaagtgtttatgtaattttttttatttaatttttgtatagtatgttgcatgcactatgtggttcagcttaattgagataggtggagatagggctggcccaaacattttgggggccttgtacaaaagattaaaattaggccttttataaaaaaaaaaaaaaaaattgtgtacattaagacctctattgttagttagttttttacttcttttctttttttaaagaaatgtttctaaatttttaaatataaattttttaatatatttataataataataataaaaaaaaaagaataattacataaagcatcattttttgtaaaatatttannnnnnnnnntttaaagaatttttttttttatatttttacggttttccaaaaaataacacaaaaacaacataaaatcaacaagaaaacaacataaaagtaacatcaaaataacaacaaaaaaaataacaaaaaataacatacatataacaaaatattaacaacaaatgaacaaaatttcaacataaaaagaccatattttatgtaaataaaattaaaaaaatcgtaaaaatgtttaaaattctgtgaaatcgtatttttgttgtttttttattgtttttgtgcatttgtgaaattaaacctttttttttatactaaaagatcaacaaataagtttattgtttctcctttgtagaattttttttagttttgaaataacaatttgaatttttctaccttatatatttctatgatatgcaaatttctttaagaggtgtatatagtgactgatttttagtttgtggggatttatttaggaaaaaaaacaaaaaaatacaaaaaagga

SEQ ID NO: 61531 - DNA, 923 bp, Cannabis sativa
attatataattcaaatacttaataataaatacccagttaatacttaataggtacacaaataagcctatggtggatacatacacaattaccataccttgttcatcgtattcaattgaccaacttgtggcaaacaattcttttcctttccagtgtatttaatgaaatattttctttttacctatcgcgtcggttataaaatgaagcataagtgtaagtaaaaaaaataataccaaatcaattacacttaaatcagccttagtatggagttgcttttttgttatttgcccttttatttccatcacttttaagaatcttaagatacttaaatctccatatcatcagttgattgcttaatgatgaaaagcttcaaaaagaaaactacagtataccacagttaaccaataaggcactttgcaaacaaacaactgatagggaagacaaatgtacgaaacctttcactcaacatacaagactcttcacatgtgtccacattcacacaaatttatcatctacttgcatgtatgagacttgatcatagttcaaagccttccttttgacatttggatcaggtccatcctgagaaaaaaaacaaataaatcttgtttgaacatctctttcacctaaacccatagattttcatatggaagaaggggaaaacaatggcataactctattttttttcattttcttttctatcacaaactgaagccaaaaaaattacctgggagacaaataagggatattttgaagcaaccgatgtctgatatctaacaataaagaaatatggcagtaggtcaggcataaactaaaatgattgtcatgaattagactaaatatacgttataaatatgaagcttactttagaatagacttaatggtcctctctagataatcagcacgattacatgccatgaccacaactg

SEQ ID NO: 61532 - DNA, 987 bp, Cannabis sativa
gacatcaactacaagatagctcaaggctatcaagtgttacatgaaaatccacctagaatagattggagcaacattgtatggagtcgtttcaacattcctaagtatagtttcattttgtggttatctatgcttaggagaatcaaaaacaaagatagattgcaaaaatttagtatcattgacaatgcttcttgtctcctatgtaatggtggaaatgaatcgatagaacacttattcattgagtggatgaattatttggagcaggtaaaggaatggctacattgggggtctacctttatctcactaccttggatcaagataacaagttcaagaagacggttatctcagaaactttggctgccctcgtgtagtacatttgggccaaccaaaaaaacaaattttagaatagcttaatgaaaaatagtgatagaatagtgtacaaacttaaagatgtaaatcaatagtagaatttcttgtataggcctaaacatgtaactagtagtgaaaaagagtagtttcatacattgtaaagattttatagatatttttttaggtcctcttcaatttggaggatgctactaggttgtacaattttttttttttttttggagtaatgatatacttgctgattcatcaaaaaaatctctctcttcctcacttcccctctttcacacgcctaccttggtacttctcaacacttgagttttttcagtattaattcataccttgtaatcctaacggtactatagcaaaccccacctatagcgatcttgatagtaattcccttggtataaatacaactaaaaggggagtaggtcattacccgctaccacaagggagccaaacctctataacaaatgttactaccaactactttttaggcttatttgtgcaaatatgtggcaagcatcagatctgtacgaccccgctatcggttgatcactttttgaggtgaacattttggtgctttcattaagagagtggatatcg

SEQ ID NO: 61533 - DNA, 786 bp, Cannabis sativa
  modified_base (26)..(36): a, c, t, g, unknown or other
ataaaatggattacattgaaatggannnnnnnnnnnggcataaaacccaacaattcgatgcgtctattggtgatctgacgtgattatgaccaagattctcttcgatattctgctcatcaatgctgattgatttgtacctcaaatttctccaaaatttttcacgctttgacggttgctcttcatgtacttgattgcctaacgtttacttttgatgggaaatcgaggcatttaaattttgaaatgattgcactccctcactaatttgcttataaatagggtagaaatccctaataaacgacttttagcattgtttcttcttgacaatttcagagcaagaaccttttcctctcaaattcttcgaagaatttctaggaagtgttgatccgtgtcatccgatcagccctaaagctttaaatagtgagtaagttcttcatctcttttctcttttatgcttgaatatttgattttcttggtttcctctttagaaaatttcatagttcttgaacttgctctaggaaaaccataaaaaatctaggtttatgaatataagatcttgattgtgcttaaccatatgacttgattataattgcattccgattttgattccatgatattcggtttcacttgcccatttggggtttagtgaaaattaacccttaatctgaagttttgaagttctaggttataaacctaatacttgtgcaatattcccctttataatcctttgatcggacttggtcggtatattttatttgtttttgttcgatatcccagccaaatactcat

SEQ ID NO: 61534 - DNA, 982 bp, Cannabis sativa
  modified_base (33)..(55): a, c, t, g, unknown or other
ctgctattacaggtcaaagaaaaatgtaaccannnnnnnnnnnnnnnnnnnnnnncattgaatagtcacccatatattaatatatagagagaaataattattaaaagacactattagtacttaatatactttttggtgttagttattgatataattaagtattgagtctcgtataacttaaaaaatagcttttaagaaatatccttaagtactaatcgtagggctagaggtggcaaaacaggtttcgacacggcacacaaacacgaacacgacacgaattttacaggttagagtcaggaaaattagacgcgggtcgaaaacgagtcgagacgacttgacacgaaataaaaacaggtcaaatacaacacaacccgcttaacacgaatttgacatatttgatacaatttttttaaatataataaaataaaaattaagagtaattcatatatatttgatgtgactttgagtgctcaccctctcaaaaaataaatatgatgtattctgattaagagtaataaaaataaagaaaaatactaaagcatgtttgattatgtgtaataaaaatcaaaggagtactagaaaatgaataataatagaatataataaaatttaatgcaagtaagaaaaaagttaatacttcatatatgcattaaaatgatcttagctttttttttttttttttttgaataatataatctttactttcactcacttttagatgaaatatccacttttagtagaataattattctactaaatatccactcttagcactcttaatgtactttttttttaatgtgtgttaatgccaacaaagaaagaataggtgccatggaaattgtagtattgtaccctagagcaaatgctcaaaattatggggtgtgggattgaacaccatgttatattattttataatataataataaagtagattaaaatgtgataaatatatgtgaataatatattaagtgtatggtaaata

SEQ ID NO: 61535 - DNA, 1862 bp, Cannabis sativa
  modified_base (1622)..(1623): a, c, t, g, unknown or other
agagagaccaattacagctctcaacaacactctcaatcatctctcaacccttaaaattttttgtgtttctctcactcaaagtaagaggtcttcaatatatatatgtggttagcaactaactaaccgtaactgtcaaaatagttaagttagtttgggaagttactaactgtcaaaactaacagtgaatccaaattcaagaggttaaacctcaacacatgttatttctgaaattctccatcttattatttaagcaccatgttatttctcgaggctatacatgtatgtatattagatattgattaatccaatctgcgtagttgagcctactattcgcagataaattgcatgtcctagccactaactttaatgatgtcccaagccttgaatcccatcaaagaaatactaaaaatcaaagaattagagaagaaagatggtaaccttggtgatttgtagcttgtaatctcaagatatccttagtaatttagagatatattcaaggggtttttttttaagttttcatgcgtttcaagaaaattatttgaggatattaggttttttttcttgatagactgttataattatttgaggatatctaattttattggatgcaattgccataaaaaactaaaaatataaatctattaaaaaagaaaattaacttgttggtgacttgttataataagtcaccaattgccacattattataattttttatatgcattaataggtattacctattaaaaaatgttcctatgttgtgataatatcatattagttaaatcaattaattagcttgaatataatgcaagagaagaaaaaaaaatcatcgataaagtgtgaagtagatagtactctatgtaggactcaactacaatcagtgttccctccctaaaagacaattgatatacattaaaaaagaaaagagaagtagggctcaatccattattgtttgatcaaaagtacacacgtggtccgtacaagtcattgtcagctttacagaaagtcttgtaaatttcagtaatgggaaaccaaagaaaacatcacttcaataacacgtgatccgtacaagtcaattaaatcagtgatccctacacaactcaatttcaacgtgtacatcaaacaagtagggctcactccattattgatcactcctacaatgcacatattattgatcattcttatgtatataaagttaagtggtattgttatatatatataaaaggtttactagggttatttatagtcttctcagatatataaatctcaatcacatgcaaattttctatgataaatatagaaatcttataagctatctaaaccatacaggtactctcgtcctatatcaaaattcaattctatttcactatagtataatcgatactcatttctcagatctcgcatcaaaatcataaaacagttaattgatggccaggtaattaaaataattaagcacgaatgaaatagattacatagaaattagaggaaaaataaatcatattaaaactataaaaaaaatgtcaaacaacatccatctaatcctaataaagtgtttagctacatatgttcatggaagtaaaatcacacatatattaacttaaagaaagagaagaagatagagaatnnaataatgttgaaaaccctctgcagaatgcctccagtattgacttctatctctgaaattcgtactcctttttccctctgaattgccttccgtaaaactattgaagtccacttattttatagccaaaaaatgataaaataaaataaaatattgctgaagaaaaaactgcttaggattagaaaacctattctgtcattagaaaagaaaagtgagttttctgttgcgtcgactgatagtattt

SEQ ID NO: 61536 - DNA, 1101 bp, Cannabis sativa
gaaggcttatgaataaaccaagttgttcatgtactaggcgagatgcctcaacgagatacatttgccagcgtgtcctaatccacgtcagcgttgactcccttaaaaacgatttaaatcactgctgtgtgatttcaaatattaactgcatttatttacatagagcataattaaagtccataattttgggaaatattgttatgagatttgaagttaagtgtaattaactcccaacctatattactataattaggggcagattatacgaaaaaggagacaaaaaatcttatagagaaaaatgagtatactgattataaaaatcctaattctatatcagaaatatctgaataagatagactcgtggactatgcagagttaactgcaaaatcacgtaaaaacctggtgttatttttatttatattagttttctcagatctcttataatttttgtgccaaatttattacgaaaataggttcataatcgttaacgataatctgcgttaacataccatattaataaaattatatacaactataaaatgattataccatacttaaaaaattatatatcacctttatatataataaaataaaaattaaacatgcataatttgttagaatttaagataagatgaatgaggttccatctcaaaaccaattggcaacgggaggaatagcccattcctcttatatattctattattttttcacacattagcaatgtgagactctctaacatatattctccctcaagatggtagctgttttatttgcttaccatcttggacaactcgatcataagcgatttttctggctcactatccctgatcacaagtggctcttttgctctactttttggataggtggttctttttttttagttcactatccccgaattacatgtggctttttttgactttggctcttggatcaattatttttggatttttggtggctcttttttttggctctactttgatcaggttttttttttgtggggtcggatagtcatcaaagagtttttattttttgctctcataccatattagaatttgggataagatgaatgaggttttatctaaaaaccaattggcaatgggagga

SEQ ID NO: 61537 - DNA, 1435 bp, Cannabis sativa
aatacaatacaatacaatctaactcaaatacaatacaatacattacaatacggtgtaccaaacgaaccccgataggctattattatttatgtgttaattaaaaaatcataaaaaaaatagttacatattttgttgataagatagaaaattaagtattaatcattaattttattgtaaaaatgttgtgttaattttgtgtttacacttattatatttttaatagtaatacatcacatttgttcttgccgactattttttatttttagtatatggagatattataattaaaaaaaattatatgacaatatattattagttataataagagttttactcgttttcagaaaatatcaaattatttacagtattaaaaatataatttaaatagttagctgcaagtgtctatttttgttatatgtgtgcaatattgattattttgaacattataatttatttaaaattcttaaaaatggatgagatatctgttattataactataatatataacatcacaattgaaaaaaaaaaaagacataatcttttctaagggctgaaaatagagaaagcttgtatggtaagtgcaaaagtactgatgtcttcgcttaaataatttcatataaaaatttaaaattttcttttattatttattattgaaacaaatttaataatttaatatttttaatattaatatttatagttattttttttaattaagatgaatgggtgaaagtattctattaataagtagacgtaatacgtaagcaaaatgtaacaatgtagcagcgtacgtgtggttccatgatgggttattgtaattaattaaggctccaaaatcagccatgcatctttttctttatgaagatatttatagaggtagatgagatcaaagatagatatatgtatgtataggtatatattattaattaaggcttggaaatttaaagttttgtactgaattaaaggttgaaaaagaaatccatattatattatattaatatatagggacaatgtaaccatgaggacggcacgcagtatagcattgtctcctgatgggggcaaaggtgatattgatagttattaatattattgattattcatatattattatatgcacaaccctacgcaaccactgaatcaaatcaccatattttataatgaaattaaccaccatacaaacacatatatatgagaaatgttaaattttattaagtatgagttttacacaatttaatttaataactattaagaataatcactaactatttgtaaagtgtaattaggcaccactatagtacatatataatcatatctttatatatataatgataatgttatttaatagaaattattagtttaacaatttcaaattatttttttgtcaaaattaataattaaaactttggctgttaaatatatcatagaatttaatttaaat

SEQ ID NO: 61538 - DNA, 593 bp, Cannabis sativa
  modified_base (100)..(140): a, c, t, g, unknown or other
ttagagatcttagtggaaggagacattaattccgctgcatcaatgtaagggttttttaactttatttgtgttgattttatcgttttaaaaagttcatatnnnnnnnnnnnnnnnnnnnnnnnnnnnnnnnnnnnnnnnnnctggtaaaataaatcccaacagatacaagtattaaggaataacctaaggtaaactaaaagcgaagggtgctttggggctgctgttcttgtggagtaattaagataattcttgatgtaactcccttttcatacgaagcaccgtaaacataaaccttccaaagtggcaattctttgactggctcgtctggtaggtcattcatcctagaacattttactgtaaaattggctagggcctaccccttgattgaaacctagggctaatactggatatcaaactggctaagttccagagcttacttcaagaatctcccagatgatttcagtttttatagcacttcgtggagaggatgattagttaataccttgatgatgtggggtttaaagtaggatcttagctttctagaggtgattagcaagaaaaaggataatttttttatcatgggatacctagac

SEQ ID NO: 61539 - DNA, 862 bp, Cannabis sativa
tttctatgtacgacttcaaggacagtgccatgtgaacttcaaatgcctatgtcccttggaaatcccaaaactcagtccacctgccttcacagccatattcatctatatatatatatatatacaccatctctcatttgcctctaaacaattgcgtacaaccaagttattgttgttgtgagaaacactcaaacattccctaaagacatagcattggtagatttctgctaacgccaagaagagtcttcgcaggattgaagtgtatgttggagaagaagagatgattggtacttgaatgagccttcttttcaacaactactgatctcacttctaacttagaattcaatattgtagattatagaacaaacataatttagcagagaaatccattgacctttaataactactcagtattaattacatattactattaagtatttagtaattaaatagcgggtcccgtataatttaagaaaataagttttagagaatatcgctgagactaattttcaaaagataattcaattgaaattatattatgactctacttaggttaaggtttttacgtacatacattaattctcctctatatacagaggttaggctatgtatgtaccttttcttttatatatgtacgtattctcataaaaaaaataattaaaaaaagagctgaaataataataatggatcaattacctaacgacctacttgttaagattttctccattaatataaaggtgaaaaccattcttataagtgtaaggtaattagtatgtacaatggcgtcaaattaataatagacgaaagctattatggagtccaattggcagagaatctcttaaagaaaagcgttgatgaagaaagc

SEQ ID NO: 61540 - DNA, 1073 bp, Cannabis sativa
tgaactttaagtacaaacctaacctacctacctaagatcagacatcgctaatatttttaacatttttccttatttctttctcaatctttataaatatataagattaattaaattagagataattttatttattaaataccaaatatcataacatgatgataatactatattatttttattttagttaatacaccactatattccatttcattactaaactaaacaaaagaatatcttattacaatgttccactaacatcataatactattcttattattagaatttatatatataatacgtttactaaattataattgtaataagaataaatgaaatgaaatattaaaaaaatgaggatgcatgtcactctcatttatgattaataaaatgtcattatttttttttttatgaattatcattaatttattgaaaaatactaaaaaagactagtataaatatatgtcatatcactatcactattaatacaattaagcctgaccttaaatataagcgagttaggaattcaaacgaaaattttccccttttaaaattatatatttttttttactaattttgaaaaataccatattttcttttaaataaaggcaaaaaaaaaatatgttttcatagcccattatattttaaggctagccctacaattaaatatcaagtcacacgtactttaatataatagcgaatatcgctaaccactaaggcaacaccttttagtagaactacatactactgatgcctaataacaatattctaattaattacatttgttactatttctataccattctaattctattaaagtcaatataaaaaaactacttttagtgacaaactttcagtcacaacataaattttttgtgatgaaatgtaatttttagtcacaataaaaattgactagtgacaaaaacatagtatttaaatataaattatcattaatttaactttagtttgtgactaaagatacatctagttgcaactaattattattttgtaactaataccttcaattacagacctttaattaaggaataattacataaggcactattttttgtaa

SEQ ID NO: 61541 - DNA, 737 bp, Cannabis sativa
tatatatttatatttttatatataaatatgtgtaaaataattataacccttcattatcagaatggtcacttataaaattgtaagttatagtgttatattagtaaacacatctttaatcaagaaaaattaaaacacttaataaaatattaagaaataactctttctatttttggcttatattcttttattctaagagtacgaaaatgacccgtacgttaatatacataaatatgtatttataaaaatatattttctgtggatctattaataatgagctgtactacacattttttttttcataaaaaaataattatgtatcatttttttttataatcattcatactttatatattaaatattatttaaacattattatgtgcctaataaaacaatatatagtcgtattatttggtttcttataaattgagatgttgactctttgtatttttcgtacttataattgttactagttcgttaaaacgtgcttaaattttttataattttattaaatttgtaatgtacaattaaaattaaaggaaaaattaatttgattaaaataaaaatttatttggaaattaaaattaagattaaaggagattaatttagttcaaattcaaattaagaaatcgttgcacagttatcagtttcttcctcttcaaatatttttataaattatttttaaaatatactcttcaaatataaggtttgtatacgattttttaatttaaaaaaagatt

SEQ ID NO: 61542 - DNA, 749 bp, Cannabis sativa
tatccatagtggttctcattgaatcacaagccaacacaacttggcagcaactacagagtactctcctcagtttcgatggaaggcttgagagactcaacagcatttctgttaacagtaagcttgtaggaaatgcctcagccaactttgcacagaaaccatcaggatctcatgttaacaacaacacagcaagtcaaagaaggttcagttctaatcagcaaagtggaagaggacaacaacagaccacaggacagttcagaggtggtggatatagaggcaggggtcgtggaggaaggaacaatggctctaaaccaacttgccaagtctgtggcaagtatggccactcagcagccatttgttacaaccgatatgatgagagttacatgggaaatcagcctaacactggtggaggacaagacaaacagttatcggcactcatagcaacccctgaaatgctcaacgatgacaactggtatgcagatagtggtgccagcaatcatttaacctcagatccagaaaagatgaaagctaagtctgaatatgatggtaaggaattagttaccattggtgatggcagccaactagctatttgtcatattggtacagggtctatacagaccaatacacttaaacctttgatgctgaataatgtgttgcatgtgcctaacatttctaagaacttgattagtgtttcaaagctaacagccgataataatgtatctatggaattttttcctgatttttgttgtgtg

SEQ ID NO: 61543 - DNA, 569 bp, Cannabis sativa
ttgattggtttatcaactattcaaaatcttttcttgagttcaaatagaatcaatggttcaataggtaaagaaattgagaatctttcaaacttgaattttatggatgtgtcaaataacaatatgtcagggatcataccgacccaatttgtctacttatcatacttagcctacttgaatctttccaacaataatttcagaggtccaatagaagatgccctcgtcaataaattatctacaaaaacatctagacatgaatatctaccttgtttattggaaataaagatttgtgttgcgataccataagtgtctttccaaattgcccaagatctttccggagtaaaaagaatattacaatagttaaaattcttcttctcatcatcatctcaatcatcttctttttcaccgggtttgtcgtgattctgaaacgttgccttacaacaagaaatgttcagcctgaagcaaaatcaagtacaagaaatggcgatatattttcaatctggaattttgatggaaaaattgcgtttgaagatatcatcaaggcaacagaagaatttgacatcaggtattgc

SEQ ID NO: 61544 - DNA, 549 bp, Cannabis sativa
taccacttgtataaaaaaaaatagtaacgagtgtcgagtaccataaaatatcggaggttttattctttcttctctgaccaagcccgtcggctttccttggactttaggtacgacttggtcggggttgtgttttactactgcgattagtcttctctttataatatggttttgagtgttttagtcttgtctctgtgacatgattttgagtgttttagtcttatttgtgtgaatttttttttctgttgttggttcttctttgttcttcgatggttcaccatcaaatcattattagttgttagtaataacaagttctctacgactgaacgagctattaatattgtagttacataccttacacaatagttgagtgctcaagctacgaaattgaatgaacttgatgcaaccgttgttactgttgtattttcgaaatagtaaatgaaacataatataggcattcttaatggttaattatgatgtttcaatttttttatccgatattattttaatttttttgtcaaaacgatatgagaattagacagttgattattt

SEQ ID NO: 61545 - DNA, 1315 bp, Cannabis sativa
ggagtataagtaacagtgtcatcagcttcttcatcagaaggaatggcaactgccttttcaacagcaacacttggattggattctgagacctgaaaaaataaaattagaaaaatagaaaaataaaaagttggaaaacaaacataaaacggtcaagcaactaaaataaaacaaattttaccaagaaagaatataaactacacttacattgattttaccaacatcttctgaaccagccaacacaacttgctcatcatcaatttcaagctggtttaaaccatcgaaaaaatcatctccctttaaactagactctttggcttaacattctcaacatccttaaccctctcttcactgcctgcaacaacctcacattgattcacatcagcagcaagaacatcactaacaaccttatcaactccagcaacaccatcaccatctttacccaactcatcaccatcatcgaagtcggaatcaatatattctggatcaggtaatcccttgtcatcatcctcagcattatcatcatcatcatcagaatcttgggttaccaactcatcagatgacttaacctggatcaaacaacactattgcaacaaaaataaaataggaaaaaaactaataataacagcaataaaaaaataaaacaagaacagtataaataaatacctcatcagaaggtcgacgatcaatgacattaactttttcttgaatatccttaattacagtcatgacagacttgaaattaaggtcaacaaaacacctcaagaaaacaaattctttggccaaggattcttgattggaaatgaccaactccaacttagatttcaacaattcaatgtcctctgaatcagactttttagaagatgaaccactctcgaatgttttcttagatgtactgcgatcatcaataaattcatctaaaaataagccttccaattgcaacttcgacctctcctcatcagtagaacgaatgtttttaatcttcaactgaaaaacataatcaaaacaattaaagaaaaaaatgttaataaatcagcacaaaacaataataaaacaataaagaaattaaaaatcaccttgttcaacagcaaatcaaaaaatcttgccctccaagtctctaaacgttggatttttggtcacaacattattggtccaattcagaattcttggaatcctagatgaaactcttttgcaaaatgtgtttaccatcacaagataacattcataaaactaaacaataaacacccaaggacaacccaacgctctataccaaccatcataggactgacctcctttctcctcttttttatttttcatt

SEQ ID NO: 61546 - DNA, 559 bp, Cannabis sativa
actttgtaaaaaatatgcttggatagtgtgctaaatttgccacataatcacaatacattatgatgcaaaatttgtatcataataaatttataatttttattattttataattatatttaggtctagcattaaataataggtctatcaatgctctcaatgggaaggagtctcattggacgcttgagaagtatgtctcattttgtattaagtattctccatcttttattagttgtaattttatgaatgttagcagatcttgtaactttatggcccataatgtggctaagtgggcttttacccaccgaatgtacgactacattccgacctcctctgttctggagaacttgctttgtaatgaccgataggtttaattctgtggtgtttaatgaatgaatacgcttatttaaaaaaaaaaagaaaaatttaattaaatattaaatttcgtatatagtttcacaataggatatatacggcgagatcgtcttaacatttacaattgttacacatatgatactaataaaaaaatgacggcaaaagtaccttatcttacgattttgtt

SEQ ID NO: 61547 - DNA, 1753 bp, Cannabis sativa
gaagagagaccaccgaccactgtcaaattgtctgaagagaggtggttagggtgagttctcaccgtcgtctgaagaggagatgcgactgaagagattcacaaagacgtgaatagtgtgaggctgaatcgtctgaagagagaaggctgaggattttgcgtattttagttttaggggtttcactttttttgcgtcggttattaactctcactattgtattttgtgttattcttaaaagctcgctaatacaatacatgagttttaataacagacgcaaaatgaaacataaatttttgaatttcctacttatttttgtcggtttagtttttagcgtcatatacctaaaagacacaaataacatattattagtgtcatttttaaagtgacgccccaattatttgagtactattcacgtcggtcaatgctactgttcatagcattgaccgacataaatagtgtattttgtagtagtgttaagaagcgcgggcaccaacgacggatttaatgggtaagtgattctcttgattatttttgttgttgattacaatatttagtttataatgttgttttgatatccgatctattagttgttgctgttttatgcaattttttgtgtggaaatatttatttttaaatattttttgcatttatctggtttctggtttttttcgtttaatctgatggtgcccgataggggtctgatggtcagttcagattctaggttagggaagatgtttatatagatctgatggtggatccgatataggtctgatagtttagagggtctgatataggtccgatggtgggtttgatataggttagatagtttaaggggcccgatataggaccaacaatgtgtccaatggctaacttgattataggtttaatggccaggtccaaagttatggacgattatgtccaattctctggtctgatgcttattgttgaaatttatcagatgtgatctgatatttgtccgatatagactcgatggtgtccaatatttaaccagtttatggctttttgagaactttttttatcacttttctgatagagttttgctttaattttttttttgttttttattttttatgtctttggaggacaagttcaactattttttcattcattatgtatgatggtgttgagcttgagggtataaattagatttataaccgagctaaaaatttgacattcgagattgatacaaaatgtaacctactcacatttgattgatcttttgtacgaaaaaatcgatgttgaaaaagtgtagtatgacttgaaattggaagtgaattttgaaattggaagtgaattacaagtacataattacaagtacatgaaaggcttacaagtacatgaaaggcttaatgcatcgccctaaagttattgaaaatgataagcgcctaaggttatttttggctatgcttgcgaagaagccagatgaatttactattggaacttattttaccgcgatctagatttactaacatgtatgtttaattaacaccctaaatatgaattctctaaaacaataaaataaacacatataaaatttagaaaacttacattgatggcagcagaataataatggctccttctgctcagatctctcacccttgttcttttctgtcacagagtaatactaacatctaagcctggatctccttctccttcagtttgattaatcaccgtcttccgcactatgattgagtacttgacttgctatatgtgggtatagtactatatcactaaa

SEQ ID NO: 61548 - DNA, 1385 bp, Cannabis sativa
  modified_base (1356)..(1359): a, c, t, g, unknown or other
atctgagtaaacaattttaaatgttgaagtagttttgggtactgaacttttaaaaaacatactatgtaacttccttagttgacaaggattacaaaaaggtagatcataatagtgaccagctgacttttatgcttttcgtgacttggtttaagacttgttttgatggatgaccaagtctgcagtgccaaagatgagctgccttatttgttgtagaaagcttctgacggttgtatagttgagtactgactttatttatctgagattgagcaggtctctttgtagttgagagattcatgtggtataagcctcttttaatggtaacctttagaagagcttaccccatagtcttgtccttgacaacagatgaagaagaatcaaattgtaaaacaatattattgtcttgtgtcactctagagatgcttggatttattttttataattgcagaagcatgcaaaatatttgttaattctaaagttttatcagagacaaatgttttaattgatttttgaaccaattttagtgattgggatagaggagccattgtcaacatttattttgcctttccctttgtaatctgcaacttgagtcatttaatttgcacatcagatgtcatgtggtgtgtggttccactatcgacttacaaaccagctacatatcattgttgttggtgccaataagagagttgtggagcttcctcactggaattggctgatgaattatttgggaattgttatgtttcttgaacaattatcaaatctgtgataacatttgagtgctacatgacctagtttaccatagatttggcacataggtcgatttacacgaccttttctagtagaattacctcttccacgattgctcgagccatgattggagttatttccccaagattccccctgctttatgaaccccctcttatgttgagttgaggaaattagcttgagcaatgtcaagatttgaagtcaagatcttctccaatcacatttcttagttttgtaacatgaattggaatttctacaagggagcatcagttgtggaagtcaagaacaccattgccaagtccaccaagaatgtacatgcataatgcttaattcagagagagattggtctgatactgcaagagcatcaccgtgattcttcattttgagaatgcattcattgattagaaactcaaaatttggattagaaatattcatgctaggaataaaacaagggggaggaggtgtagttactagaaggatacttttaagattgtgtgcatgaacgactaaaagaacattaattgattgctagtatagatagtttgtgcaatccaaactaatggtgattggtaggaggtgttgggttttatgccnnnnataaaactctttacaatctgattagt

SEQ ID NO: 61549 - DNA, 1132 bp, Cannabis sativa
  modified_base (140)..(140): a, c, t, g, unknown or other
ttgtcggacctgaaaatatttttacagggttgtcggacctgaaaatatttttattctacatataactcatattacattcatacatgctatataaatctttgtaatttataaattacacttatttactcacttatagcaanatttaaattttatgctgaaatagattagtaggatcataatcccacttattacctaattaacacataatataaatataaactctaattatttaacattagacttatcgggatattacatgcgtactatcagtgacctttgtctgagtcgtgtttcctgtgtttgattctttcttaggcatttcattctcattaaaaatcacatcagtgcttatgatgcattttctgaaaccatcttctaagcaccatagcttgtacccttttatccatcaaggtattcaataaaacaacatttcaaagcccttggctctagcttgtcttgtcttatacgagcataggcagtacacccaatgacccttaagtgatcaactcatagagcatgtcctgtccactgttcttgaggagttttgaaattcaatgctacagaggggaatctattgatgagatagtagacagtcttcaaggcttctccccaaaactattttcccagaccaacaactgccagcatataactcaccctttctatcaaagttttgttcattctttctgctgtgccattttgttggggtgtcttgataatagttttgtgccttcttatccctatctcttggcaatacctgttgaactcattcgagcaaaactccaaaccattgttagttctcaacaatttaattttcttatttgtttggttttctatcaaggttttccaattgacaaatgtgttataagagtcatttttttactgagtaagaaaatccaaaccttagtcatccactttactcagaaaatagcttgctccaccaattgtttttattctagatgcaccccatagatcaaagtgaaggtaatccagtattgcctttgttgtatgcctagcttttatgaatttcaacctacgacttttaccataaacacagttttcacaaaattctaatttcttaccaagttcacctttgagtatgccttgtttctcaagctcatgtagtcctttctca

SEQ ID NO: 61550 - DNA, 734 bp, Cannabis sativa
cttcgtgagccccctcgaaggtggagaactccactgttgctatcgcatccacagtcctcttgaaaatatgaataccaacgattccatactgactaaacaatgtctccacgccttcattttctacctctgaggaaaatttttgacatacaatctccgcataagagattcaagcttgtccttactctgtaaaagagaagtgaataaacttagtaaaacaaaacaaaaaacaaacagagattctctctaaagtatacataattatcaaaaaattaagcaactctaccccattgcggtaggccttcaccctgtacacccaattgttgtccaacagtagcctatctggtctctatatcataatttaaaatgattaactaagattcaaatttcaaaatatattaaaaacaaacaagaaaacttacccaggaagatgagtaggcagctcgtccatccgttcaaacttaagagtacagcccctctctagattatgttccctagcgaacggcccccaagtcgtcttccaaaagaaaaatgttgcattaaaactgttagcaatggaatcctccctaagccttaaaaccatttcactcatttgttctccgtcatacaagtagactggtctgaatttgccgaccatgcttccacgaaactcaccggatattttggcaggaatagtgagagaatccaaatccgataccgtaagttccacccgaaactgctttaccggagccaccatt

SEQ ID NO: 61551 - DNA, 995 bp, Cannabis sativa
accaccaaaattttagattagggggttagttgcaaaaacatatccactttaggaggttttgccgcaaataaccctaaataatacagtgctttgaaaagaaaaaaatattaattatttattggttgaattttaaggaaattagtaaagttggaagagcaatttgtagtaaaatccttttatctttaaatttttatatgcttaattcttttattttttttagtagcactgttaagtttttttttctttttttttcaaatttaacaggtcagttaaatattaacgttaaataataactatcaattagataactaatgtatacaactatgtatatataacagtaaaacttcgaaatcggtagtacttcagttggtacttaactttaaattaagttggaataataatttctcaacccaaaatcagtaaaattatccttccgagtgagtccgttcttgttttttctcttttgggtgtccccaacaacaacaacaaccatggcagcgttgctttcagctgcagctccaccaccatcatcaacatttctggtcaatgcttcatttccatgttcttcatccaaacccacttcgctttcttgggcatcttcatttcccaaactcggtttatccttcaactctatcacaacccctcttaaacctccttccaacctctacatggtattttcttttcttttctcttctgaattttgccaaacatttggaaattttcaattcaaacaactaagttattctttttcttgaattctgatgatgggattgtttgcatttggctgcatcttccccaactcgatacaccagtattcccttttttatagtatgattgaatgtagctaaggtgtttgctaaaatgactaggttaataggaacaagatattatgctattttgacaatggataaaatcactttgttagaaattgtcactttttaaataagatgccaagattcttttctgactttcaaaaatggcatctgaagaattgt

SEQ ID NO: 61552 - DNA, 2104 bp, Cannabis sativa
ttttttttttttgaaagaatacttttattactaagcaacactaggcacatctgctattaataaagcagcagcacaagaaggtaacattttagtcattgtaatcgacttttgagtcattagactccacctagctaaactattagcaactttattacaaactctaggataaaaaataaaattcagctccttgaaatggttcttcccattgatggtatccttcataagctgcccccaatcagtaggaggaaatgaattattggcagcagctagaataagagtgatgcaatcagaaccaacccaagctttgttgatagaccaacgaacagcaagctgaactcccaaatgaattgcagcagcttcagccataggaacagtcatacagccgtggatgtacttaacttcagccaccaccaaatcaccagctgggtttctaataattgcacttagcccgcaccccaaatgacccaatttaagagaagcatcagtattaattagatgaaaatcagaaggggggggctgccatgaaacagtcgacttattgtgaacaagaagagggagttgctgctgttgtccaagctgataagcaataaaatccacagcccatgatagccacagatggtccgcggggtgtttttgttgaaaaacaaagttgttgcgtcgctgccaaatcaaccaagagaaaccaataaaccgaagcagctcttccttttccatatgcttccacagccaccagagaaagtcatcagcagctaacaccgttgtaggcataagttgagaaaatcctagttgttcccaaaggccttgaacactaggacacccccatagagcatgatagatatcttcatgttgacttttacaccaatcacaaatggtatttaactcaattcctctttttttcaacactgtttttgcaggaatccaattgttgaaaactttccaaatgaagtttttcattttaggagtgagtttagagccccacacaaatttccaccaagcttttgtagtgtcattgtttgaacaggctgctaactccggatcttgaaatcttaatttgtaaccactagcgaccgagtattggccattgtttgttaagctccaagtgatccaatccgacttatgaattgagggaataatacccagaacccaagggatgtcatccttgtgaaaccaactacttatttcattagttttccactctccctttgctgtcaacagagagcttattttgacttcttcgggaatttgaatcttcgtgcggaggtgaaaaggaatatttcttggaagccaaggatcttcattgatgcgtatagtccgaccattccccacacaccatctataacctttcacaatgagatctctaccccattagaataccacgcccaaaccgaggacccaaaatgacccaatttggcttcgaaaaaattttcgtttggaaagtagagagctttaagtactcgggctagaagacaattcggttgttgaaggatcttccatccttgtttggctaagagggcttggttaaagtcttctaaatcacggaaccccattccaccattctcttttagtttgcaaagtttcgaccattttccccaatgaatcttgtggttattagatgttgatccccaccaaaaacgagcaatcaagctttctatatcatggatgattccttttgtaattcggaaacaactcatgacatagcaagggagagcttggatgaccgctttgatgagaatttcttttccagcttgagaaaagagaccccttttccaaccttgaagtttggcttcaactttctctctaacttttccaaaaatctgcttcttattctttcctataaacgtgggcatgccaagatactttgtatggtttgtaaccaaggaaacccccatacttgtggctaagctattagccaaagattctccaatcttactacccacacacatctctgttttctccatattgatgcattgacccgataagattgaataagtctcaaggatagattttagagtagagccttcatttatagttgcatcaaggaaaataagactatcatcggcgaataagagatgagataatttttggtccatatccccgaatctta

SEQ ID NO: 61553 - DNA, 1162 bp, Cannabis sativa
caattaattactttacttttataaatgatgtcatttttttttaccttttataaaggtttttgagttttatagaataaataatttacggtgtaaatacacgtttagatcagttgcaaattaatactaaggttgaccattagtattatcgtgttatgtttgtgtcgacacatttatgacacgacatgtttatagtgaatacgaacatgacacgattattattcgtgtcaagacctcaaacacgaacacgagacaatttcttaagtcacacgataacacgttcaataaacgtttcatgacacaaacccaaaaataatactttcaagttaagcatgttgacccgaaaaatgacacaatcccaattttgacacgaaattaaatgtgtcacccaaacccttatattttgtatcattttcgagtcgtatcacaaatcactagccctaaatatagtttaattttttacgataacaatacctaacttatatttctagaatttctgtaggtatctagtcattaagtgtaaagttattattcgcgtgttattttcttattgatatatttaaattaatttttaaatgaaaaataaaaattaaataacccgaaccaatcagggactgctacttagctattgacttgacacttaatggtcaggtacctacagaaattttaaaaatataatttaagtattattactgtcaaaaataaaacttaaatatttatctacaatcaaaaattaaatttaaatatttatgttactaattacatttaatgtttgattttttaaaacttaattaattcttttctctttcataaattataattttaaaaactttaattagatccttattattatctgtcaagcatatttcttgttttttttttcattactacacataaaaaataataaaataaaaattacttggttaaataattttcaattattattctctttaattaattaatgagcattaattaattgatcttattttttattttttttttaaaaaaagacagaaagagaaataaaagaccattccactaatataaaaatatattaacttaacttattataattacccattcaaaaaaaaataaaaaaacttattacaattgcaataaataaaattaaaacatactgggtttatattagattatatattatatt

SEQ ID NO: 61554 - DNA, 666 bp, Cannabis sativa
aactcatagcagtaggtctataacaattggatacacttttctttaagccttcttcttttgatgcttttgaccattcttctagaacatataagccatctttaagggtccccttgaacagcactgtccctatttgattgtccttgacaaagcaacatgttttgtgagattcaagaaacgcaagattatcattagtgagctgagatacactgaccaagttttttgttattgcaggaacatgaagaacaaaatttagattaagatgagtattattactagtaggtaaagtagctaggccaatgttatagataaaaagtttcttaccgtctccaattgcaaggccttctgaatcaggataagccacagtggagtcaaggttttcaagaccatttgtcacgtgattagaggcaccggtatccacaaaccaacctgagtcgtctccaaaatcaggaagaaaagaagtggcaaaagcttgaggatcataatcgagtatatgatctgtcatgtaagcacggggagtagaattattggtggctgtagatgaactagcagatcctggtttgggagtgacccaatttttgtcaaatcggtaatgacacactggtgtaggttgtccataacgaagacaaaggttgcacaaagggcgattttgtggattctggccacaga

SEQ ID NO: 61555 - DNA, 1503 bp, Cannabis sativa
  modified_base (235)..(240): a, c, t, g, unknown or other
tatatatatatatatattagatgttaaattttaacacattcgatccgatctaattaatttcagtcatctaattagattagatcggtcttatatatttatttatttaattttgagttaatttaatattttaggcctattattttttagatcagatacatctaatattttaagtctggattgaattattgaattcatccattccaaaaaaaatagtaaaattttaatgttaattttnnnnnntacatatatattttatgtataacaatataaaatgtaattactcatcctaactaaacaaaaatactaattagttcgattggatgttggatgcattggatttttagacacccatccaacatccaatccgatccaattgaatattcaaaaataacatcaaatccaatccgatgacaatttgatatttactgtttgacagtcagtgatcactggattatgcacacaacatgactatgaatagttttttcatacaaattttacactaaatattaacttttttccaattttacatttataatttaacgaaatttttatatttatattttttttatataatttttttttttattttttaattattaaagtttaaagaagtttttttttttcaacttctttatagttgactttttttcctttctttctctttctttaagttttccttttttatttcttttttctaattttctctccttttcatttttttttcaaactatttttttttatctttgtatgtatatataaaaatatataataaatgtagtatttttatatctcctttttttaacacttgctctctcacaaattttaatttattattactttttttaaaaaataaaatacaaactcttattctgtttttgtctcttttttattttttttacttttctcactttaactattttaaactgttttctttatgttgtgaatgaacgcttcggcaaacacattaaacagaataatgatcaatgaaaccaattcaacacaatgcactaatgtaacaacaaacataaactagcaacaagaacattaaacacacacaaagaacacaagaacttaacgaggttcgaacaagataatattttctgagttctcttgaatcttccatcttgagagtgtatagtttcttcttcagctatagagtttgttagcaagggatttcttcaagtaaattgaggcaagtttctcccataatcccaaagttgtttcctcatttgacacttctctacacgacttcatctcccaagctcagcaggatggcactatgtgcttttgtttcgatttctttaatcttcttcttgtcatctcccaactcctttaattcttccttgttaatggcttggtatacaccctgatgaaccaaaaatgctttcattttaatcctccacaagtcaaagtcattggctgaattgaacttgtctacttcaaagcgtgcggaagccatggatcactttctttattctattcatgcttcaagaaacctgagct

SEQ ID NO: 61556 - DNA, 1474 bp, Cannabis sativa
ggtggttcctaacttttgtaaaaacaaaattttatgggaacaagctcgagtctattttttttctccaaaatctacatttgtttaagtaaacataatattttatttagtttaattaactttttgttttttcaaaataattttatatttttactgaatttttaattatttttcttcttttttaagatatgagtttataaatataaataagtctgattttcttcaaaaaatcttagtttgtttaaattattggttgaattttcaataatttttgtttgattttttaagatacgtgtttatatataaaattaagttttgaaatatatttttaggaataaattaggtttttttaagtaaacttaatatttttttaattaatttaatatttttatcaggtttttttaataaattttattaattttctcatgattaatagggatattataatttttaaaattaatttcttttttataaaagcaggcaaaattttgtattagtcaaagttcaaagggtaaagatactaacttttaatggtaaaagaaatagaacttaacatgaatgagctcacctatacaaagtcctaccagtaatcaatctatgagagtgaaaaacaaagacttgtaaaagctacaaagtctttcatatgaccctttatttatagggaaaaaacccaaagaagcaattgaaaatacagttgaaaataaccgaaaaataaagaacaagaaccgttattacaacttgaaactacaactcacaacccaggctaagtaacaaaattagttacactatcatcccccgtcaagcgaaagggtgatacacacacttgaagcttggtcttgaggtaattgaacctgtcagtcgacaacaacttggtcaaggtatcagctatttgatcaattgaaggaacatagcgcacctcaagctgctttgccaaaatttggtcccgaattaagtagagttctatctcaatatgcttagagcgggcatgaaaaacttggttggcagcaagggaggcagcaccttggttgtctacccaaattattggtgaagagggtaagtgaatattaagttcttttagtacagagcacaaccattttatctcacaggctgtgttggcaagctttctgaattcactttcggtgattgagcggggcaacaacttgttgctttttggcagaccatgagatcaaattacctccaaagtaaacaacataacctcccgtagaatgcctatcatcagggcagctagcccaatcagcataagaataagcttataaacatagcctggctgctggtctgatatgaagtccctcatgtaaagttcctttatgataccaaaaaggtctctttgtaagcttcccaatgggttgttgtaggggcgtgaataaactgacttaacctattgatgataaaagccacatctggcctagttaaagtcaagtattgaagcgcccctaatgtgttggaaattatttta

SEQ ID NO: 61557 - DNA, 865 bp, Cannabis sativa
aatgaattatattagcaaaataattatcaataaaaatataactttatcttataaacaagtataaaagagaaactaagggggcgtttggtataaagggttcaaaataatctgattaagggaaatattatgaaggagaatatgattattagtaaatttattactatgtttggttatccatggtaatatttaattagattactgttaattaaattatagtgttcgattaagcataagaatcttatatactattttagaatagtaaaataaaataaaataataattattattatatctcttttatgttaattataaataaaataaaattattatttgtaaaaaaaatatatatttattaattaataaatttaatttcattgtatttgtgattaactgaaatgaataatggttcacatatattttttatacaatatttttatatttatttatataaaattattatagcgtgaatacacataaatgaatgttatatgatttttttttttataaacgtcatattttttcttttaaaataaataatcttaatattttattttatttaaatttattatttgactttttatttaataaaaattctcatcaaatgttcaaataactgatgtaatgtttgaattcaaccttttttgaagggattaacattatacattttgagggtagttggaatactacggtaaaagtattaaattacttaaaaaatctaaaacttcataacaaatagggtaatcattgagattacctttcctcccctcacattaatccattctaaacaacccctaagtgttatcaaagttttcattaataagacacgtggcatgatcaggggaagaatatgttggaaatattttac

SEQ ID NO: 61558 - DNA, 629 bp, Cannabis sativa
  modified_base (508)..(511): a, c, t, g, unknown or other
agttgagcttccaatcgattatacgattctgagagttggcccacttaattctctaaagttttcaatgtggcttcagttatttgctagaaccttaaagaactagtagccatggcattaataagatcttcagtggaaagattgggatttgctagtggggtaccttgtggtgcttgattttgtcttggtacaaaattctattgcgaccgttattgataattgaaaccaggtttggcaggtaaagattactggacattttgttgattgtcgtagcaaagattcagatgattcctccaattaggtgtataagttcgtgagtgtgggtcatagagatggcttaattgaccaggaaaattacccattacgttcacatcttcagtctcctcttcaaatagtgttggacaggtatcagtagtatgtctcacaatctgacaaatttcacatgcctcacctgttggcctaaagcaagttgttgtaccacgaaggttaattgagctatttgctgactaannnngttctcaatgggttcgctcacttcattaacctgtcgtgatgttgaagcaaggtctcgacaaatgccaaattgttgtaaattggcagccatgtttaagattagagttctggcttctgca

SEQ ID NO: 61559 - DNA, 670 bp, Cannabis sativa
gtcaaacatctcacaaccattataattattacttatttttagcaaaatataatacctgggactgggagtgttgaacttgaacacacagcacaacacaacctaaaacggacacaaattgaagactatttgattcaatattcaataaagcttttaaacaattaggacagaagagaagagaaaacagtaatacctatatattctcgccatcgacagtgatatttggaatgtgagcaataatggacaagtacggatgcatagatcagaaagagaagcgggtagttctttcggcaagcatcggagataatgacagctttcaatcctcagtttcttaaggcgaggaaataccccaccttcgataaatgaccactcttccagcttatccaaacttaaaaattccaaggtctccaaagatctaaagaataaaggctttgtttgaacaataaaactcggaatttattctcaccaccccaccacaacaactaatgaaaagagatctttaagagaaggcagctgtcccaacgacggcaagaaggtgcaattagaacaccatgtaatggtcaggcttactaaattagacaaacagcgatcatctcccatccaatttgggaaactgttgccactatagtactctatctttagtttctttaagtttggatgaggctggagggca

SEQ ID NO: 61560 - DNA, 945 bp, Cannabis sativa
aatcaggagaagttgggtggtagagaaagaagctgggtttctatggaaggatttcgaaatgccatagatatttatggtttgatagacttttgtgatattaaaaaagaatttatctagagtaagacataataaagatgcacttttgaagagattggactgaggtttgtgcaacgcatggtggcttcgctcttttcctaatgctaaaatgtcagttcttgattggtgtaactcttatcataaagctttggtggtggatggctggaattcaaaaaccgataataagtgtggtatgattaaaagaaatactagatttcactttcaaatggaaaaaaaataattcaatttaagtacttaaatgttataaacttaataagttatcaaaaaataaattaagtacttaactgatacaaacataatattttagatactttcattgttaaaaaaataattagagtacttaaatattacaaacgtaataatttaagtactttcgccacaaatattccaatatattataaatatttttccatataaaaaattatgagataatcactcctaaatgatttcttttatcttattctttgttttgttataatttagtttaatttttgaaatgttatcttattttttatccataaaaataaaatttaagtttaccattttgttttttttaaaaaaatcttatgtgtttagtagaaagaagagagagtaccatgaatagagaaattggaaaagatggagaggagatgagaataagagaataaaagaataattgttctccttgtgttgtttggtattaggtataaagtgagaatgatggagagaaaattaattaataaaactacaatattatctttttgaatatcgatatttattacattttaaataataattttgtaatttacacaatttattttgtttttttctcctctcattttctctcta

SEQ ID NO: 61561 - DNA, 618 bp, Cannabis sativa
ataatatcgaacaccacatcgtcctataacggacacataagcaatctataaaaaataaaaaaaaatagcaaaagaaaatccaacaaataatcgggtcagccatcgtccctatatcgagcctaatcgggcgtaatcccatatcacatgggcatcgagtccacatcggcctagcattgggcctttgtcctcaacatctaacacatatcacaacacacacacatcgggcctaaatcgtccctacatcggacatgcatcagacctgacctaaaaactaggtttctcgccaaaagacatatatatccgaccccaattaaaccctaaatctaatccaaacttaccaaatctaaacaaaacttagatttcattatacacaaagaaagattcaatctttaacactaaaatcacaaagaaactcagtaaaaaaactaaaaaacataacacaaactcacctttgacatttttgacagtggtggtccgcgcgtcgagggtcgtaggtagggtctcaactttgattgttttagttggtctcgaggagctttgcctaaatgtctcgtgggtgggatgggtctgagttgggtcgattggggtctgtcgtgggtcgattggagtctgccattg

SEQ ID NO: 61562 - DNA, 1385 bp, Cannabis sativa
aacaaaagattttggagaagattcgtatgtcaagcagtttgctattaatattcttaattcctaacaaccaactctatacatatccatcagagcaacctgcaaaataaatatagaacacgaaattgtagagcaacgtaacaggaaaccgaattggagagcattttttttaatcaaaaaaggagatttcattaatcaaacaagcaaaattacacacaaaccagcagcctcaagataataaaatgctacattttacacaaaaatcaatgattctcctatcaataagcgaaattcttgcttttagcacctgtttaatcattctatcaacatgctcaatcaaatacactttttgttcaaaaatacaagtatttcagttccatactataaataaaccgctgctgccatagctgctgcagaaatgtcactaagtaaggaccaaggtcttttggtcatacagcaaaaagggggaaattttatattgtatattaaacgaatttggtgggtttaatgaaaaacaaaccttttggctacggggaggttgaagaaggcaaggttgatgtccttattagggttatcatcagaaataaaggtaggtctcaggtccatgacgaatctcttgcaagcgttcttcaaataaggttcgaatctgagatactcatcggagatagccttctggagaagattgctaaatgacatgacatgagagaaatcgacgaacatagtgttcgactcgttggctctcatgacttcaatctcagtttcgtaatacaactcaccagaaatcttaaagctgttggatagaattgatagaaatgttagaagaatcgaaagacacgaagggaaaaaaaaaagtaagaagaagaagaagtacctcttgagaaagtcgagaaagctggtttcgacacggacagccttctcgtcctccatgaatccaccggtcccgaaagcctccatagctaaggatcgtcttcgattgtgtgaggattttgaggtctgaagtgtgaggatttgagttttgagtttcagagagaaatgagtaaagggattcaacctgtttttcttcttcttctttatggcgccaaatctaacacctttttcccgccaaaaccagaccttatgggcctgaggcgtcattcccgccaacctatttttatgggccgttctttctaatgttttttatttcaagcccaataatttcatactcaggtttttttggggagtaatttcgaaaaataagaaatttaacaaaaaaaaaaatactaattttattcacaaaaatattaaatcttcataaatatgtaaactataaaagaggaaattataaattttatggatttttatgctttttgtgcaaaaatatggtgttttttcaaaaagattattttatg

SEQ ID NO: 61563 - DNA, 735 bp, Cannabis sativa
taaatattaaagaaattaacaaatttttaaatctaaccataatttaaaaaattaaaataatcaattttttaaatttaaaccaaaatatcgaaaaataataattacctattaaaaaataaatattattaatttagaatattgatatttaggtttaaatgataaaaaatattattataattagatattagggtttgaaaattgaaaaatccaaaatttgagaaaaaaattccacaaaattaaagttttggggtgtggctaccgaggacggctgcacgtgcagccaaggaaggctccacgcagccccgtctgcgcgcgcatgatgaaaaaaaagtagggtgtcatgggcgggaaacgtaggcgggtgcagggtcaggtgaggcgtgttgcagcctctcgtgtctaaagacacaggcgtgtcacagcttcaaacaacatctgtccccacacatgcgcgcgtcttgtccgaagctcctggtgcttgcgtgcaccaagcttcgacagccatggcatccaattttcaaaccaccataacttttctatttttaatcggaattgagttctgtaaaaatcaaaattgcttatttttcacaaggaatccaaataaaatattttcagaacaaaaataaaaatatattcatgaaaaaaattcgtaaaacacatacattcatcaaataatcacataaaccatcatgaaaccatcaaaatcaacacaaacatcattttaattcatatttc

SEQ ID NO: 61564 - DNA, 678 bp, Cannabis sativa
  modified_base (51)..(68): a, c, t, g, unknown or other
aatttggtacttgtcaaagttcgagaggtatgatttagtagatatcaaagnnnnnnnnnnnnnnnnnngtacataaacaatcactgaattagtaaaattacatgaaatcgaacaaaagtctttaaatccaacgatctcaataattccaagagaattttaacagtcaaaaaaattcaggggatatgattttgtacatgtcaaagtttaggaattttttttttaattagtctatttttttagtgtaatttttggtattgtggttggagtgaaaatagtttttgacatcaaatttggttatattgtgacaccaaatttaatgtatgggaccaaagatgctcttatgtacaagttcgtatgacactatgatccatccatcaatactgagtagggctggacatctgatcaaatctatcttttttttacttatccgatccaatctaattagtaattagatttgaaaaattatcattcgatccaatccaattagacctcaaaatccaatccaatccgatccaattactaattggattaaatcgatttttcaattgaatatccaattgcatacctaatttttaatatgatataacttaaaaatatgaagagaaaaataattaaaaactaaatatcaccttttatttaagtttaatatttcataaaaatatcattgttacaagtgta

SEQ ID NO: 61565 - DNA, 1131 bp, Cannabis sativa
  modified_base (61)..(62): a, c, t, g, unknown or other
aatattggggtccacaaataaattaattcacaaataatagtaaaataataaaaattagtgnnaattgcctttactaatccatatactagagcggtcattacatgtagagtgagggtttgtcagtaactgaatacacgacaatgtttgatcgtctggccaagttggcttcgagtattgtgccaacagacttcagcaaaaaggagaaatatctggcagatctaaatgtgaaaattagacatgacttggtgattactacaaatgaggcaatatcatatacggagatggttgagaaggctctacgagccaaaggtgcggttaagtttcttcaggagctccgagtgactccaagtgttggtgggacccccactcttcctactcttgtttatggtagggatggtggtaattccaccactgagcagaaaagaaaggataccctggcatctggtggttcgggacagagcaagcagttttgtgggaaccaaggcagaggtggacgctagggttattcttaccctgagtgcccacgttgtaagaaacatcatctgggtgagtgcaaccggaagacatgttttcagtgcagcatggtgggtcatttcaagaaagatttccctcaggcaaagaaagaagagtagaagccagaggaaaaacctgtaccttctcgggtgtttgccatcactcaagctgatgctgtagtcaatccttctgtggtaacaggtcagcttcttgtcagaaactcctattttactgtgttatttgactagggagctacacactcatatgtggagacacgggtaattaatctattgggtaggccttgtgattttattaaaagatggtttggaaccctgttgcctaccagggagttagttatctccaataggcgcattaggtctatgccggttaggattgaagatagggagttaagtgctgacctaatagagctgaaaataacagagtttgacatcatacttgggatggattttctatccaagtattcggccagcattgattgtaaggggaaaatgttaacttttcaggcggagggtgaagatccatttgtctatgttggatcagttcaggggtctcggatctcgattatttatgtgttaagggctagagatttactacata

SEQ ID NO: 61566 - DNA, 1129 bp, Cannabis sativa
acttacttctcttcagacctatctcggtcacataatacttaaacctcccatcccactgtctcagagattgtttcaaaccatatagagactttcacaacaagcacatccaatgttcctttccagcctcctcaaatatttttggctgtttcattagaattctttcatctagatctctatacaggaaggcattcttgacatctaactgttctagttcgaggtcttggcatgctacaagtgctaacagaattctaattgatttgtgcttaacaactaaagaaaatacatcattataattgactctttctgtctgagaaaatctttttgtaaccaaccttgctttataccaagcctcttgtacactcggaatgccttctttctataagtacacctatttacatctgatgactttaacgtctttcggcattggtatcaagtcccaagtttagatcttcttcaaagaatacatttcttctgacatagctctattctatttctttcaatttttgcttctcattacttgtgcatagctagtaggctcttcctccacaatgtgattaataacataaaatacgaatgctattagaccagcatgtccatatcaatacggagcctttacttctctacatgttctgtctctagctattttataattttctagattattgcttccagactcatcttctgaatctttaatttcgtgatctataggtgtttcagtctccattttttccagaggctccacctcaagctcaattccctgagcttcaatttcatttcggttagatccagctttcagcaggtttgtcaataaatcccgtaattcataaaatgccacatccattatatattttcttattccaagctttagacaccacagtctataacctttgactccttctggataccctaagaaaatacactttcaagatcttgcctcaagtttgtcttgcttgatgtgtacatagctaacacatccaaataccttcaagtgttcataacttgttagtttccctgaccacacctcatctagaatcttgaaatcagttctattgacagacatttatttatataataagttgtagtggacacaactttcgccctaaacacattgggcaatccaacactcaat

SEQ ID NO: 61567 - DNA, 905 bp, Cannabis sativa
tggaaaaatgagcaacaaaagcaactatggtggtaaggagaaggttacaataggtgatggtagtcaacttttcatatctcaagttggaaatagcacacttaatactatttcatattcctctttgcttctgaaaaatgttttatatgtccctaatattgccataagtgtgtctaagttgactcatgataataatgtctcaattgagttttctactggctcttgttgtgtgaaggatctaacagggaaggtgatactgagaggagttcttaaggatggactctactgaatccaagcctcatcagataacaccagccatgatatacatagcccaaaaccagcaagtttgtttattgctcaaactcaaccatccaaaaagaaaagtttattttccctaaaggatacctggcatcgaaggctaggacatccatctttgtctactttaaatcaagtttttaagttgtctaatgtaaaagtttcaatgaatgaaaaatcgtgtttttgtgatgcttgtcagtttgggaagtctcatgttttaccattcacaaattctaatagtagagccaaagctatcctagatgttgttcacatggatctttggggtccggcacctgttacctcacacacaaattataaatactacattcacttcattgaagatcacactaggtatacatggctatttcctttgaaacaaaagaatgatgctcttcctgccttcaaatagtttaaggcacttgttgagaataaatttgaaagaaaaattaaacggttaaggtccgattcaggtggagaataccaagccttctccgacttggtcaatgagtgtggaattgaattccaacactcatttccacacacattttcccaaaatggaagagcaaaaagaaaacatcgacatattgtcg

SEQ ID NO: 61568 - DNA, 1168 bp, Cannabis sativa
taataaacaactacataagtcatataggatacatattactttgttaaaacaaagatactacatggaccctctagtaagcctctataaaaaaatcaaagaaaccaatatccaatatagataaaaaagcatcttcgggaaaaaaaaaaaaaagaacacttactaccttaaaataaattaataattaactataaaaaattatataataaaataataataaaaaaaaacgtaggagcacaaatgcttctagaacaattttcaaaaatgaaatgtttacataacacaataacaaactttctttcattgtgattactcaattaaagtacttcatcttctgcaatttcttctaaaaattggccagcctattctatacgaatttcatcaatttcttgttttgaataaaaatttttcccattgcacatatagtagtatttgtaatatgatagaaaaaattttattatagtgtatatttttgaatgtgcaacatttcagcagtgcttgcaagatattaaagactggcttcattagaatgctggaagtaactctctgtctgttcttgatcgggggattagaagagaaaaattgagcagcttcacgaaactagttcttactgctgctatggcaagtctagtctaccatctttggagaatgagaaatagatgcctttaggacaaagaattacaagatacatctaaattgtgctaagaaattaaggctagagttattcaaagagttgaattattttggccaaaaaaaaattaagaatgatgataaagcttggttttttaccttgtaaattcagcattatatatgattttcatattgtacaaaatacaaaaatgtatagccgaataatttaggcctggattgggtgttattaggatgtaaacaaattttaagagctaatacactttcctgattcatcaaaaaaaaaaaaataatgatagaaaaaaaaatggataggagagagagggaggttaagaattatgaaattgtggctagaatgggtagttggaaaggctaagggttagggcttgagaacttcgacttcaatagaaaaattgttggaagaaaagagagaaaaattgaaaagaaaagaaagagaaaaatagttatggagaattagagagagataatatatgtgatagagaaatgggagaagtcaaacggt

SEQ ID NO: 61569 - DNA, 1408 bp, Cannabis sativa
tgccgatcagaattgaggatagggagttgactgctgacttgatagaattgggtttagcagattttgttactatacttagaatggatttcttatccaagtactcggctagtattgactgtaaacgaaagatggtgatatttcaacttgagggcaaggaaccgtttgtatttgtggggtcggttcagggatctcggatacaagtgatttcagtattaacaactagagatttgctacaggacgaatgtataagatttctagcagtggtatcggataccacacgacttgagacagttcggccagaggatatcaaggtggttcatgaatttccagatgttattcctaatgaaattctgggtataccacctcagagagaaataaatttcattattgatttggcactaggagcaggaccagtttctaaggtaccttatagaatgactccagcagaactcaaagaattgaagattcaacttcaggggatgcttgacctagggttttcccagcctagtgtgttaccttggggagctcccgtattgtttgtaaagaaaaaagatgtatccttacgcatgtgtattgaatactgggaattaaataaattgactatcaagaataagtatcctttacctagaatcgatgatcttttcgatcaactttaggggaagacggttttctcaaagattgatctccgatcaggctatcattagttgagaattcgagaggaggacattccaaagactgctttctgcactaggtatgggccctatgaattcctggttatgtcttttggattaaccaacactcccacaacttttatggatttgatgaataaggtattcaaggatttcttcgatatctatgttattgtatttatcgacgatatccttgtgtactctcaatcagaaaaggagcacgagcaacatcttcggatggttctatagcatgctacgagaacataaattgtatgccaaatttaagaagtgtgagttttggctatctcatgtgtcttttcttggacacattgtcagtaaagatggaatcaaggtgtatccagggaagattgaatccgtcagggattggctgagaccgaagacagttacagaagttagaagtttcctgggtctggctggttattactatcagtttgttgagggattttctaagatctcaacacccttaaccaaactcaccaaaaagaatcagtagtttttatggacaggcaagtgtgaagcaagctttcaggagctgaaacagagattgattacagctccggtattagccctaccatcaaataaagagaagttcatagtttactgcgatgtatccaaacagggtttggggtgtgtactgatgtaggcagatcaggttatcgcttatgcctcttgtcagttaaaggaatatgaacagtgat

SEQ ID NO: 61570 - DNA, 665 bp, Cannabis sativa
ttaaaattttactctttttttttccatccaatctaatccaatacatactggacttaaaatattagatagatccgattcaattcaaaaaatattgggtctaaaatattgaataaactcaaattaaactaataaatatatataaaatacatccaacggatagaatcgatccaatccaacgtctatgattgaatgactgaaattaattggatcggatcagatgataaaatctaacatccaatatataattagattgaatctgaatagacttaaaagtattggatgtggtctaatgaacacccctacccctaataacaaacaaagtaccaaattgtaataaagctctagctaagacttatctttaacagttttgtttttatgggatatagatatctaatttcaaatatttatagttagttcttatatatgcacactaacacatcaaaaacccaaaacatgcatgtagtaatatcacgtacgttaaacatacgcatgttacaataatatgaatcgttatttgtttgtctgaatttgtttgaatattattatgcccccaacaacacgattcttcttattaattaattagtaattatttatagaaatgaatagcaataactcactaaaataggtagataaaggatggaagtggaataagttactaattaaca

SEQ ID NO: 61571 - DNA, 602 bp, Cannabis sativa
gttttcttgttttgtcatatttaactttaattacatttttgttttataataggagttctcgaattgggtgtttaggtttagtggtatgcgaaatttcgatggtggtttgtgagtgattttgctggatgttatgttatggaactgattttgttagaccacactctacactaatataaatgttgtgattatgtgaaataacattgaaatgaactgattttcttagttctttatatggtggtaacagtttttttcttgtttgttttgtttgtatcatacaagtgaacatgtcagcatatgataatgtggttgttgggaagctgaagctcaagggaaaggctctcgatgttaaggctggcggtatgaagaaaaagaagaaacataagaagcttcttcaagatcaaaactctgtaatcaaacaagatgatctttcaactgctggtatgataccttgtctttacttttctttcttcttgttgttgttgttgttgttgttgttgttgttttacatgaattaaaaatcgtttaattggcctatgctatgccctgtaacttgttgaatctgtgaaaacacctttgtccttgctataaattttcataactat

SEQ ID NO: 61572 - DNA, 722 bp, Cannabis sativa
aaattcaacatcacatgtaacgactccatagaccctccgaagacatatctcggaaaaggtaacctccaagttcgtaacatatctattatagatggcgaaattagagtgttgcagctcatagccaaagactgttattataagaatggctcccaacatcaaaacgataggctccggtctcggctggggttgtccagcttcaccgtttcatctacaaagaacaagttcactgccatcggttgcaatacttttgccattattcaaggctttcaaggcgaacagaggtacagaacaggttgtatgtcgttttgtgatcaagctcgagacattaactactatgggacttgttctggtgttggttgttgccaggttatgtctatacctccaagactaaacaatttcacggttagtttgagtagcattaattcaagtaatacaaaggtattggattctaatccatgtagctatggtatcttagctgaggaatctgagttcaaattctccaacaccagtttccaagaatttcaaagcaagaagaatttccctttggttgttgattggtcaattggtgagttgccatgtgagaaggctcggaagtttaagaattttacttgtcatttggagacaagtgagtgtgtaaattctaattccagcaatggctacctttgccgctgcttgcctggtttcataggaaatccttaccacccaaagggttgccaaggtaa

SEQ ID NO: 61573 - DNA, 1414 bp, Cannabis sativa
caacagagaactcacaacacaaaattcaaccacaaaatcccaaaccaccattagagctccaacttaagctctagaactctaatttccatccaaacaccaaaataaccaaccaattcagcttaaaacaacaaagacaaacattatctaacctcagattaagaacccaaactaaacacacacatgcagctcctaatttaagcctaaatccatatagctcaattcaaaggttaagtaaaattcaaatagaaaagctagggagatttaccttgattcaaagtgttaaaaacttgctagaatctacaaatttcagcaaagaacacctcccttcttgatgggttcggtgattcggaagaaagagagggagagatgaagaatgctatccaatttctaggttaatttcacaaggaaaactccttattcctttttctcaattaattcaatatcaacctagataaactatggctgcttctagtatccactacaagccaaaatgataaaagacttaaatgcccctctttgaaaaaaaaacaaaggttaaaacaaaccaagggtaaaatggtcaattacaaaactccaaaaattctaacgcctctactatctaacaatcataccccgataatattctaaattatataaaatacgactctctaaaggcccaacgtcgcttttcacagcttcgaacacaatcacagaaattgagaaatttacataaatagcataataaacatatacgaactcaaataaattcccataatatgtattttttataaataataacaaaatctcatacataaaccctaattatttaataatccaaggtattaatcatatgcggtctttacaattatccccacgttaaaaggattttgcccccgaaatctacctgaacaactctggatgttaagccctcatatcagtctccaattcccaaatggcttcttccactttactattcctccagagtactttaaccaatgctatggttttggttcgaaggaccttttccttcctatataaaatttgcacttgttgttcatcatatgataggtcaggttacaattccaatgtctcataactcagaacgtgcattgggtcagacacgtactttctcagcatggaaacatgaaatacattatgcacagctgacaaagatgggggtaaagctaatcgataagccacttgccccaccttttcaagtatttcaaaaggtccaataaatctgggacttagtttgcctttctttccaaaacgcctgattcccttcattggggacactcgtagaaagacatggtctccaggttcgaatataacatcctgtcgcttgggatctgcataacttttctgcctgctttgagaagcaagcattcgagctttaatcttgtctattgcctcatttgttttctggaccaactca

SEQ ID NO: 61574 - DNA, 597 bp, Cannabis sativa
tttggtttaatctggtctcttggtcaactgatgcattaccagctaaagtagaaaatgtagcgaaatatgttcactgatgtaaattgagttaaatactatttcaagatttaaagatttgaaaagaaagagaataaaggttgatgatcaattagaaaaagaaaaaggaaaaggaagaaaaagaaaaagggatgataataataataataatgaagatggtgattatggtgatcttcttgttctgtccttaggaacaagagctgaaaaggaagaagggaaatacaatactgagattacccaactcatctggtaaaggacctgatatttcatttccacttaagagtctgcatttaagaaaacaatatttagccacactcttcaaaattaatatataatttttcatgataaatactagaaacatttaatgcctctatttaccctgtttaatctcagcatctcatttgaaaattaatgcttaattaaaaacatgcaatacatgattgtgtttttaaattagggatattggcggctaaaccacttgaactttacagtttgtaacacttaaccacaaaaactgaatttttggcagctaaactacct

SEQ ID NO: 61575 - DNA, 666 bp, Cannabis sativa
  modified_base (539)..(547): a, c, t, g, unknown or other
  modified_base (601)..(602): a, c, t, g, unknown or other
attctaataattttacagataaaactaaattgagtatttcaaaaattaaaaaatatccacaaagacacttattgtaactataattaattatgagtacaatgagagttaaatacaataaaaatgtagttgatcaaatttagaaaatgagagaaatagataaattataaatattgttggaattatagtttattaatctcacggtgaaaagtgtgaagaggagaaagagagacagacatagtaagcaccaataattccatgtaggtggtatgcgtggaatgtaaattatcaacaaaacaagaagaaacatttcaggcttacctcaaaacaacaacctcgagagcaacccatctggcaatgttccaattctcttttagaaaagcatatattttgtcaaagtctcccgttgatctcgcttttagtgaacgataatgagtcaatttcgaagcaattagagatatattaaaaatagaagaaaaaccaataagcaataaagaacactaagttttaaagaggttcgacccctttagttcggtaatagnnnnnnnnncttagattgtattaacttgagaattaataatacagtgtttcctctctcaaagcnntcacaataaaatctctgagtatttctcttagatcgctctctaaagcaattcttttgatcccttt

SEQ ID NO: 61576 - DNA, 712 bp, Cannabis sativa
gtggtcccgagttgcaggtgtagtggctgcaacgtcaggggttgcagacaacacgtctccactacttgtaccatgttaccaccaagccacactgagaatgtgaccgtactcggtctcgtacctctccgcgtgcaagccttgtcttttgattccttccttaacggtcttctcttcaacacactcttagattctccatttacttcacatttctcacactcactcacgggtctcgcatgacacggctcgcacgtgcacactcatagactcgcatgcgagccccctccccctacacacatacacactcatgggctcgcacgcgagccctccaccccacacacacactcatagctggcatgcgagctcctcactcaccatgggctcgcatgtgagtccagcacgaccttcccacacacacactcatgggctcgcatgcgaacccctcacacaccacgactcacggcctcacatgcgaactgctcacacaccatgtgttcgcacgtgaccccacacacacgcacatacacttatgcatgcacacactcgtgaattgttactgggttgatctctgagttgtgtggatatatcccgagagttgcatgcttcgattcgagagattaatgagtctcaggccatatgtatcgattcagtaatttttaggctgactcttaaagttaaagtgtctcgcttcccgagactaattgttgactaatct

SEQ ID NO: 61577 - DNA, 503 bp, Cannabis sativa
atgttttcaaatgtgtacatttttaaaattgtgtttttttgtacattttttgtaatataattgtttttgttgtacactaatgaaaaaaccccaataaaatatcgcctctcattttatttttctctttcttcgccactaataattaattaaatgctccttttcacactttatgaaaatataaaataaaataatgatataggcatgaaatttggtaattggtaaagaggtacccaaaataaatcccacggtccattacccctctagtgtttggtgaaactaagtctaaagactcacaatgacaatcatgtttggatagtcttcggcggcaagccttaaaaatgtcagatgtcatcattcttttatatgcactctcatcacttcactattttccctctaaaaacaaacaaacaaaaataacatcacaaatacattatcagaaaatttgtgaccaaaaattgatcatatgggccagaaaggaaagagatgcaaaataaaaagaatcc

SEQ ID NO: 61578 - DNA, 1415 bp, Cannabis sativa
gcctaaaggaacttctttccaaacgacgactagcttccctgaagactcgacttaagaccttttcatttagagggactataccacagttatcttggccatagcccatgactgtttctggttggacctacctttggagatgccaattttcattgctatagctgaaaaggagagaaaaagaggagtgagcgaatgacaaagaaatgggtagcatcaggtcgggctttgctttgtcgtggtcgagctgccagagtgccaggggtgtcgcgccggtgaactaggctgaaagtattaggagtctttagttttgggttgcaaagttaaagagagatagatgaggttatgagaagggtaatttagagaggttaagaaaataatagcatatttttgtaatgtgcgcaatatgaagaatattttttaattataaggtcactttaagaaggtgtattatgcccaaatcttggttatttaattatttacaataaattcttaattattattatatctccaaaaaacgtaatattttttttttgaaagcacaaaagtaatttaacgtattggaaaatttatcattttcgttttttttctttgttttttgttttatttattttatctttgacgcttcttaatcgaaactctaatatttaataactaagattattttcaatgagagatataaaaattgaactatatttagcacaaaaagtagttttgtgacatttttatatcaatttttattattgcgctccaatggataattataaatcttgatataaaatttaatgtcatttaatgatcacttaataaattattaagaatataaaatagtaataataataataatttaaaggtatatcatatgtaataataatgcaagttatttaatgtaaagaaacatgttcactaaaatttaataaatggcatattggtaaatataaaagcattatatttattataatgcaaattttacatcatgctatattataatttaaatttggattactttttgttatgtgactaaatttgcatcacaatttgacacaatattagagtaaaaaatcaacttttcaaagctaattgctacaatttgaaaagataggggattaaactaataaataatcaacttttcaaacctaattgattaattaaaaatgctgggggacctaacaataatataaaataatgaagtctgcaactaaaaaccaacaaaagactaggaaatattttttaggatggaagcttatagcaagataacatatataaacacacattagggaagccatgaagtcggttcaaaatgaatctcactcaaaactatttgctatgtcatccaaagctacaaaaataaattgggagatgactgcaaaacatcatacaaagaattgctgctaaaacccatcttccataaattgcatcat

SEQ ID NO: 61579 - DNA, 1038 bp, Cannabis sativa
aaaaaggagaaagcgcaggagtggacacttgagccggttgattccactactagctacctttgaagccaaccttgaagaggtatccaaagatggtgatgttgttatctgtcttcctaccaaggccaagttgatggaagaccttggtgaggcaatggtggaagagaagggaaatatagggccaagatggccgcattaaacagattcattttgaagtcaacagacaaatgtttgccatttttcaacttattacgaggaaataagaagtttgaatggacagaagcatgcaagcatgcattccatgatataaagaaacatttatcaactcctcatgttttatctaaacctttaacaagggaattttgtttctttatttggtcatttcagaaaatgtgatcagtgcaactttagtgcgagaagaggtcaaagtacaaaaccaagtttattatgtgagcaaaaagttacagggaggagaaacgagatgtccacctctagagaaacttgcattaaatttagttcatgattcaagaaaattgcgaccttatttttaggtccatcctattcaagtcttaactaattagctgtgtgactagtcctttctaaacccaatgcttcgagtcgattaataaagtggtccactaagttaggacaattcgagattacctaccatcctcgaaggaatcgaacaaggtcctatacaagaattttggaaattgtttatgaatggatcttcaaacaaaaatggctcggggcagaaatactctcttatcacctgaacagtttcggttcctgaaattcaagtgtcaagccttgaataacgaagcagaatacgaagctttgccatccagacatcgaattgtaaaagtgttaaaaacgagggtcattctttgttttaatgaatctcaacttgccttgaaccatgtattgggtgaatatcaagaaaagatgaccataatggcgaagtatttagagaaagttcgacataaattgggcaagtttgattattataatgaataattttaattattttttccttaacat

SEQ ID NO: 61580 - DNA, 539 bp, Cannabis sativa
caagaagttgaaactttttctcttcgttttttaaagtgtggaccttctgagtttcatatagggtccaccagaagtcaacccaaatagtaagttgtaccttcttcttgtattgggatttaagtaaagaattgagaacaacctatcattcttaagaactgcaacagggccacttccactgctatcacttcccacagataaacccgacaaggaaaaaaattctcacaccttggtaaaacgcatagaagctaattttgttaatcaaatctcatatagttacataccggagacgccccaaatgtgtcatatgatgccactattgcaatagttgtaggaagttgattaacatgtattttcaatctgggcaaccatccctgtcaccatcattcacgaatcacaataagaactcaatttacaaacacaattttgcatactcgggtaattgaaaaaaaaaaaaaaacaaaaatcagacaaggttctacttgcattaaactattacaactgaagaaagttgttcatatagttggatggcaacacaatct

SEQ ID NO: 61581 - DNA, 662 bp, Cannabis sativa
aacaaatttttggatattgcttccctttttatgaattagtaaaattaacacttgttttaatgtttgattaggttgcataattatgggtatttttggagaagcagttcctaaaaccattggtaggcttttcttttttttttttgaagggaccattggtgggcttctaaatacaatttaagtagtatatttcttaacattgttgtaatcaaattgttcattgttctgtacatagtcactaattttatactattggtttttcttattgttcttcttattatgatagaattgatcattgaatatcttttctcacattaatttgattgaactaaaatacttatctttcattgtacgcatttaatcttgattcatactgctctcaaactatgcaattttttttttaaattaaaattacatgtatatgtttatccaaatgagatatcctcttttaaaattgaaacgaaatagggacccttccgtctggttggttctcctattcactgttttaggggtgagtggttgctttaccaatcacgctttctctaaaactattgtagttaatggagcatgatcgggacctttttggcttcaagcagataaatttaaattacctttctcgttattatattcataaaagctaaacaatatatatagttggtcttcac

SEQ ID NO: 61582 - DNA, 652 bp, Cannabis sativa
taataaaaataaagtagatgtagccccattaccatcgcaacatggggatgaactaatataaatttctgatgtccttttttatttgttgcagttttatttagccaaattaattcatctcagtcctcttatcttttacgatcttcatagatcagttgacgaaaaactccatcaatactgtccttaaccgatttcctattcacgattgatgaaccaagaagattcttgtagtactacagaaacacatcatttggatcatcaacccaccttccctccatatctgtgactgagtattctagtgaaaatcttctatgctagcatgaagcaagattgtatttccatctccattctttaattagtcaatgtatgtttgctttttgctacgaaaatgacaaaaaagctttgtgtacttcactgtaaacatgtctggcttgaatttcttgttcaatcaactcaccacatatcaggttcttatataattccttctagaaatctaatatttctttgtaactcttttgatcatgagcctataaattaccaaattctttcatgtctgtattttcaacatcatcttgacctgtttaagcttttgaactatactttaaatatatctgtacttgagaaagattgctgccaacgtaggcataattgcgca

SEQ ID NO: 61583 - DNA, 1196 bp, Cannabis sativa
agaatcctactaggtccaatcctgcttgccaagcacctgatgggagcaggctggccgaccttgtgttgtccagaggctggctgaccaggggttgtcggtcagccgccttgaggtggctggtctgttacttgttgtcctatttgagtgttgcgaccccatcggctaaggtgttgacttgaccttcttgttagtgagctatattgccacatggtgttgatcttgtccacgtaagcatgtcacgataggtgggaaaaaatcgggttaacatttgcccccaagtccctgtgtagacgtctgtacggatagggacttaccaattaagttggaactaatgtagcctttactgaataggtgtttttgcatttctagtcttttaaaatacttactattgtctgtttgagctcatttgttgcagtaaactaactgtttttacacgtctctttgttgagcatgtgaagcaagtgaaggagtggtcccatagatactatttaagtccttttgggaggaaactcttcttcacttttcaatctctcactataatataacttttgaagaagatcatcctttctctctagatggccgaacccacgtagcatcattctcctggggttttcgagctattttgacgatccaagcttcccatcttcttcatcaacggttactagtggaaggtaagctttcttattcctgtcgttcacttgattttgccatgaatgcatgaactttgttctttgctttgaatgtcttatgattcccacgttagattgttgtcctttcagtattttgatcggtatgatagtcttagaatacgtaatgtgtgatttctagacgaaaaagatctaatgttgaccttcgttgtgattcttggctctttgagtcacgaagaacacaaagaacgtgtttgagttcttgaaaaaacacaagctcagatcccgtacacatcttggccggctaaggaggtcttgtttaagacctggccggccaagggtggccatcatggggtctggccaggccagccaagggggtataccccataggttggccgaccgatctctggaagtgagattcctggctggccctaggctgggtcatgggacctggccggcctctaaggcttgggaaccctaactagccaaggccaaggttccaagtgagcagccagttttttgtcctttgttgacctcagctagggtctc

SEQ ID NO: 61584 - DNA, 703 bp, Cannabis sativa
  modified_base (575)..(577): a, c, t, g, unknown or other
aaaaaaattataaaaggaatttaaatataaaaataaagttgtttacaaatattaattgctaaaaagagtcttgttaaatagttaaattaaaaattaattattttaaaaaatatttaattataattaatttaatttttaacaaataattattacctgttggtaacttgcttttataggttaaaaaatataacaatgatggttataatactgtctcctaaaaaattgagaaaaaatatatgtgtattttagtttcttagagcatatatttgtaattaaaggtgataaaatataaacataataatagctttggcatgttggttagactgtctcatactttttctagagattaagagttcaaatcataataaaagcatatttagtttcctttttgtctcccttaccaaaaaaaaaaaaagtatgcactctctcaactttagttctgaatatatttatatatataaataataaatgctttcaaaaacatcgaaattattacatgaaaaatataaattgacactttatttataaaaaggtaaattgctgcatgaatatctaatgttttagattttatacannnaaatacctaatgtttatttttggatgcaaaaatacctaatgttacaattatctttcattgttactaccaattccgttaacttatcataaatatagacacgtggagggctcaaatgcattacattta

SEQ ID NO: 61585 - DNA, 4503 bp, Cannabis sativa
gatgaaataagtggtgcttccctcattaataagttcaatgtgaaaggatgttaaccaggtccaattttggtggccaaattaatggcactcgggatgtggtggaccataaaatttactattttgtttgtctataagatgttatatcttcaattattataaaatttcattaaccagacaaatctgttcattttgtttttaacttcttatactcttaccaagaaagatttacctttgtgcaaaatgcacaatgcaattatgcaaccatttttgccttttatttttctccctataaggatattgatattgtaatctaaattgaatcagtaacagtctatttgacataagtgtttagttaattcttggtctatatgtgagtacttcattctgcttgttatgtagcaaaaacataacacaaaccataacataatggtaagattctttatttgcattgaattgaaccatatgctccaatgcttgtgcaagccccatcgatttttttaagtttcattcttgcctcaagcgagttttcatcgttatatctgtttcgatttcatataccaccatttgcagagttcgtcagaagtccaccattctgtgttgaaccaggatcggagctaaccacattcgtcattaatggcagaaattgctttgataccatgtgagatatattgagtctcttgatattattgaaacaataaaagaataacagaaaaaggaaagaaagagagagaaagatattgagacaaaagaattgttattgattatgagggaatcaattacatttataagcagatcaagaaagctaactaactagttagcacaggagctaagagagctataactactaactgaattataagtaattgacagctagctataactatctgataacatctttagacaatgaactgattctcttaacacgaacgtactctttagtaggtagaccactgcatgagtcgattcgattcgcaaagagaaagagagggattaaggagcacaacaattgtggacgtgcttgctaaagggattgagaaagaaacactagtgagatctagatataggaagaaaattacattaataattaattcgtgtgttgacatatactttcttttatgcttagtttactaattgtgtttttacttttatttatgatattctaagattcattccaagttcttgaaattggaaatttgtatgtgaaaatcttgagtacatttctgtacagggatattttgatacacctattagtttatttatttttattttttttataaaattaaacagaaatttggtcgttgataagtgatacaagtcgtttatttatttatttatttattttatttttctccttttatgtgtcgtgtaaaataaataaaaacaaaataaaattttaataatgtatttggatgatagaataaagaactgaaaacccaatccatttttagagagaaaacccaaaggagtacctgaacagaacaaggtgacccatttacacagctttaaaacctcaataactaggctcttctttttaggaagaaaaaaggaggacaactttgaaaaataatcacctccaccgaataaaaagaagatctttttcaatgtgaatctgactgtcttcatttaatgtgtgtgaagccattgatttagatgagtgtcttttcttttgctccaccattttcatctcatgctgatctctctgtccttcaaaagcttaaaaacttcattaacacaatgtcgttttcctcaccaactccaacccagttcttaatcaacgcttttctcctcctccaaagccaaacactcttctttctcactctccaagcagatcacgtgaatcccaccaccaagggcacgtgccacgacacgtgcggtaccgtcccggtgaagtacccatttggaaccgaattcggatgtggacacccggatttcgcccgttacgtcaaatgcaacggcggaacgctccagctcaccaccggcgccggaagctacaccatttcctccattgattacccgagcaacaccataattgtgaccgacccactcatgtccaactgcacctcaatgcaaaactccggcagcttcagcttggaccgagcaagcccttttaccatcgccgacgagaacatcttcgtcctcctcgggtgctccaccacctcgcccgtcttcgacccggaccaagatctctgtgataccgggtcggggtaccgggtctgcagaggcatgtactcgtgcaagggtgtggcgggaatcgggttgccgacgaattctccggcatccacgtgttgcgtgtacgattctccgatgggttttggttcgggttacgaactggatcttcctaagttgcagtgctcgtcttacacgtcgatatacgagtttggagacgaaggtgacccgatgaaatggcggtttggggtattgttggagtataatgattcatattacagcagtgggtgtagagattgtgaagagagtcaagggttttgtgggttttcgggtttggatcagtcttttgcttgtatttgccccaatgggatgaacactactgtcaactgctttggtcgaggtatttactcatctactcttaataaatattctaatttaacttaactatttgttagtaatgtcgtttaatttattatgcatatatttttgtcattaacaccttttatatttcactctcctagactcctactactactactactagtgtagtgatccttactcttaattattcaacattctcctcttaagttagcaactttgtttaatattaaatcatgcgtacgatccgatttaagtgattgtaataatttgaactatttcaagtttcaatatccctttcaatatttaggagcaatatcccttttaatctagaggagtgagagtttaaaatcttcaagctattaattataaaataccataatttattaggtaccaaactcaaatatcaaagtataagtttcacactaacacgagtagttttcggataagatgtgatgacgcaatagtgatgaaattttattaacaaaatagggtatgcttggagcgggacaaggggcctaggagttcacatcaacacatgtattgcaggtaatcttttcttttaacaacttggcatttcttttgtttttttttttcttcacactttttttattattattttacgataattttcttctctttggtttgtaggttttctggtgtcttgggctttacttttcattggaagaggcagatgaggaaagatggttcatctgttcaacttcagtcaataacattctcaaagaaacttttggagtgcaagtaatgtgggaaaaaagtgctccccatttcatagctttctaatattacttgttagaagacctgtgattataatatggacattttttttagttttttttttattattgttttaaggataaatattatttttgagcttgtgttttgcaaaagttacgaattgaattttctattttgcaaaagttactaattgaaccttctattttgttaaataacaaaatggactttgtattttctaaaattgtacaaataggactctaaattgatttttttgtcaaaataaaacttaataaaatttgaataattaatgttatgataaaattggttatattttctgtatctgttcgtgttggaaattgtcttaaagttggttatattaaacaataaaattattgaaaattgagttcaaaatcttatttttacccttttagaaaatgtagggtttattttgttgtttaataaaacagatggtccaattgataaattttgcaaaacacaagatccaaaatgatattttttttaatttacttgctatttacttgataattaatcatgttacatatgaaaattaaatttattttttcttaaaaaaattaatcagaaaaaagtttctttttaactctactttgattgattatttttttgttagtattttaggttaaaattttatctcatattgtgctaatttaatggtaacttacttatgtaagaaatagcatagttaatgtcacaactacaagtcaaatctcaaaaattataaatttacaaagctaggaacaaactcaattttggaggttgtgggggctcccttaagaaaattgaatattttctattgctaatttagttagtcatgacacttgattcctgttagttgttatttcggttagcagttgttaattagttttaacaactaattaacaactcaagtgtcatacttagatgaaatacatatagaaggctattgaattagtccttacaataggagcttgtacagattcattttatgtaataaataactaaattaatttattttatatttgttttacttaaatagtgatgtgaattagaattaaagacttgcattgaattccaatgaattggtatcagagcttgtattcgattgaaggattggaaattatcgattgggggattagaggaagatgaaagatctttatctgtttgaagaattgatccaagggg

SEQ ID NO: 61586 - DNA, 720 bp, Cannabis sativa
ggattagggttatgatcgagtgtacgggcgcaaggttataacccgagttatttgcatgctttatgttatgcttttcttactgagtctattgactcacagtgctattgctatgtgtagttaagggaaaagccaaagttgaggagctgtgagggcgagcaggtgaagattgtacatgtcgggcagttaggcctggagcgtacgatcctcgggacatcacggcttttgctgtttagtcgcttggcggcaaatattttgtatatgaatagtaaacttttgtaatggtattttgtaaacgggatccaggaattttattaatatattagtttatgtttttaattaaataagaaaattttaattattcacttttttcaataacctcgttgattagcaacaagctgcacagtacgttaaaaatcacgataacacgcctatattagttagggtgttatagactttgtctttgagtgtctcgcagatttactggttcccataccttctcgatcattagcaagttgagtactttctactcttcaagttgatcgactatgggttgttgaccgcctcgaagtcacacttgcttcttcacgctctgttctttcccctcgagagcagtttgtcgtattccctcatcagggaatgtataagtcctcactttatgggtttgggaagaacgttgatgatttctaccaagtgacttccattctcctggttgagtcccaa

SEQ ID NO: 61587 - DNA, 813 bp, Cannabis sativa
ctatactcatacattagtttattttggcttattgaaataaattttcattttttatttacataatagccttttcgtatagtctatactatcgtatatgctaataaatctattaatttattttgccatattaaaataaatttttatttcttttcgtatattggaataaaaattcattttatttaatatatcctaccattatatattgtcaataaacctactagtttctgtttgttggaacaatattttttttttcaatacatagtaaactctattcaaacataataatgtacgttacgccaataaacctattagtatacttaaagataatataacccttaaatataaaataaaaataaataaattcaatatttattattaatatgtttgaataaaacacactgcctcaccactctcaccagtcgccattctcaccacttcactcccataatttcagcccttctatttctttgctgctctcgtttccaacaacttccattacataatatttgcggtaagcactgcgtgtttctttatttttatgtcttttattttgaaactgtgtaactcattttaaggtttaattttaatcattaatggcaaaaactataatcctacttactgttaggatcgtcagtttttaactttttatttttttttttggaaaaaaagtaataaatgttggagcaacaatcttacttggtttttgtttcatggttttggaaatgaaacttgaagagaaagtgatcatcaaagcatttgctgattttagttgagatgatgtgctgacgtaaaagaaaactaattattttaaaa

SEQ ID NO: 61588 - DNA, 1132 bp, Cannabis sativa
tatatgtattgatcacaccatattgttttgccctattattaatatctagcaatgtatgaagtttagcatacttatgttttatatttaactaaaagttgtattaagtttaattttttgcttttaagaaaaaaaaaaagttgcattaagtgttttgttttgttgttttttcttagaaaaaagagttgtttaggtttttgttaagaaaacagaagaaaatagttttagtactattatatttatattgaaaaaatttgttggttgaatactttagttatatatatatatgtatatatttttttaatggaaataaaattttattaaaaaggtaaattgtttaacaaaataaacataaatacagatatttcattaaaaattcgatctgaaaagaataggaagctctaataaactatgagtcactttgttagctagtaaacgataaacaaacataaaaagactctgcttaaacaattaaacaagtgtctataatcattaacaactagtccaaaaagagagttaatcaacaacaaattgtgaatgatcttaaccactactaaacaatccgtctcaagcaccacaactgatcattcgttatttttaatccaactgagctctttcagccaactcaggttctacatcctaaccacaacatactggctttaacaataccgccaccgatgatcatgagcttccatgccaattccaaattgatgagaggcaatgtaatgtctagaagctttacccaaaacttggtaccatcttgtgccacaccactagacagtgatatataatcatccttcattaatttgagcatttttttattgtttaagatacaacttaattgaactaatcacaccattcacacttggaatttttttgttttaaacaaattcgttacgagttctccaaatagcccaacagatcatagccaccatgccttgcttctttcctacccaattacaagcacaccatataagatctttaatccttggagaggaattttaagttgtataattagtttatataaatataacaagatcataaaatgcatttttttaaaaaaataattttttattatttttgtttaatataattaattaaccaaaaaaacccttcatgtacacattatttttat

SEQ ID NO: 61589 - DNA, 1251 bp, Cannabis sativa
tttttttcaaaaatactgtatattgtgttaagtttttttaattgtttcacaattgttttttagttgttctattattgttttaattatactgttttgttatttaatggttgttttataaacttttacccaaaatttattatttttgtaaaatctccttattattaataatattagactgtgtaagttgcaagttacaactagtgttttctttttagcatgaagatattataaggatcatttagagcattttcaatacaagtaaagattaaaattactataaaatgttacatcatcttaaatatatataatacatattaataaaattaaaataaaatataatttaaatactattaaaatatttgtaaaggaggaatatacatcctttaaaatagaaaattgatttacatcatcagttggaaaatgatttttccataattctttaattttgttttttttttttttttttgaaaaaactctataaaacagctattgagagtgttctttaactaactacaatatccacagagaatacaatgtgactttcttcggtccgactcaattagccagggttattttacaagcagtcttgcaaaaaggtcatctcatttacaatggtaaatttgataattcattcttaaaaattatttatagtttttgagtatgccacattaaaatagattgaaatttaatactctgattaattaaatcttaaaatattctccccatacattccctctttctctcagtcctcttcttctaactctcaccaaacccaactgatacccagggccggctcaagcattgggcaacttgaaccattacacaaggctcctatttttttaaggctcaattttttctttgaaagaaaatgcctatttttgtctcttttttcctattaaatatatataaataaaaaatttataattgaaaatttattaatgaatcttaaaaaaaagctagtaatagaattataattttaatgtacacgatttttttttaaagagcccaattttaaaattttgtacaaggcccccaaaatgcttgagtcggccctgctgatacccacgatcaccgcaccacctccgacgaaatttactctgaaggcaaaatataagacaaaatcgatgaggatatcgcgaaaccacaaaaagaaatcgtaaaacccaaagccccaaaatctatgagctcaaccaccccaaaactccgaaaatccctacccattgttggagttctcaactcgcttgttttctg

SEQ ID NO: 61590 - DNA, 700 bp, Cannabis sativa
tatatgaaatctgatacttaattagagtaatagtaatattgatatatagggtgctagacactgttaattctttttggcatttctatttttttaataagttcagtacatgattatataaattttacacagagattctgataaataaaaatcaatcattatacctaataattttgacatattttgtatacatacatacgtattttatttacatatatatacgtgttgataaggcttatccacaggagtaagaaaatggcagataataacctgggaaacctagctatatatatatatgggtgtgtaaagtcactttagaagcacacgttaattgattataaaacctgcatattgcatgcctgtctttgatgaattcggctgctgaaaattaaagctcagattctcttagtcattctcagccaattgattgatcgtaaagaatccattactgtacatcttggaaatataagtcctacgaatacctccacacccaataatctcttttcatatatactcaccacatatttggaatattatatataattaacttaactaatctattttttaattaacttaattatatatagtttttctggatatattacaatatataagattttatcatacttaatgagaggagtaactcaaatgtaaaatattgatgctgaaaaatggctaccggcttgctaaattagcgagatga

SEQ ID NO: 61591 - DNA, 1120 bp, Cannabis sativa
cgctagttgactaccgtccatggcgtcttccacaaccgatcctgcaactgcaccaatggcttctgccacaacttctactgctacctcatggaatcccttttctcattcactcacctcgtctctcactctcaaacttgaccgtcttaatttcctttcttggaaatcccaggtcgtgccaacagtgattggccacgatcttgacgaaattctcttcaccggagtagcaccagtaaagaatcttgtcaatggttcctcaaatcccgaatatgttcaatggaggcgtaaagaccagctccttctttcctggctcagatcttcaatgacagaggctgttcttgcatcagcggctaactatcaaagctctttcgctgtgtggcaagctttagaacagaaattctcgagccaaactaaagcccgtcgtcttcaactcaaatgccagttctccaatatcaaaaagggaagtctttctatctctgaatatgttgacaagattcaatctctatctgatgctctcactgttgctggttcaccagttgatgatcaagacttgattttacaacttttaaatggtcttggactagattttgactctgttgtagcagggataacatcaaggagtgaaaatctgaccattgaagaagttcaagccttacttctttctcatgaaagccgtttagaacatcatcaatctatgacagatttggctgtcaaaatgcaggctaatttgacctttagcaatggacgttctggtggtgttcgaccatatgccaactccaagaactcgactgataacactcaacctgcttctggccgtggttgtgggtatcctaggttcactcagcaacgggttatttgtcaagtttgtctccgttctggccataccgcacctgtatgtcattatcggttcgataaaaactgggttgtaccaagaaacaaccaatctgcccgtgctaatcttgttgaggttgagtttgaatatgaccctcaagcctactccacaacacttgttcaagattttggggatgactacacttggtatgccgacacaggagccacggctcatgttacttttgatgctgcccatcttgaaaattcacagccttatcatggtaatgagact

SEQ ID NO: 61592 - DNA, 666 bp, Cannabis sativa
aatctgaaaagattgttgaaaccacgtacaaaaaccttgtgtgtttttacttttctgcactgtttgtttttctggtttcttatggagttacagagttgtcttctgtagcaacaaaaaaagtgtttcagtacctgtttcattattccgcatttaattaagtatttaattatataattaaattgggaatattaaaatacagaatttcagtagttaaaaatattaatcacaaaaataataatttgttgtgactaaatatatttttagtgacaatacttgttgtcacttgtaactaatttacaatttggaggaatttgattggaccaataataattacgaaggcagtgtctcaatggtttttgaaagcttgtcaggttgccttgctgaaaagttgaagtcattggatttgggaggaaattcgtttgattcttttaaaggccaaatcttggaaacttacatgaaacattttaaaaatttacatgttcttttacttagaaataataaaatttctggtcccattacattgtcaatatttggaaactttatatccttgaagtcattaaatcttgattcaaacattttcagtggacctcttccagaattccatgcttctctctcaaagtttgaatccctttctattgactgaaacaaattaagtgggtcaattcc

SEQ ID NO: 61593 - DNA, 1666 bp, Cannabis sativa
tactagagcggtcattacatcagggatccctttggtcagggctatcatcaccacttccattcttatcatcttctcgagcagtatctcgttgaactggtcttgacgagatagcctacttttagtcaattagaattttttggccatgactaccatgggatttgactcatcatgagtgtccttgtctccagcactgccttcaacaatcttatcataattattatcctttgatgtgtcttgaggatcatcttttgaggtctcttgaagatcgccatcagaattgttctcttctgaatcatcatctccaaataaaggagcgtccatatctgtatctttgccaacttgatctttgtgacagctcgtaacctcattctaatcttctgcatctcctgtcttggcattaggatcaatgaagtgaaaactagatttgttacgggtgagtacaatgattactgaacttaatcttcagatggtatcactgctttcttcagctctcaatgaaaacacaaaaatatttacatagatttttgaaaaactaattaaaaataattagaactaaagaaataaataattaaaagagaaaaagtaagaacaacacaaacaatttttacatagttggggtgttaacaagccttagtccatgagtcgatgttattatgtaacttaagctagaaaagccttttgggaatacaatgagcgtaagttctctatttttcctaagcaagtatcgcaagagaatttaacccttaatctgacggattcattgggtatttatagtgttaagagaattacacttagctttcctttttcccactaatggagagattacattgaattacataatttgggttattttgtaaagtccaacccatgaaggagatgatttgttgactagacagattagatgcgattgaattagtcaaaattgtgtcctataattctaggaattaatcgtgaattaattgcttgatctttatttaggtagtttccccttttagcttgatacgatcttctatcaaaatttgaggagcatttatttccttattttgtgcgcttgaataaaaaaggaaactggactggtcttgagaaacacgatgtctgaccttctaggatcatggtactggagctgcttctggatacggactgtcactggcggaagaccatctggtcacggagctaaggtacgttcttggaaggtcctgtacaacttgggcttggcccaaattgtcttccttgggacatattggtgggcctttggtgttgacctaaattttacgtgttccttgccgaaaatagagataacaatatagatttatatagaatatgaaaatttgaagttttacataattttatgtcactaaacaaaatacaaccacacgtgaagcgcagtttattttctaatttagtgtgaagtaagtaagaacgatatgagtattttttattatcttttgctaaatgaacaatgtgggtggtgttcacattaattaaattgcatgggattttgatatagttttgagtagtactgtaagtttgtgtgtgtgttatgcaggctcggtccgtatttatccgtgctttttaaaaaataggtcatattgttctgtgccatgaaaaaaaatgagttgtgtcgtgtcgtgtcgtgccaatatttttaaagggtaggctcggcacg

SEQ ID NO: 61594 - DNA, 1955 bp, Cannabis sativa
  modified_base (1248)..(1251): a, c, t, g, unknown or other
cccaccgaccgctatccacaacatctagatcaaacctagatacttctttatcaggagtattactaagaagaaaacattgaataaaatacaacacagccattgtcaatccaagggactcatcaaaaccccacctactacccaaaaaataatcctcaatagctttgtggtcaatggtttttacaccacgaaaaataaatttctaccaactgatttgattcttgtgaaaacaacaacttgttgccatcaccgaaataatcaattccaataatcaaataaaattcctcagcactaaaccgtatgcaacagccagcaaccttagcccaaaactctttaggattgggctggaaaactttcctcaataataaactatgaacaacttagggacggaaaacaatctcaggcatatctagaaaatgaccaaattgagtctcacgaaacatggacagtaaattaacagataaagttttcttaatattatcaatgacagaaaaaagactagtgcaaatacatttagatctgtaataatcaggtggactaaatttgtagtcccagacctgcaacataaccaaaatggccacagtaaattataaattgtgaataattcagtaaagcaactaaaataaaactataacaaaactaaaaaaaaaattaccaaacagatacaactatacaaatataaactacaaaaatctgaaatcatattgatacctaaaaactaatagcaaacaactatacctaataaaaatccaaaaacacatcaaacataacaatgttaaacgataaacaaactaataggaaactacaacaaactgattacacacactgaaacgaaaacaaaagtttcaaaaatatttaacaataaatgacaaacacatacagaacctaaaacacaaaggaacactgtaaagaaagaaaatacaatcaaattaaaaagccaaacccaaaaaagaacaaaatatattgctcaaacaaaattaacgacctaaaaaattaaacaacatcaaacgaaattttaaaaaggaaaccctaaaatttcacaaagtagaatgaacaaaaaacgcaaaactggaaatacactaaaatattaaaaaaaagggggaaacgaaaatgaaactgaaaaccaacctcggttcaaacttcggcagcaacactagcttttttcccagaaaattcatcaaccattttctcatccacactgagcttcaatttcttcttagcatgttgcctcccacgcttggttaaaggagnnnnaaaatcagaatcctcctcttcaacaattggacgtttaccctttgctttgttagctagagctttcaagcccatttttgattttttttttctgaactggggaaggagatgaggatgaacgtgtgatagacattttaaaaataaaatggaaacgaatataaactgagagggaaaaaacgtgaggaatcgtgggttgagtgggagttgaaaatttttggaagaacaaagagggaaaaaatcgtgatgaatagtgggtagttatggttcaacaatggaagttattgatcttctaaacaaaaaaaaaaactgaaagtaaatcatcaaaaatcaaatgaaaagaagaaaaaaaaaagagagggaagagattggaagttgattgatggatgatagggaaggcacatgtgtctgtgtatggaaataatgtgtaagtggtataattgtaataaaagaaagtggataggtaaaaatgatgatgtaggcgtgtaggggtaaatttgtaataaattgtaaaaattagatttttggtgtaagaatttcaaaaattaatctaatatataataatattaaaattataccatcgaattttttattaaaaataaaatttcaaattctattttatttattaaaaaatttaaaatttatatgaataatgtatacatagaattttaaatttctctattaaaaaagtattaatataaaataaaata

SEQ ID NO: 61595 - DNA, 2214 bp, Cannabis sativa
gcattaaacattttaggaaaaataagtcctgggacaaataggtattcataacattagaagatgtatgactattccatcagaagaatattgattttgtatatttgtatgtcaatagaaaagaaaacatttcaagcaacatgcatcgccaacagtgtagactaagcatcaaaaaaaatacatccatcaagtgttgctgaggctgctagttttaaataaggtcctcaacaagtgatttggttaaaatagttaaaaaagttagggaagaaggttcaacgtcaagtttcttgatatcactcctttactaattgataatcttcgcaggcaagtccacatcaaaataggggctttccactgaatattatcctcaagaatcactacacaaaactccttccttgctaatatcacatagaataagctacttctaaatatcaaaacattttagatgctgagacaagtgacatggatgttgacttacagcttgaacttgtgccaaaatctttagtagcctgagacaaaaaaaaaaaaaaaaaacagaggttgaaaattcttaatccaatatagataatatgattaaaaaaaagagtagagaattttatcttaacatacattttcttcctgagaaaactctaatactttttgatcatcattcttgtgccctagcaacccatcaaatccacattgtctgtcaaaatttgattacaaggaaataaatgggaagaccagaaaaagatgacactgtatagcactgcaacagtgttgaaacataaaaacattctaattgacatgatcagggccaatgtttatctccaacaggatgaggagaagaaatatccagataagacatgcatggtttaattcaaagggcaaaaatgatggtagaacaaagttctacttgtattccatatgaaagcattatagatgtcagtgtcaaggtacaaaggtttaagaccaacttgccaaatattttggaaaagaaaaatgggagcgaaattaaagctaattatacctcccatcatttgcagcaccagaggtgtctttaatctgcatttaggtgggaaaaagaaatacaaaaatataaggacttggagatagttcatataagtttataaacatcatacatatacctatgtcatttgtctctctttcaggtttacttcatacaaggttagagctatgaactatgaagagatgggattatttgcaggaaccaagcagcacaaacaaaataagtactagaactctaattgctaaaaaatattttcccatcatttcatccaatgtttttctagacagagaccaatgcttcaaaaatcaaagattgaattaattgactagttcaaaataggataatttggaactatagctcttactttcaaacatacccttcactccaaacttcagaaatttatcttttctttcctacttttctccctctttatttttccttcttttaaacttctgagtttttagtatatacatttaaatttctcagtatttctatttgaactttccaatttgtcaattttttccctcggcacaaagcatgataaaaatatacatacaagtaaataattattaagaaagaagaaatacctcagcaacatttctctccccatgatcctttctagcatttgagggcgtcaaacttggagcaaatccattctcattatgcattgagctcccactatttaaagtgaaattgattatatagcacaccatgacataatcacatcatagatacagaacacagaaaatgtgaatacatgatatgataatagacaggccgtgataaaaatctgaaaaatgattaagcaacactagagaaaacaagattaggcttttcttaaacgaaatatatcaaccaaatgcacagcaaaactaactgatctaagatatcaaggagacactatcagcaatgaagttttcacagataagttatagttattacatttacattatgtaatttaggcaaaagatatttgctctaaatatacaaaatttcacattttttttttgttacctacttaatattgatccaccttttcattattttgtagatatgttttagtgggatgggaaacacatcccaggttttttttttttttctaatatggattggtttaacatgcccccaaagatagacaataaatttttttgcgaggaaaaaatctcactttttactgatataataatgagatgaatggaaacaaaacc

SEQ ID NO: 61596 - DNA, 4968 bp, Cannabis sativa
gtaaaataatttccaacagtagctacttccaccaatctgagaaaaaaaagaacctagtaaaggcatgccgcatactctctaaagtacataaataatgaacatgcgtaaaaggtcgagtcggttcacagaataattatctcccttaaaaataataaacacatgtaagaggtcgagtcggttcatagaaccatcatctccctcgtgaacaacaaaagaaagagaagaaaaaccacgcagtaaagttaaaaatccaaaagtggtgagatccaataaccaggaacaacgagtaaaatccgctagcggggggattgggaaacgcccccccggtaagatattagccaccgagtccaaaaaaaaatgaagagcagtgaaaataaataagttcagtacagttatcaaaaattataacagacacccatactaacataactagagggtgtcaccaacaaaatatatggtagtggaaaagcggagatcaactcagtaactgcccctagactggtcaaagtaggctctccattcagcgacctgctgaactgcttcaggaccgaaagagctaaaatcagtgttaggattaatacgccaaacgttgtacagagcctggtctaccatggcaccatcgtgctcagctgacctttggctggctgcctttagttcttccctcaattcctgaacacaagactagagttcgcctacctagtgctcgaggttcttcttgttcttgtgggcgctcttcatctagcgtgttgctttgtccttctcggccgcatccgcgacaagctgtgcacggatgtcaacaagctgggaatgggcgttgtctcgctccctcgtaactttgtcaagggacaggttaaatgtcaccttatagtcaccataggcagcaaggtctgcgactgtctgctcttgggcctccttccgctgcgagattaccctctaattctcggatgcagacatcgtgggaggacactagggtggatagcctgtccctttcccctttaacagattccaactcacctaggagtgcgtaataggttaaggaaaaccgtgaggccccaccttgtgagaccacctcttgagacgcgacgaccatctgcatgaagtatggtcaaacaaaaaaaataaaataaaataataacaaaggaaaggatggaagaaagaaaactcacccaaacagaggagcggaagagttgctcgcacaagcctagtgggggaaccccccgtatgccatcccaatcctcccttaaatattaggacaggaactattagaccgcccccgtataatgagaggcacatgtctgctcccaagaagggttccatggcacaaaaggaggtgtcatgcctgaaccacaccctcaccaaaggcacaactctctggttggagtaagggtcttgggtgctggcatcggaaggctaataagaggccgatgatgcatggcgtcccaccaagaatatgagagggttgtagtacccctgctgctcatgaataaggggagacccctggtgatggggaaagatcacccgggggtcctcctccattaggcgttcacctcctatatcagaaagggtggacaaagggacacctctgcggtagtcagttgtaccaaggtcagcctagcccccttgaggagaaggaacctgacaccttagccccctagagcgccccctcttttcccttccaggcgctatcgtctgggcgtcatccaccttcggggtgggaaatggcaccgaaggatccgccctccctaagttagctggccttgtgggtgaccctgagtgagcttggtgtttggccaatgcggtagcaacgggggcaaaatcgcttttggtgcccacttaagacatgtcagggggagggccgaagggcatagaactccaaggccctgagctgactctttcttctacatcgaaatgacgccctaaggatgaactggtcgaaggtttcccaccaatgttctttttaaggaaagtcttcgtcttggcgagcaaacccttaggcaagattttagggcaggcaggctccgactgatgtactgctggcacgaccattttctcactagagggacaacccccaatgattttcccgtagcgcacgaccactgccagccctcgagaacttctcttgcggaatccatcactacttcctctgctgccacatctccttcgtgcacctacaagggagtagcatcagaccttgcgtcgttcccggcctcctcccccgcctcgctcggaggaatgggcaaagattatatctttcccccctttatcttgtcatctgactgaatcaacgcgcttttctttaggcgggggtaaggacaaaagataattttagagcttcctgttgtagtccaccctgaatagtttcaacaagtcagatttgaacgccttctgcgttagggcgggggaaggtcgtgtcgctacaagaaaaaataatagtacgcaatgccaagagggggagttaatcaagcattttagggggttcaaggttatgccattaatgaggatacaagccaaggaatcacttacgaggcatacaaaagacctccagtactccttcttgtttcagaataaaaaagaagttctccttccaatgcttccccgcattagataggacgctcgccactgacgcatcagagggaactttcttgtgaagataatacgagctcctgaatgaagagttatgcttaaagttgtacacataatgtacctccctggccgtgggagccctgcctgccacctctttttaaaggctatgaagaagcatgtcagtatgatccacgcattgggcattagcttgagaggagctatgccgaaatagtccaagacctcaacgaagaagggtggagtggccaggccaccccaaccttgagaatggatttactaaaagccaccatgtccataggtggtaggttggcccggtcctccggtaaggggttgaaaccccgctccactgtgtactcgttgattgttctccaaatgtcagcttgagtcactatacttgcgacatcagccatcctgtatgggagtgtagggtcgcaagcagggagggatgtgcttgacttgcttagtagacgtggcttatccatatctgcaaagagcgaaggaggttagaacgggatgcaatgcatttcattcctttcattcgatgggctagagccttgcggctcgatctaggcttggagggggctttgccctctgcctgatgaatgaatgattccacagctaatggtatgggagagtagtcgggggagggtgggttaggtgggaacatgcactttaagtaagcaagataggtcgctgtgtcagcgtaaagttgcttaagatgagatagacatgaatgcgtgtaggcatgcccttgatcctccaagagtttaatctcttgtttaagcttagccaaacattcctgggtctcacaaattgcgtccaagcacttcaagcgctcggacatcagtaggtggtattacatccaagggttaggaccttcaccgttcgaatcagatgaaagtttgataaaggaatctccctcgagaatgtaggatggtctgcggtttgccatgagaagggagaagggaaaatgctctagtggggaactaactgctaggagactcgagggcaaactatgtgaattatataagtagccgcatatatagccaacataaagttataagaaatgaaacaactggtacggtttgagaagatacctgtcgggataggcataagttaagatgagcctgttgtgtcgggagtcgcaaagagaacgaaggtcgatagactaaggacgttagcaaaactcaaagggaatagaaactacagtgaaggatctaagttggaaaaatgaaggtaaggtagaagaattaaagaagtaaaggctatttatagaaaggataagtagttcaccaccgtaggatcgaaatgagatcaacggcacagatcaaacacgcttgcctatgaagggtcacatgtgcacacctaccctattgaagagtctcattaatacggtggtacacaatttgagatataacgtcgggcgaggcccacagtaaaggaaggtaaggcggttcactctcagtcaaaaagatcacttaaaaataatcttttagactgggggcaagtgtaaaccaccaaaaaaggagaactgaaatgtttccataaatagcaagcaggtagatgaatgacactgaatattctgtacaaacagaaaaggacaaaaggcggcccccgtgtcctttgcttgtgagtatcctatagttaaatcgcgttatgcatctctttgatgcatccacatccaggaaccacacaagccatgacccatgcccgtggacaacctgtctgcacgtctaacttgcccacgcacccaactagccccgcactcgtgtacgtagcctcaggactctgtccattcgcctttcctccctgacatcagcagaattactgagaaggagttaggggggacaacgacgactcaacctgcttatataacaagaataaattttgctccatccgaggtacaaaatgaaaggagcttttttagtgtaattaggattctagacatggcatgttgcttagggaacaatgtaatgataggtataagtaactagtcatagggtgcatggggaaagctgaatgtgtaaggcaaaggggcttcccatccattgtaggggatgtttttttttttttggcgagagggaaaaaacttctatcattgaaagagagtttatgagattttactttcaaacactttagagattctgaagttcttaattcttggcatcaaagtaaaagctccattaaagtttgtcaatattgttagttgaaaaagttatctatatcgttaacgagttctgaccgttaacattatgaaacactaaaaatgagaacattatttccacatacgtaactctatctacatgtctcttcgtgatttaatatgaacaaattttaccattaaatttagaaaacaatgaaaataca

SEQ ID NO: 61597 - DNA, 1177 bp, Cannabis sativa
aaacgaaagtatttgcatagcctaagtgacattgagattattgcttaatgctgattatatgttagtctatttcagagatgattaaataacatatgatttaggacttaaaagatatgaaaagagttaggttaatttttataatctgtcattcacattgagaaagagaataataattagcattaacaattgggtaattaaatcaacataatttttttttcctgatttctcatccttgattaaatacagttttattgcttaattttattttctggttcttctttgttttttttttttatcttcaacaaaaaaattattgtttgtcaaatagaaatataagtctaatttagtggtattcagttcaattccccgtgggatcgacctcacttgtgtgagtactgcttgattacgtgcacttgcgtagctattcatatatttttcgtaacacctattcatcctttctgctagcccattctgttgtggtgttcttatcacagacagatgccttccaatcccctcatgtttacaaaaatacttgaacaagtatgcacaaaactcaagactattatcagtccttagcttcttgatcctttttccagtttgattctcaagcaataccttgaactccttgaactttggaaaagcttcatctttggttttcaagacatacacccatactattctagagaagtcatcaataaaagaaatgaagtacctggttcctcctctagacattgtcctggatggtccctagagatctgagtgcatatagtctataattcctttggtgttgtgttccccaactccaaactttaccctggtggattttctaagtacatattgccaaaaactcctttctggtgtagaattctaagacctttgtgacttatgtggccaagcctcttgtgtgccatgtcattgcagcattgtttttttatagtggcattgactttgctttttcatggtacttccttgcacaacatatatgccatttattgatgatcctctcattataaccattgatcctttcatcaccttcattacaccattcactatcttgattgaacacccttcatgatccaggatagcaacagagatcaaatttctctttgttgaccgagattttcggtaactattaaaatataattatagtagtgagctgtaagaaagtaagatgagg

SEQ ID NO: 61598 - DNA, 1566 bp, Cannabis sativa
gcccgtccatatgtcaccaaattacaccctaaggcattaaagtgtgtctttcttggttattctcgtcttcagaaagggtataggtgttattgtcctgatctcagcatcatcaactactcctacttgtcaaggggaggatgatgatttgttggtatattttgtcacatcctttgcgcctgatacatgttctgacaagtctcttgttctttcacctacctcggtcataactcccacaatgcctacaccttcaccactccctcggcctcctatagtgtacaccaggcgtccccgtcctccacatgttgtttcatgtcttgtacttgcgggccggtttggcacagctgtactgtggaaaaaagtagctgtagctgtgctatgagaaaaaatagttgtagctgtgctgagagaaaaagccattgaatgtttggtaaatatatttaaaacagctgtgagttgaaaaagttgtatataagtgtttggtaagctaaatgattaatagtgttaaatatacaattactaaaatttgtatgatatttgttatctaaattattttaataaatttatgcatattaatatatttataattattttttattatattacaaattacgataatttttttcttataatatttaattctttttaaatatgtatggaagaaaagatagaaaatattaagagatatgcctaatattccataccagaagcaagtaaaaatagtgattgtatcaatgtccttgcataattacattcgaaggcatgcaaaacgtgatcgacattttgaaaaaattagagataatccagactattgtgcaagtgatcaaactaatattgaagatgaagatgagacaactagagcttcaaatttaaataaaatggataatatcagagatctgattactgcaagtttaatgggacataattcaaatatactcatgtgtctttccttttattttatttaagttatattgtcttttatcaaattaaatttgaattatttgttatgattaaaatttataataatttaaaaatatttaataaataatatacatgtagatttttattattattattattagtctaatttattattttttatatatataaatatttaaaagcattagcacttttatttgcgaatccttttgtttaatcttacaaagaaaaatttatatctatttatttagtggtatttttaaaaataaaaataatagaataaataaatcatttattaaaaaaaatgaataagctttaacacaaaaatgaaaaaaaaaaaataagagtaacttggtcccgagcgtctaccattatacctacaaaaagataaatattatataataaaataataaattagacttttactactcctaataatacaaatctacatatatattatttattaaatatttttatattattataaattctaatcataacaaataattcaaatttaatatgataaaagacaatataacttaaataaaataaaaggaaagacacatgaatatatcttaattatgtcccattaaacttgcaattagatctctgatattgtccatttcattt

SEQ ID NO: 61599 - DNA, 859 bp, Cannabis sativa
  modified_base (38)..(75): a, c, t, g, unknown or other
  modified_base (478)..(478): a, c, t, g, unknown or other
agtccatgaagcagcaagagtgacgtactcgtgtatannnnnnnnnnnnnnnnnnnnnnnnnnnnnnnnnnnnnncttgaagcgaggacgttacaaacactgaccttagttacaggtgtaatttcaagaagtaagacctccgaaaccgtctcttaaacatggtgacagcagctgtcttttatcagctgtgggctaatggaaatcggtgtatttttgacttgacttgtgctgctcccaaaagcattagtttggaagttagaaatattgttaagcttaaagttttgagtaaatgcccctttaaaaggagccaaagaaatttgtatttactaaatgtaattaagagttggtagtcctttgcttttcttggtggctgtcgtttggttgttgttggcttgtgccttgtttggttgtattttgcttgttttttgaataaagtttcctctttttcataaaaaaaaagtcacatttagtcacaaanaaattatgttgtgactaaaagtaacaatttttttgtagtgaccttacgcacaaaaaaagacaatgaattactttttttttttttttataaaattactttttggaaattatttaagttcgttagtttaatttgagtcataattattaattttttaatttgttggtaaaattatgtctaaataaattggtagcaaaagtacgtaagtaaccaatttttttataattaattattagtataaaaaaattgatagcaaaattcgtaagtaaaattattttttgaaaaataaatacctaaataaaaaacaattcaaattaattttttttaaaaaaataataatttaaaattaaaattaataaatattttaattattaatattatttt

SEQ ID NO: 61600 - DNA, 628 bp, Cannabis sativa
ttttttttttttttttttttgaagaattgtaactttcattaataaaaatgaagtacaatgttccttataagcctcaaagttttttttttttcaatacaatgagcatcaacattattatttctaggaacaaagttaatcgaaactttagggaattttgataaggtattacaaatatttttcactaaatcagcaatagtagagagatcttgtttacaattcgttattttattcacaagaatttttgagatgacattggcaataactataaatagtggagcacaaactaataggacgaaaatctttaatatgggatgcattagaccttttgggaataaggacaacaagggtgttgttaatagaagtcatgtcgacatcattattaaggatactaaaaacagcattacaaaaatctacccctacaatattctaattcttttgataaaaactagcattgagaccatcaaggccatgagccttatcttcagagataatgaaaaaagcagatttgaccttcttcgaagtaaaaggctcaaacaaaaataaaaattggctatcactaaccctcttatccaccaccgaaagaatatcatgaacattgtccatgttaacagtttgggtacagaataag

SEQ ID NO: 61601 - DNA, 1303 bp, Cannabis sativa
  modified_base (1132)..(1144): a, c, t, g, unknown or other
  modified_base (1243)..(1268): a, c, t, g, unknown or other
acatacatgtaacaacattggataattagttataaaatttatttaatttaaatcaaataattaattaatcaaatttcaaaaatccaaaatgaataaatatttattttgaaattattaaataattaatttaaaattaaacctacaatttaaaaattaagtttatatcaaacataaatgtcttttccaaattatcaactaacttttcaaatttatgttatttttaaaatataaaattaaatatctagtaaaataaaataataaataaatatcatttatctaattttataatttaatttaaaaaaaataataaacttttgaaagttgataaagtctctcattaatttttgaaaactatctggattattttattaaaatatatcatatttttaaattttaaatatgatcattttataaaaattatttaaataatcaaaaataaagtatttgaccttaaatttgaaaataagataaaataatctaattttaaaattaaaataaccaattaagcaaaaaaaatgtagaaattattttttcaggttcaaaatctactaatatccaaaattaattttaactgataattagatttaagatttaaaaaattaaaatttacataaaaaatagagattaaattccacgaaaaaatatgaaaaaatgaaaaaaaaaaaaaatgaaggctgctggtatatttccgtgcatggtggatggatgaggctggccgaaaaatttcggtggataaggctgctgggagcatttccatgcgcgtgacaccaagtgacacttggtgtgtgcgcacgtagaggagtaacccctccctaattttttctcaaatttcaaaaatttataactaattcaatttaaatcgaaattaagttctgtaaaaaagtaaattgcttaattttttccatactatccaaataaaataatttcagatcgtgaatccaattattttatgtaaaatttttgtaaacatcaatcaatcatcaaataaacatatagatcaacatgaatcacatccaaatcacatatttgtcgttttaaatctatatttcttgaaagtaaattattatcatggctctgaggtcagttgttggaatacattttatcaggaaccagatttactaacaagtatgtnnnnnnnnnnnnnaaatatgaattctctaaaacaatggaattaaacacatataaagttcaagaaaccttacattggtgtctgtggaataatatgtctccttccattcagatnnnnnnnnnnnnnnnnnnnnnnnnnnagagtattatcaagatctaagcccaattctccttc

SEQ ID NO: 61602 - DNA, 2490 bp, Cannabis sativa
tttttttttctattgatcttgtgtagttttatggtttttttcaagttgattatatatcccatttctttctttttttttttgcatgttttttttttgttagtcctcctattttatggttttctgtttgtttgactttgtgtcttgttgttgttttggttttgttccagtgaagattgttcaatcaactgatctgttcgaggacataattgggaaaaagattgttgaggtgtgtgatttcattatttcagttctaatgttttttttatgcttgttttttatgttctttatttttttcggtgttgttttagttttgttttcttatgtttttcataggattgggaatccaagtacacccgatcggaatactaccgttctagagttataacttctggttattactctattgttgaagatattaaaaaaattcttactaaaacctaattagatatgttttcaaaaactgtattggaagttgttttttgattgcgtagtagctaaggacattcttcaaatgtttccttgtctttgtatgcatgaccttttttaatttctgggtggtgtttgtctattattagtttcgcgttgttgatatcgatttctggatctagtattttactgttgttttcaagtttttctactatttcttcaacaaccagatttgtatagtcaattatgtcgaatttgacgttctcaaattttcttatttttgactctcctccttcttctaattggtgttcgagtgtgtatgattctgttgttgctgtgttgttttcaagcattgccacattatcttgatatggtgttgttgtggaagtgatattggggattacaggaggtgttgtgttgttgctctgtccgttcccgatgaggaaggaggcgtcgtttgtcccttgttactgttcacagtacaaaagaaaaaaaaatgggtctgggcagtataaaaaaaaaaggcatggacagtataaaagaaatttcagccatgtggcagtatttatataaagattaggaaaaaaatcagtatttttgtaagtttctcataactaattaattttttttttttttgatgaatcaggtgaaaattcattgcacaaactcttatttacatcctattagcaccaaaaaaggcctcaataatttctatacaatttatctacaaactgtcaaaccattctctatctttgttttttactttttttggcattacaaccatcaatcttgttttcacattcttcttcagctgctgcagaagctcggctggttgctgtgtctttccattccatatcagattgttcctgcttctccatatcaggtatactagtgcagtgatgcatactgccttgacccctttcctgaatttgttttgccttgccttgtgtatgatctttatcaaattccccaatgtatctgccttagtgtgccatttgagccattcctttagcagttgaaaaacattgctgagaaaactgacacttaaaaaacagatggtcgatgttttcttctgcaatattgcagcagggacagatgttcgaatctgtcactttgaatttgtacaatctgtctttagtctttaacctgttcaacatggctaaccaggttaggaaactatgtttcgggatattgagtcgtgaccacacttcattactccatttcactctttcatgatcaggtaccaatcttctataaccggctgctactttgaactctgctcttgtaaattcctctatctgtagcttttcctttactatgtcccttatatccaccatttttttccagtaccagctactggtttgtgggactttatattctcaccagttatgatttttgatgtatacgcaatgtacccatttcacccagagattgtccttcttgtttgccactgcccaaacatgcttaaactttgttgcagtattccattgagcaacattcagcaagcctaagcctcccttttttttcggtttgcataatctttcccatgcaactgaaccagcccctatcattacactctttcctgtccataggaagctcctgcacactccttctatctctttaatcactttcttagggagaatcatgatttgactccaatacatatgtattgtaaggagaaccgagttaaccaatactagtctgcctgcaaaagacaagtttctggttgaccaaactctaattctctttgtcattttctgagcaaggctgatacaatcccctgctgcaattttccttgcacagatgggcaccccaagatagttgaaaggctcctcctgcctagaaaaaccagtcatatccagaactcgtttaatctctttttcatccattccactgaaatatattgcagattttgcattaattggtgttaaacccgaagacttagaaaataatttcagcccttgcatcaagagataaatgctcttaaagtcccctctacaaaatagaagcacatcatccgcaaagctcaagtgattgagcttcatttcagcacatctttcatgg

SEQ ID NO: 61603 - DNA, 2461 bp, Cannabis sativa
tatatattatattttttttattgtatattagaaaatttacaaatttaaataatataaaaatatattataataaataatattatatgtatgatcttaattttttaattctcttaagcttagtaagtaacaggttagagctttttatatttgtcttcaaagattacaagtattaacctttaaaagcaatagatattacaatatatattattaatactctatatactatattatttattatactcttattttgagcaataaatgaacagatctatctgtatgatacttgtacaaataaaaacattaaatgatctcctcacaaagagaaaacatgtaaaggtcttctcggcaatcatcaagtatgtcaaagtgatggacgagatgaatgtggcatcaacaaagtgcatctcgcatatcacgagaaataaggcatgacttacacatagaggaaagccaagctcgatcaacttagttagcacaagatgtacaatttgagaaagtttacttaccagaaaaggaatcattcatccaaacctcattctcttagcgatcaacaagaagaattaatttattccagtgattcatgaggatgttcgcattcagtatatgctagttagtcagcgtattcttcaaggagcaaaatgttaagttaaatttgctcggttaaaatatgataaagatccagatcataggataatagttattcatttcaataactaattgtaaattgttccaacctatttgtagatacatgaaacatgaagaatgtccacgtttgataactatattttagataagaataagataattgctatcataatcatataaatagcaaccctcatattgtagaaggcacaactaattttttaacttagagaaattctgtcaaattatttaatcctgaaataagaataactcgtggagtatgtatattttaactataaaactacgtaaaaatttcttattttttttttttttaatagtaatatccttaaagtatttacactactacaaaagccactattcccgacggtcctaaaaacatttttttggggaccatcgcaaaaaaacttaagtgagtgtttaaaattgtcgggaaagattgggtattcttgacggttttaaatactcatgatgtattcccgacgatttttaagcatgccttatagattatgatttttttaaaggggaattaccgacggttaaaaactgttgcactataggataggcaacgatttttaagcatgccttaaaaattgtaattttttaaaggagattgtcgatggttaaaaactgtggtctatactatatgccatatttttaaaccatagccacggtttaaaatcgttgcctatagtgttataggccacaatttttaaccagtgttgacctcaaaaagtgatctactgacagcggggttgtatgaagaatctgatgtttgccacgtattatacaacaataagaacagtaaagtaaataaggcacgaatttttacagaggttcgatccccttagttagcgggtaatgacctactcctcttttggttgtattgatacctagagataatactatttatatcactatggatgagatttgatatagctctctgtaagattacaaagcatggatcaagtaggcaagtttctattgagagaatggtatagccttagaggcatgtgagagaggaagagagaaggccctcttgggcgtgtacaagagagggagagaatagagattagggtttcagacttagagtgatttggaggctagaattagacttaggttttctaggttagagttaaggcctttatataggaaaccctaaaccctaatttacaactgaaaccttagatttttacatattaaattgattaaatacaaaagactaaattcccatataaagtagggctgcacatggattgggttgggcgggttgaagctattttagcaacccaacacaactagatcggcctataaaatttcaacccattcacattatttttattacacaactcaacccaacccaacccaaatattacaggttgggttgggtttggttgaaaaccttatttcacataaagaaaattagatgttaatataatcaaatacatacctaacataaaagaaatataaatttcaaacataagcaaaatcatccaaaagttacaatattacactcatccaaatttcaaaatcaaaatataagtcttaaaattcatttaaagttgtcattacaaacttaaaataaaattgaaaatttccataaagtaaattaatcaacaatgtccattgtcttctcttttgatggggatcctttgaccataaatttattatctacaattcaaaaagaatattagtaacaatatataaaataaataaaaaagcaatagcaatatatagccaaaataaaaaatcaataacataaatagccaaaaaaatcaatagcaacttatttttttgacat

SEQ ID NO: 61604 - DNA, 1117 bp, Cannabis sativa
  modified_base (176)..(189): a, c, t, g, unknown or other
ctccaagtcagtgcgccgaaatcgaaggtttccataatcatcgaggtcccactcagactctggcttggtgatcacaagcatcatatcagtcaatgtctaatcgcccacttgacctttgagggaggagtaatggcattcgattgattgtaacccaaacaagttgttgattgcttcannnnnnnnnnnnnncggtacttcacgcacaatcacttcagtatgccattcttgggacaaaaaattggcgtagaattctttgacaacttccatttccgcctgtcctcgctgcttgaaaaaaagtccccaattcctcttatgaaccatttcactaacccattcaggtaactcgtcaatgtcctctatatctgccactaatccttgctccatataaattcccgattgtccaccttatcgtaatactttgtctcggttgcctagcaatgaaatttaagaatttcatgaagtgacttctgtttttttctgttggcaaccctcttaacatttggtattttctcttctttttctcttttttttttcaattgcacactaccccaacacaacaaatttcttctctgctttgtcttctttacaactatccagcaccacacccctaattccaacaatacaatactctagcaatgatccaatcttgctcaaaaatcccccaatctgaccaaccacaccaaatcatcttcacagcattcacaccaaaattcttatgtcactctagaaaaatttcaaagccacaccaccaattatgaactacaccattccaaaatatcaattccaaatcaaagaactacaccaccaattatgaactacttcaataattcccaactatcaatttctcatcaagaaattcagaatattcatggcaatcaactaaatcactcacacatcaaacaaatacttgactgccatagcaaaagtataaaccaaatgacaataatggttgaccaacaaactagggagagtcgaatgagccgttgatgatggtgctttactcgactggttcggagtcaagcggagcttgagttttgggttctcggagtttgagttgacgagaagattgctgggtgctgttggatgaacggggctcggatggtgtcgactggaatgg

SEQ ID NO: 61605 - DNA, 1672 bp, Cannabis sativa
  modified_base (886)..(886): a, c, t, g, unknown or other
attggttagataataccatatttagtggcatttacattttatgccatatttatcataaccttaataatttttcccatatttttgaaaatagcccctcttaattttcatacattacaaaattacaaagtaaaaaaaaaagtacaaaattaccattttttaaaaagaaatttgaacgaagaaaaaaaaatctttctacaccctctattttataaaaacagtaatattaattgctgcaaaaagatatagtaataataaaaaagaaaatatgataatatataatttgtttgaagaaatgatgtaattttattaatagtaattatctaaaataaaacgaaaaacgaatcaactaatcgactgtttgattttcggatggtttgactaaaaaaattaacataaaatcgtacgaaaaagattgcagcatcacagttaactttaagaataattatattcagtttcctccatcactaagaagacacaataatatctcttgccgcattcattcaactccttatcttgaacatttaactattgtgcataggtacgtaattgtaccactaataactcatttagccgaagagaacttgttattctcaactaatagcaatatgatgactagatatcaaagaataaataagatggaccaacaacaaaataaaattatgtaagagacaaaactaatggtaataacaaaaacctaattgataactaatttctgttaagtatgtataaatcatacaatacaatatacttcaaaaaaaatatattagtaggtattcatgtagaatataataggaatgattctaacaaaaaaggaaaagaaatagggtaaatactattttgaaccttgtgttttgcagaagttatcaattagactctctattttgtnaaatgacaaaatagaccttatattttctaaactaggggaaaataggatgctgagctcaatttttaacaattttattttttaatataatcaactataagaaaatttcgaacacgaacaaatatagaaattgtaattaattttttcataagatcacttaatcagattattattaaattttactttgacataaaatcagttcaggccctatttatacaattttagaaaatataagatttattttgttatttaataaaatacaaggttcaattaataacttttataaaatacatgatccacaataatacttagcaaaaaatatatgcgaattgaagcacatttaaaagttcctttaaaagaatgctttcatagttccccacaaatctcacattttttctccctatgcccacacatctcgcgggggtctcgccatcaaacaaaactaaacaaaaaaaaaaaagaaaaaaaaaaaacaaaagaaaaaacaaatgtagctcctataaatgtgtaaattgattgataaatgtgtgggcaacggtggatctggaatttttgtttttgtttagtggggcttaaaaataaaattacatttattaacttatattaataaaaacaaaaattgtaattgttatatataaaatgtgtttatctaacaaggattgattttataaacatatgaaatattaatataaaaatattaatattatttatgttagattaatttaaatatataaaattactaatattatttgattaaatgtatactaattttagactaatttaaatata

SEQ ID NO: 61606 - DNA, 792 bp, Cannabis sativa
ttggacatagtgaactattttatttacgaattgaaataaatatttaagaagagcaatgctatgctatgatcataatgaataagccctaagatccaaatgatgaagtatagctaacttggttcaatcttattcaatgctatagtcaatggagacaaacacataagaattgagagagggagattgagatacttaagaataaatactagcatattataaacaagaaccactcaatcaaaccaattgtttcaacatatctaattgatgaaaatgaatgcagtcaaccaaaatatagattaagctatatatatatttcttaaaaatttcaatgtaaattcaaagttacaagcttgtttttgcagtagtgccattatcggaccaagctataaatatactatatatatatttcatttcattcattataattgatcactccattgtattattacttgtcaaactcacattttatcctatagttttttttgttgaaatcctacttgaaacttaacttaaaattaatcaaagagacatatatattcaagctaattatataaatgtattgaatatacatgtatatctaaattctactgaaatttcggcaacataacaactataaatcagacgttcccgaaaaaaaattaaccataaaatcaaaacatataacaatctacaaaaatgaaaaagtaatttccacccattcgaccgcagtacatgtattcacagaacctacttcactatggatgaatatttaagatattcaaactcatctagcatgcttattaattcataattaat

SEQ ID NO: 61607 - DNA, 1496 bp, Cannabis sativa
taatagaaatatagatatatatatattaaaaaaaagataaatatagatatatagatatataaatagatagatgctctattgtaggggaggaatgaacagtagaataaaatagagaatattttatctttcaattatcacagtttaatttttgtctcctattttatttttcttaagaagaaataagttctctcaactgtagaaactgtagcaaatatgtccatttgcggttgtaaattcttcacggtttaaaatgactattcgatatataatactactcttaattcaactggccaatgtaatgaaaaatgatttttgaagttaaacacaggaaaaataaagaggtgctaaagaaaaaaaatttcaaagtgcaatatattactttgcaaaagaagtagaaaaataacattaaataatttacaccacgttattttcaaattataagccaaaaaatggtatgagagaccatgttttgctcacttaagtaaaatttaatcaatataattttttcaacttaaccgaaccgaacagatctcaatatatgtaatgaaataattaaatttaaattcaaaatttataaaattttagacattttgattgaattaattaaatttattcaacaaaaaaatttgaatttagagtaccaaatatatatgattttaaaatatacaaggtaccaaataaatattattgaaaacacagagtacctaatttgtatttaaaacacggtaccacatgtatagacacctgttatacccaaaaatcggctacatttcagaaagtgacactccaaatcagtattgaccatcgaatattcaagaggtactttaacaaaagagtcaagaaaaggctctttgatgttggagttttggtgttaaggcgtgtatttgcaaacacacgagatccagctgctggagtgtttaacccaaactgggaaggtcttatgttattgaaacagtagttggaaccggggtttataaattagctcggcttaatggcccgctaataaaaaaccactggaatagtgaacatttgtgaccctattactagtaaatttaaaatgtaaatgctttatttatctctgtaatagttggattcttatattaataaagttaaaactttttcaagtaattacaaagtttatcttctttaaaattacttgagggcatatatatgtgtataataactggaatccatctagaaatacatattatgttgcaaacccaataagaattaaaaaaaccttttctttagaaaggaaaaatcaaaatagcagttcatgtaaatgagatcaactcacaaaataacataaagctatatgcgaattgaatgttctaacgactcgcattaatctggcatgtattataacgaggtacaagaatgttttgaaaaataatactaaagctaaaatatgaatagatgatctaactattcatatgagcaatcaaaagatataaaaagtagttccagaggtgaattattcaaagtgttttttaaat

SEQ ID NO: 61608 - DNA, 804 bp, Cannabis sativa
ggggtatgggttcgtgtccatgtctatgtccgaattccactttaggtcaggggcttggtcttggtctgggatcgagtcccgagttcgtgttcaggttctggttcgagtcttagtcctagtctaggtctaggactgggtctgagcccgagttccggttctaggttcggtctagttctggttccaagtcgaggtccaggttacactctcgatcatgttccagggtcctgatcacgttcttgttcaagtttcggttttgggtcccacgtttgggcttgggtctaggtccttgtccaacttcgggtccttctccgagtccctgatcacaacatcgactatgggtcttgtccaagccccggttctctgatcacgggacaagatttgcatcccaatcacgggtcccagtcttgtttcaattcatgtccgaggtcagggtctaggtttaggtctaggtccaggatcaagactggggtccagttcggagtctcgatcccagttctgggtcccgagtcatgttcaattttatggtctgaactcaggtctgggttcaggtcccgagtcccggttcgggtttggatttagattttggaccgaatcccagggtgggtctttgaccgagtctgggtcttcgtccggttacagttttgggtgtaggttaatgtcctggtcatgtcgtgttcttgggtcctaatccgcttttagtttcgattccagtttcaagtcacgggatacggatttgggtcgagtttggatccgagtcttggttcgggtcatgatttgggtctgaggcaaggttcaggtccgggt

SEQ ID NO: 61609 - DNA, 1537 bp, Cannabis sativa
  modified_base (370)..(374): a, c, t, g, unknown or other
ttaaaaaaaattaatttaaatttactaataagaaaatgacacgtggataataatttaatatttaacggtcaggtacctaaagttctagaaatataatttagatattattacagtcaaaaattaaacttaattatttatttataactgagagttaaacttaaatatttatgtcgtaaattactctaatattggtataagaagaagaaaaaaaccactttaattgactagacatttagatgggataagttgaaaagtacctcttttttgtatctattaattaaaaataccctcatattgttttttattaaaatatacctatttttttagtggattgcctaatatacattcactctctacttaagtctagcannnnntttacataacctaaagggtctaatggggacatgaaccataaaagtaggtatatctaaaaaaaatataaaaatgaagataaaaattaaaacaaataaagtaaagtgggtacatgtaatttgctccatttagataaatccttatcacggcccaataggctaatcatacccagcccaatcgtgtggttatcatttgcgttttggtatgggcctacatgtttaagcgaggcccaattacatgacccacttgtttctatttagctcaatgttacctttggttcaattaagcctattctagacatataatgatatcaaattaaaaggtaaagaaattatgttaaattgatttttatgattaagaaattagatagagcttaattataaacacattattttaatatgaaaaaactaaaaaaaaaattagtgtagtctatcgtatctcactatttttagtgtggtatcatagactcctacatatatagaatgatttagagttctattggatcaattttgtgtctaaactctactattttttaaattttagtgttccattgaaaaaaccataagtatgccactaaaaatgagtatataatttacaatatatataatttgtacaataaaaatttacgtgtcgtattgtgctttactctggcctattttttacgagcttaaatttatactctaattttctacatttttacttttacaattgatcaaataattactaaaattatatataatttttttttatagttttagctattttcatatagtttttcaataattttcacgtaaaattatattaaatttcattagaagtattaaaaatttgaatataaattattattaaaacaattattaaatataaggtttttaacatgttgtgctttcagaatagattatttatacttacgtatgatgtcttttgggcttgtcatgtcgtgtcgtgcttaaccacatatttttcgtctcgtttcatactcaagtacatattattcgtgtcgtgttaatttatagcgttatatcgcgccgtgcttaaaccctatatttttttcgtatttagttgtgcttgcacctcagagactcgtactgtgtcaaaaagctgaacttatatttagagcactgttcaaaaatgtcttatcatcatctctgtaaacatcatgtac

SEQ ID NO: 61610 - DNA, 3399 bp, Cannabis sativa
aagagcaataagctcttggctcacacaggagcatcgaaggggacaaacccccaaaaattggcctaaagccaacgccacacaggacaacgccacacaggacatagggtgcacagcaccgacaaagctaaacagaataaaatgatcaaaacaaatcaaaacaaaacataaaatgacttcaaaagactttcccctaacacaaaggaggtgacgcgagggtccaagacaagcagaccaaaggcataggaacgctgccatcttccaaaaaaaccagtccacactctgccatccaaaggggttctgaacggtgaggcgctaggacaagggaagcacatctctttgggtaaaacccaagtcccctcctctacatcaacaatactctgaaagctaaccacgagccattgtgcaccagagccaggtcgcctgaaaagaaaaccaatgaacacaaagatctgataaaagggaaagaggaacaactctccaaagtctaagttttcgcctaagtaggaccaccgcatcttgccgtccccaaaattggaagggagaaagcccaaagaaacccaccactgtcgccttccatctagccaagagaccggagctacccacgaccaccaacctcggacttgagagacctcagcagaggctgtcatccaccgtggttggcgaccacaagcttgaagacacaagcaacgtagcctcgatctcaaggaaagagagagagggcagacgctcatcactccaaggagcaaaggccccaagcgccaccagccagaatcggccggcggcgcccaagcccaaaacctaaagtgtgaaaagaaaaagaagaagaagagaaaccctaacctgagagagagaaaaaattaaagtaagactcgctcacatcattacttagatgagcctaaaaagaatactattgtaatctaccatttaatgtgaacattttaaaatatgggaagtatatgtttttttgctatttctagaaaaaaaaaattgtttttttttacttagctagaaaccatttggttactaatatagtaattagttactcttttataattttttttaaatcttaattaactttcattttagaattttgttaattgaattatattatattgtatgattattaattaacttttaaaataataaaaaggtatataaaataattggtacataaaaataataacttgttatagtacgagaacttgttagtttcgaaaataatttttaagattacctaaatgtattttaaattataatttaccatataataatttaaaaataactaactaattagtaagatgtatataaataaattttaaaggtaactaaaatgtatcattatatgatataaaaattatataaaggtaactaattggtttcttattaacattattagtaactaaaaaattacttttaaaaatgcagaaaaataaaataaaaaactaaaaaatatcaaatttaaatcagcaatagtaataacattattataaattagataaagaaaatgtatatcattgtaaacttcacactcataatctaagaagatttaataacaatacaattgtgcaacacaagcccaaaatataatggcccaaaagtctcaaaaacatataagctgatgaagtgttaatgtagttgactagttgtgtgtaaagtgtcatggtaattaggactaggagacttcaaattgcattaacaatcatatttatttatttatttgaggaaatcttaatgatgtcacatttatttatttgaggaaatcttaatgatgttattattgtaattagatacgtgactgtgagcataattttttataccattcatagtattataagtgcgaaaagtaaaaaaaatcgtttttaatttttgtttatcatatatatatcttactattataaacgtgtggtgttggtgtctataatttaattgataattttacttttattatatatctactataattatattgaagaatgcataaataaatagattttatcttttctattttatcttttatgttattgttatgtttatttacaaatttatatgctaacattgactgtaagttgtgttttattaacttatttcactaaatttttttgataaataactaaacaaataaaacgtattctcactttattaattgctaatggaaaactaaagataaaaattgataaatatttatatttataaatttatttttgttttatcataaacaagattattatattaacgaaatataataatacattggattggatataataaatagtaatattgtaaattttaaagtaatattgtagtataaaattagtgttttttgcaaatacatattgactttttattttttaactaatatatttatattggggttatctgctaagaattacggtagagcaatttatgaatgtcttcgcggtggacttgattttaccaaaaatgatgagaacctaaattctcaaccatttatgcgttggagagaccctttcttattttgtacagaagtaatttataaatcataggttgaaacagaggaaatcaaaggacattacttgaatgctactatgtggtaatggtatctatattgactatacaaattttacccctaataaaattataaaattacaataatactaatattttgaacttctctctttatagaagtttatcttgttttgtatctattaaatgacaacacactttttaataacacataaactattattattattattattattattattttgaaataaagtgtgttaatggtattttttttttttttttgagtgtgtggtaatggtgtctagagtattaattgctattagacaccagtgcatagtatctctagacatgttactttgcgattggtcaatacagaccgtttaaaattctcaagttcagtcacagttttaaaaatctcggtagcgataataaaattataaaattacaataatattaatatttttaaacttttctctttatagaagtttattttgtcttgtatctattaaatgacaacacattttttactacaatacccgttcatagtattacaaattttctcttagtttttttaaaatgattacaggttaaaaatttaataatatatatcgcaggaagctattctatggtgcactccctaaaaagaatgtattgatgtacccccttctaattttttttcattggtcgtgtatataatagttgttaaaaatattctgcaaaattttaagaaattcaaaataatttagattatagaaaggagtgttcaaacaaactacaatatctactttaatacttgtttcttactattctatctccaatataataataaaatatatattttgcaacttgtactataattataataagatgtaaaaattaaattatataaatttt

SEQ ID NO: 61611 - DNA, 671 bp, Cannabis sativa
ttctggttcaacaaatttaaagacatcatcaacaacaaaacgacatgtcgttttttctttaatttgtatatatttatttattaatgtgatgtatttttgaaaaaatatcaaaataaaacaagaagagatcttcgaccgaacttcaaactcaaagcttttagtgatagattaccttgggtgatagcaacgaagaggatatctaaaatgaatgaagtgaactgagtccgttacttaaagcagtcgcaccggcaatgttgaagttgaagcagccatggttctgagaacagaatgacgaagatggtggaccggtgatctggtgtgagccctaactttttcaccgttctttctgtgttcctttttattttcgctgaattgtttttttatttctaataattttttttgaattatttagaaaaaaaaaaaaaaaaagctaattttttaccgttaaaaattagcttgaactagtgagatggttaaatttaaggacttttaactaattttaatcaaatcataccctttaaactttaatatgtaattagaccaaagtcttaaatctaacaatctcaatagttcggggagaatttttaatgttcaaaaaagtttagggggtatgatttggtaagttcgggaaaaaaaatcttaattagcaaaaaaaaaatacaaaaatacag

SEQ ID NO: 61612 - DNA, 720 bp, Cannabis sativa
tttttttttttttgatttagttttgcggtttgtatttagcccatactatgagattgatttgtaattttttgtccaaaattgtatagacactattaattcttacgaaaaattacttttttttctattttttttttgtagatctgattttttttatagttatatatatttttaataattaccgtgtgatctactagtaatagtattagtggataattaataattttaaaaatagtttatttataaattaaaatgtaattttaataaaaagaaataacatataaattattaaatattttttttattttgaaaaattcaaaatcctgctttcacgtccattaatggtggactagaaatgtccaacgtaaaagtagactagaaatacttttttagtccaactttaatggacttaaaagagagtttttgtggtagtgtttagagtgatggtatctctatcttctttttctagtgccaaggtttatcacattttaagagaaagtaatgtaacgacacatcttcttgctaagaaggctctaggaatgggtagagattgggtttggaattgtaatgaatccaatttgtatatcttctgagtttgtaactgaactttctggtttattctaatgttacaaatcagttgtttcaaaaataaaaaaactcacaaaatcaatcaaatcaaatcaatgtcacccatctccacaagaggcaaatttcatttatttt

SEQ ID NO: 61613 - DNA, 1591 bp, Cannabis sativa
  modified_base (1478)..(1479): a, c, t, g, unknown or other
accactcttgcctattgaattcacacaaaagcaaccagtaaagccaagacgcacacgcacccactctatttggacaaagaagccttcattttagaaggaaagttacactaggagcatgctcgcgaaccaagaaaacaagggaattcattgctgagggttcccaacccttggacatctcaaaaaagggaaaacatggctcctaacggccttgcttggggtgcattgatctttcctcatcttcttgctttgaatccaccacataagaaacatcccttgtccaatcatacccgctacaatctgctcgccagtgtcagtatccattggagccaaataaataagtgttgcttccagtctaatccttttcccatctttctgagccataaaattcttcatcttggaggaacacatggcacattcttggctatactaccaagaaaaaaaggagataggaacttccaccaaagattatgcaattatcaaccccatacccccaacttgaaccattgatggagactgatcctcatccttggagcctgagaattctccttgagtaagttctagagagccttccagaataacaatagacttaagatcaccatagatgcatgaattccctatgttgtagcatcgttcactggacttggagcacgcccctaaggggttttgaagggggtcgaggaagagccctagtaggagtagttagttctccgagaagcaaaaattttggtccataatgcaataacaaaccaagtcccataagctctttacatattcctagacgcaccttcaaacaattcctccaggggcattacaaattttacttttgtgacctaccttcccacaccaaaaacgtatatatgggagtcgattataccgaaagggaagccatattttaccacctttctttgggaataaaaaacatggaaaaatcttggaatgagtggagttcatgactttgaaatgaaaatagccattggctgccattttaggaatacccagatcttgaacagagatgacagtatcagctagccccacaagtttcctcatgtttggaataggaagatgaaaaactcgaccttccaggggaaaccagagcaattaagattcccaattaagaggaatatggtccatccgtgcaagaatcaagaacccttgctgcaacacagagttggccagagggtggagcggccagagcctaggccccaaaaaaattaaaattaatattatatatatggaaactaatatgtaatatattaattttattttaatatgttacatgaaatatttatagtacaattggttaggagaattgtatgttagtactgtggtcatgtgttcaatccacaatagtgacacttttaatttttttttttaattctaagttttgcatttatatatataatgtacatagtgattattttaaatttgtaaagataattagggtttttttttgggaaaattactccatatactatttnntttatttttttttttaatttacagtttgggttgctccggcggtgtctctggtagtttttatgtgggttgctatacagatttttgttgtaattttggttgctccgttagttgc

SEQ ID NO: 61614 - DNA, 877 bp, Cannabis sativa
  modified_base (615)..(619): a, c, t, g, unknown or other
ttaaccagaattcatctggaaatacatggtataatgcaaacccaccatttcaattttttttttttttgaattttaaaggtttttgactaaacctctttgagaaagagggtggaattgttataacttcctgaccaaacctttttgacgagatagggggtcgaattgttatagcatcctgatcaaacctttttgatgaagaagggatcaaacaactataatttttgattaaaaacctatctgacgggaaaggaaaataaaaaattataaatgagatataactcataactcgcgtataaagctgaatattaacagtttgcgcgagctaggaaagtactaaacgagacatcaagacgtcttgataaaagtacttgaacctagaaaatagatagataatctaactattcatactagcaaatagaaaatatacaaagtgataaaatcattaaaagtatattcaagtttgcttaaggcagattataactgccatagcgaggcagaattggcaactgctcgaaagttaagaagtttggtagataactacctacttaaacaggaaagattacaagcaatggaaaaacctaaaagtactttacatttgatcaaaatatagttgtnnnnnttgtgaataaaaacgcaagcaaacgcaattacattaggttcaaatgaaaatagtacaaggcatttaagataagagaaaacccaagttggtttataaacttgtctttacaaagatgccactagggcaaaccattaagccatcttcctaaacgaaaaatacaagaggggttgataaactcgagaaagatcttctacatatagcacggagaaagaccgtctgcagttctctctctagctcctggttctcgcagctacctca

SEQ ID NO: 61615 - DNA, 683 bp, Cannabis sativa
  modified_base (640)..(658): a, c, t, g, unknown or other
aatgatactatactactaattaatatggtcaaggatttgatctttatttaattaatcatagctcatcatcaaaagagttgtactatataatatagtatatatgaaaaatattaaaatgaattagtgatgcttaataatttttttgggtgtgatatatattggtataattaagtatatattgggtttcatataatttaatataataatttttagaaaatatcgctaaccaatcacaaaaaatacgtctaaaaagtactatgcaccactggtaccaaataattaacaatgttcatgtagtatatatattatcgatatgtttttagtacttcccttaaagaggtgttcatgtggactctcgatctgttttaacatttaagagattttttagtttattttttttcatgattgcgtatgttatgactatttaattgtataaatttttaaaaaaatttttgagtaatttataatatcaaaaataatatttaaatatttagttacaagcgctacttttttatatgtattaaataattgtttaaaccttattttgacatgataattatttgaaattttctaaaaaattataagtaatttcaaataagtacaaagtaaaagattataaaaaaatgggtaaataccattnnnnnnnnnnnnnnnnnnnaaagttaccaattggaccctgtgtt

SEQ ID NO: 61616 - DNA, 1669 bp, Cannabis sativa
  modified_base (97)..(103): a, c, t, g, unknown or other
  modified_base (748)..(763): a, c, t, g, unknown or other
ttttcaaaattttgtaggatatcttaaataactataacgtacatgaatatgaaaaaaaaattacactaaatcttttttctggatgccgaaacaagtnnnnnnncatcagtacatcccttttaaggagtgcattatagaatcaccccttaatttaaatggtaaaacttttaaaaactcttaagagattcgaggttcaatccctcataactacacattaaatatttttaaaaaaaactaaaatgtagaggttgggaattgatccgtgacctctttttagattgaagttaaactttttaccactacactaaataatttttattatattttcttctaatttaatattttatctatatattaatatttctttttcacaattttgaggccttgagcgttcaggagcccgaggcacacgcctagcctgcctaccctcagggccggccctgagtgtatgttacaaatatctacgggtatatacactataaatagtacggtaattttcggcataaatacctaactaatatgtaataatacttaagttataattttagaactcctgtagtaaattattgacaatttctgattagtcaaagtcattaaatttttattatttaaaaagaaaatagtttaaatatactaataagaaaatcacacgtgaatttaatggcttaatatttaatgttaggtacctacagagttacataaatataacttatgtattattattgctaaaaattaaacttaagtattnnnnnnnnnnnnnnnntgaaacttaagtatttatgccgcaaattactataacatattaaatcaaacttagactaatttgccattttgcaaataaatactaagtttaaattttagcagtaaataaaaatttaatgacttaaactaatttgtgactgtcacatgtcaatttacttaacacttaagagctaattacctacataagttttagaattatattatcgtcaaaaattaaatttaagtatttatttagaattagaaattaacttatgtatttatgctataaatcactctaaaacttaataataactcaataaaaagatgctatgacaaaattaattatgtttttttacatctgtttgtgttagaaattatttttaaattagttattaaaaaaaataaaaaatttaacttaaagtcttattttgtatactatttctaaaaatatagaactatttttaccattaaacaagacagaaaatttagtcaatatattttgtaaaataccaactaaaataacattaacccaaaaattaatgattaaacattttttttgtaacaaaaaaattaataattaaacattgattgttattaacttattatgtgtaaaatatatttaagaagaagttagtttgtaaaacactccgtgatcaattcttttttttttttagagtacatctccatgattgattcaatgtactatatttttcttttctatatcttttagggagagatattgatagcaacaacacatgtccaataaaaaaatgtattttcaatgtcaacaaagtaatatttcaaagttcgtgcactcaagattatcttggatgataaactagtttggatagataatttttcatcttttctctatgtataaacttttgagtattttcaatgaaagttcgttataaaaaaaaaaaaaaaa

SEQ ID NO: 61617 - DNA, 715 bp, Cannabis sativa
aaaattaatatttataattaaatatttttaataactatcaataataaataactcatcaaaaaaatattttatttgtatatatataattagtggatttttatttgcgtatataaattttaataatttttatttcatataaaatttaaattttaacttatacttttatttttttttctttctttttatattcaacaaaaatatactatcaaaataaaataaattttattttaaatatttagatcaaaaaatatgaatataatattttaaggaaaaaaaatactaatataataaatcatataaaattttatttaaaaattataccttacttaaaaatgttataaaaataaaatgaaaatcattatttaaatgaaaagaaaataatattaaaaaaaattaaacacgtattaaacttatttttttatattatgttatgtttttttttaatattataatataaaacaaatattttgtcggcacaaataaaacttaccttaagtgggctatcttgcttcccacaaaagtattttctttccattataaaacaaatacttttctcattatctgttttattctattataacaaaaatatttttaaagttgttaaagatattttttgatgtaaatatgttttattattgtataaatggtgtggctatggtagctattgtttttgcgtgatgataaatgaggacttttagattttaatatataattt

SEQ ID NO: 61618 - DNA, 624 bp, Cannabis sativa
  modified_base (207)..(209): a, c, t, g, unknown or other
gagatagggtttcggctggaaagactagtgatttttcagtggatgaaacgggaatgttgcgattcagaaatcgtgtttgtgtgcctatggatgatggtatcaaaggagagataataaatgagtctcgtacgactcctaattcagttcatccagggtcaacgaaaatgtatcaagacctaaaggccatgttctggtggccaggcatgnnnaatgacattgctgagtatgttgcaagatgtcttacatgtcagcacgttaaggctgagaatcagaaacctgcagggttactgcagccattgaacataccagagtggaaatgggaagatattgctatggacttcgtggtaggtttgcctagaaccatgagacagtttgactctgtgtggatcgtagtggacaggtttacaaagtcagcgcacttttttcctgttcggacaaatttctccattgaccagtatgctgagttatatgtcagagaaattgttcgtcttaatggtgtcctaaagtccattatttcggatagagatccgaagtttacatcgagattctgggagagtctccaccaagctatggtactcaattaaagttcagcacaacatttcatcctcagacggatgggcaatc

SEQ ID NO: 61619 - DNA, 723 bp, Cannabis sativa
  modified_base (683)..(693): a, c, t, g, unknown or other
aatcttatccccaagttatagggatttcctcgatgacccacggtgcgaaagctgaattcgctaagtgttggtcgctatgtgcggattgctgattgctttacctcgggcatgcatatgaggtatcctgttctgactataccttgcgggtagatactcggagttgattcaatgtgtgaccatcatgcgatgccacgtcagagtacaaaaattgagataacaaaaactatttataataatgacaataaactaatttattgaaaataacaaaagtatgagatctcattattttaaaacaaaaacacttgattcatttataaatttttaaacactaacttttgcaaaagtatttgaatcataattttaaatgaaacaattaaaacaaaaacatcatgataacccctaacatgaaatccatgcctcgagctcgcatcctcaatgtttggttttcctctttacttgcacacagagagcttgtgagataaagcctagtaagaagagctatgtagtacataaccccaccaactagataacaaagccatacgtataacaatgtcacaatatcaaatcaattcataccatacttgcatccctatatcaacatatcatatcacatattattctcacatacgatataacatcatatcacattgtaatattaatgcattctatactcacacacatannnnnnnnnnncttatcgcacattgtcctcacataagataa

SEQ ID NO: 61620 - DNA, 805 bp, Cannabis sativa
atcacatcttggtattttagtataacggggcggtattgttagacattgggaatgtcgagattagtcgggaatttagaatttcccaagatttttatgtgagagggcaaaaaggacatttttcccatatgtactttgtcttttgtggattttatttaaagtttattaatctgaaattagttaagttatatgctgattattaagcaaggaaaattaattctttcctcattttattgaaaaatcaaaagttagacaaaagtggcatttttctctcaagtctctctttctttcgaattcacctagaggcagctagggtttggattgtttttatgcatttcaagctggttttagcaaggatttagtggtctcaagttcttggtaagtttcttgtaactttttcttgatttcttgagttggaagaaaaagaaatttttgcatgctttaaggttttgcttgctgtagttgcttgattttgtttttcataagtttagttatggtttattatgttgattatgcttgaattagaggctgtatgaaagtttagccaagttttgagttttaaaactcaaacttggagctttaatggcaaattttgattctgtgtttgggtgtatgttttattgccttgaatatgttctctagggtgtatagaacaggtctgaaaagtttggattaaattggggttgatttgtatgagaaatgaaatttttagtcattcctgcagtgaaccggaattccagttcagagaggcctgtaggaactggaattctggttggcttctaggaatttttcccagaactggaattcc

SEQ ID NO: 61621 - DNA, 1483 bp, Cannabis sativa
taaacccaacataagacctacttaccaccacatcgccactcgttggaataatcgatggagcagttatattttctcttatacaattctgtttccaaccatgaaagctcaaagccatgagcaaggtggttgtgaatgtcgaaataagatgtattcctcttattcaccactacctcatttgatatgctactgcttagctctgttttgcaccccatcgccatatcggaaacactaaacccaccatccaccacataataattagaaccattgcagtaaggagcagtgtctatataattattattcactactactactgctggattctcacatttcaagaatactatttgctttgtgagttcgacattctctcccgaatggttcctgtaagaactcaaatcaccgatccaatcttctaacaattgaaagttatttgggaaggaacaatagttgttcttgtcaagtttggagtctgcaattctaatggtgtgattcccataattgattgacctcaccaagaatttcacatcatttttggagtgtattacagtaagattgttgtcgcaagaaagctcatattgtgggtagccacagtgttttggatcggtgttgagtctgaaaggacttgttatgttgatgatataattatcacaagaagagggtggacaatgaggatttgatgattttgcatagctacttgttatattattaaggaacaataataagaagaagggggtgattatagaataattatcaacaaggacagccatggaaaatcttctggtagagaaggatgttccacttttgattggcacagagtagtactggacagagaaacagatgaagctaattttctacaccaaactaaaatgatttaatcaaattttcgtttatatcatgaaatataaaaataagacaatttaatgattgttatactatactattcagacatgttacaatcaactcacaataatatcaaagactagtcaaagtagagtagatttaaagtttaggtaaataactggttttcctcactatctaaatttgaatgacctctaaataaatgtgaaaaaagataaggtatataagaccatcatcctgtgttgtagacaaaagttaagaatatcagtcaaaagaaatgaagacagcaccaaggaacagtgataataaagtaaaacaatgggcacccatggaaaatgttattgttcccctttctttttttgaaaaggaattaaggcatcaagtcaaaaaatcggaatacaaaagataggcaatttaaacagtactgagagcatatgaagatgattatggtgccagagaattgtattcaaacgcaggctataaagttgtttcggtttatctttagtaaagttgtctaatggggtactggagaatattaattaagcatagttttttttcaccaataatattcattaggcaacattgagaaacataaagatataaaagaatattcattgctaagaagttc

SEQ ID NO: 61622 - DNA, 586 bp, Cannabis sativa
ggtggttctgtcgccactttggaagctaaggctctcctctctctgcttcgctggtgcattgacgagcactttctggtccaagaagtagaatcggactgtaaagctgtaattgacgccatttgtcatcacaaagacgatatctcagtgtttggagatctcattcggcaaatcaaggaaactttgtctcttctacctgacgttcatatcttccacaccaatcgtactgcaaactctctagctgataaattggcacattgggcctcaggttcagatgaagtagctgtttggataggcgatgacccctgcaatctagtggatttcctttctccttagcgggctccctttctctcaaaaaaaaagagagagaaagagaaatgggatgaaaataagcttaatacatatattgtaagttatatgagcttttcttcgtcattttaaattgaaaaataaaattgaacaatcaaatcatattttttactttttttcaaaaaaaaaaaaaatcacactttttacaaaattttaaaaataataaaatgcattataatatatttggattgctatcttttctaaaataaaataatagaac

SEQ ID NO: 61623 - DNA, 1291 bp, Cannabis sativa
cgaacacccctatccaatagtatgctttctgcaaaaaaagaaagagctatatatgttaaaattttcaatattatattaattaaaaataataatgaaatgtaattaagtttataaacctgggctgatttctgtttcttcatcgaatcgataattttgctgttctttacatattcccgttttgcagcagatggatttggagaatacggataagatggtgtttgaatagcaatattatctatttcttctttgtcatttttagcccttggcattgtaaatttaatgttaagttacttaataaagtaatagtcattcaacaatatataatcaaaaataatatttgatgaatttagatttttttatgtatgagtattaccattgatgtagtgttgttgcttcaggattttctggattgatttcgatagtacttcattcacgagttgacaatgacaatcctgtataaaaataatattttcagccaatttaagtggacgaaattggtagggatatatacggtgtttgttagtatataagtacttctcttagtttgaacaatcaactttgttcccattattattggttgttttcaacaactttagacaattgttcactaatatcttgtaccaaagcaccccacagagtcaaatatatcgggttgaagctacaaatttgattgaaaaaaaatgacattattattttgctatgtataataattttaaattcatattaaattattatgtgtgctctaatgaagatgatcattatgtatttggatgttttattttatatacgtgtcatcaattaaatatatttcttgtatggtctgctgtctataaattgtgttgaccacttctattgagtttattttgacactacacctatgatatctgaaaattgaatgcaatgttattaaaactttgtaaattatttgttatgtgttatattgtagagatttggagttaccttgtggtttgttggagtatttgtgagatgacaagttattaaacagaataaattcatggactagtttagagatttgtttgccttcttcttagacttcaacaacttgtgtttttgagttcagcgtccagccataatggtaatttgtgtcatttttaaggtattttgcaggtattttgttgacacgggcattattgatatagtaggtgtgtaacacatgcaaagtgtcttttaaagtttcaatattttctacaaaaattactgcatcaactcttgttccttgtgtaaagtttatctttaagacatgcagcaagattttgtattagataaatat

SEQ ID NO: 61624 - DNA, 1427 bp, Cannabis sativa
taatataataatattatttaattatttatttttgataaactcgttatttaattattaaaaagtacaaaagttattgaaatacatcttctttgtgttcatcctactacatcttgttccactctctcgcgatccaattttgcttgagtgtttggcgcaacctattaacccatacccagtgcgtcaaatataagaacactcatcccacgatgaccttgtagaccacttaatgaaactcaattattatctctcatattattattcttttcttttttatattattatcaatgagagattaatttaaatttaaatatttattttcaattagtgattcccaaaaagatagactaatagtataatattttcttttgaaaaggggtaccgagaccctaaatctaacttgattagtgactttgtgtcccagaaccactaactacctataatgatagtgtcactagtgtgtttgtacattggcactacaaacgagaagactaattcaatagcaattagtgatttcattatgaaaagggttactgagatgcttaatctaacttaattagcaactttgtgtccctgaactactaactacctacaatgatagtgtcactagtgtatttgtacatcgacaccactaacgagaagactaattcgatagcgattagtgattttgttatgaaaattggtaccgagaccttaaatctaacttgattagcgactttgtgtcccgaaactactaactacactacaatgatagtgtcactattaagttagtacattggcactactaaagagaagattaactatatcacaattagtgattttgttatgagaaagggtatcgagaccttaaatctaacttgattagcgactttgtgtcccgaaactactacaatgatagtgtcactagtgtgtttgtacattggcaccactaacaagaagactaattcgatagtgattagagattttgttatgaaaaggggtaccaagaccctaaatctaacttgattagcgactttgtgtaccaggaccactaactacactacaatgatagagtcactagtgtgtttgtacattggcaacactaacgagaagactaattcgatagcgattaatgatttcgtgatgaaaaggggtactcagaccctaaatctacctcgattaaaaactttatctcccaaaaccaccaactacctacaatgatagtgtcactagtgtgttcgtacattggcaccactaatgagaagactaattcgatagcgattagttatttcgttatgaaaggggtaccgagaccctaattctaacttgattagtgagtttgtgtctagcaaccactaactacctagaatgatagtgtcactagtgtatttgtacattggcaccactattgagaagactaatttgaaagcgattagttatttcgttatgaa

SEQ ID NO: 61625 - DNA, 655 bp, Cannabis sativa
ctacagaagtataattggggcactccaatacctgtgccacactagacccgatattgcttttgctgtaaacaagctcagccagttccttcaaacaccaactaccagccactggagcagtgccaaacgtgttttgaggtatttgaaaggaactgttgatcacggtcttcacattgtaccttgtgacagattgtctattgttggttattctgatgctgatttggcatgttgcccagatgataggagatccattgctggctactgtgtttattttggtgatactttggttgcttggtcatcaaagaaacaagctgtggtgtcaagatcaagcacagaatcggaatatagagctcttgcaaatgttgcctccgaaatagcatggattgaatctctgttaaaggaattaaaattcaaactcccctgtacctcagtaacttggtgtgacaatcaaagtgcaagtgcacttgcttcgaatcccgtttatcatgccagaacgaagcacattgaactggacattcacttcatcagagataaagtcttgaagaaggagcttgagattagatatattccatcatcagatcagatagctgattgtcttacaaaagggctaactaatcatcgattcagatttttaattgacaaacttgggatgaaatca

SEQ ID NO: 61626 - DNA, 599 bp, Cannabis sativa
atatttttataatttttgtgaaataattccatatattaatctctgcaaattactttgtagggtttagatagaggggagaaaaaaacttacaagttttttctataccattggaaattaaaataaataatacaatatgattcaaaaaaaaaaataaaataatacaattaataaaagattcttcttcttatcaccaagttgtaatgaagaaggaacaaagggaaaactatactagtgcataacttcacattgtgacgagtaaaatgacaattaatctcaatatacttggtgcgttaattcatgaaacacctagttatcagtaatctgaatgacactttgactataacaatacataggagtaagataagagtgaatgacatccatatcttcaagtgaccatctcaactaaataatctctttagtagtagatgccatgtcacgatactcaacttctgtagaagattaagaaaacagattatttcttaatcttccaagaaataaggaaatctcccaaaaagattaaaaacagtgatagactttcgatatgtgggatcacgaccatgatcaacatcacaataagctcacaactccaaaaaagaggt

SEQ ID NO: 61627 - DNA, 2684 bp, Cannabis sativa
tgcaatagatctaagatcctggataaatataataccaacaatttacccgtatgcgtgaatgtgactagggcatccatccagcacgaggttttccgtttaggtcggccgactctttttaatttggaaacgagataagaatagtatagaacatattatatatgcaaatgtatgtgtgttatatatacacattatgcttgtgattgtatatgttctgggtgatattatagtggcacaaccattgtgtcagttcgatgttacagtcatcgtactggttaagagtgatattcaccctaaaaagtattaattggtgctatcatagtgacacaatcattatgtcggttaagcagtacatgcatcatactagttaagagtgatatcatggccaattatacttttgggtactattgacactatcatagcggtgtgaacatagtgtcggtgccgcagtgcgatcatagtgctggtattgggtgatatcatgctcagtagtatcaactgttaagaactttcttacgtcgtctgatatgccttgtggataggtgtatgggcgcctacacaacaagtcgagaatatatatatcatttgttttatgcttttcttactgagtctattgactcacagatgctactttcatgtgtaggtaatggaaaggcgaaagctgaacaggagtgagctctaggcttggattgtgatagtacatgtcaaggtgacgcgacctgcagtgttcggtctagggacatctttggtgtattttgtagtcgatgttcgaccagtttataaatgtattctgttaacatttgaaagcttaactcgagatcctgactatgtaaatatatatactcctataagtttataaagtttcacaattaaataaaaagttttaatttgacacgattttcaagtaaaaccctttaattagcaaaggtggcacattaatgtgaaaaaaactgtagcgcgcctaagtattagggcgttacaattttggtatcagatccaccgggtttgtctatcgaagattgtgaagacatgtgaaagtttcatcagagaaaagcttggctcacagttagtaagcctttacttgtgtagtaatgtatttgataagtaaagcatgttaggaagaatagtagtttataattgtctattttaatgcattgccttaaaaaccataagtgcggtagtaagattgcaaattgggccattgcctcactagactgacttaggaattgacaggtttatcctatagaatggatacatggtgcaatatggagagtcagtataatgtggttagggctagtaactgatatagagaatggaatccaagttttccccgtaattgaggtgaaagccattggaaggtttctggcgagagtgatgattattcaccacaggctcaattagatttggagcaaaggtttacagagatggaagctatcattcaacgacatgaagagaaaatttagaggttgagataacaaagatcgcctgtagtacctttacttcatatgccaaaagttttcaatctggtattaccagcagggcagagtatggctagtaaacaagtggaactattgcatggtgaaaattggatgcaagaatttcaagtccttcaacgagattcaaaggtgaaggacgccctttgaactgggagccctaatgaatttgttttggagcgtcgggaggttatgatagaaggttgagttatcactccccttattcccatttatggtggaagtgctaggagctccatggctgagcagaagaggaaacctgcatcgacagtggtcggtttaagacaaaacaagtggctccgagggaatcaaggcagacctggatgccaaggttattctcaccctagttgtccatgttccagtgtggcatgattgggaattttatgaaagatttccctcaggcagagaaagaagagcaggagtaggacgcaaaactcgtacctactcgagtgtttgatattactcaagtcgatgctgcactcagccttttcgtggtgtcaggtcagcttctcattaacaactcctatttcacagtgttatttgactctggggctacacattcatatgtggcatcaagggcaattaatcaattgggtaggccttgtgactttattgaaaaagggtttggaaccttattgccaagcgacgagttggttatctccaaaagtcaaattatgacagatgtcctcttagaagttaatgacttgttggatttaggtggagataatctaagactgaagtaccacgcaggccttggctatatccttctccttcgtggccttggctgaggcttcttaaagggagcatacggtcccctcaacctcttggtcagttttggctttgtgatctaagcacatctgccgatatttggcgttcaacttctcctcctaaactgctaccttagcctccaaatattcctagatcttttagttgctggaggccacttgggtctcgatctactcaactttagctcgtaaggccctattttcgatggtcaaggactgaactttggcccagagctagtttagttctatggtcatcttccatacttctacaaacaatgccatctggaggaaggaaagtaaagagaaattattaggcataattgttgggttttatgccctaaataaaactcatttcgatataatcagatgtacttattaatatagatcagaa

SEQ ID NO: 61628 - DNA, 570 bp, Cannabis sativa
gtaaagattggataatattattcttgaaataaaatatcttattaattactccacttgttgtatttgtaatactaactagggaattatatttgtgttttctcctttaacgatatgtggcatctacgtactctttaggttataatgtaaattatgtgtcagacttaagtgtcgagagagtattaggcaacccactcacaaaagtagatatattttaatatgagagtattttttatgaatcgataaaagaaaggtatatatcaacttatcctcataaataaatatgttaattaagtcatagttcgtgtacaattaagctaatttattaattgttggagcactaaactcattatgaagaaaaataaaaaatacctctctttagtggaaaaaaatcaatacgtttaattttccacgtaaatcttttggaaattgattagtagattaccatgcacatgcatgcagggagtaccgaatacgtagtaggacaatgcaagaagggtaacacactacaaatgtgactttccataacactactaaaaagtattatgataaatgaaacaaaaatagatttgg

SEQ ID NO: 61629 - DNA, 738 bp, Cannabis sativa
actcgaaccaggacctccaacacacaccctcctatggccacttgagctaccctcaagtggttaaaaagccctacatagattatatatatatatatcttactttaatcacttatattttactttaattttaaacaaaaacactgtgatacaagtttgctgttgaaactaaggtgtatatcatctcttgtgttatttaaatataagtccatataattttttttaccattatctactaataaaagagtacaaaaggattaataccatatgtaaggtcatgtttcatttatggcatgtttactaaactgtaattggaatcagaataatcaatgagagaaatatatcggtttaaaatagaaaataatcggaaacaatattttatgtaatcaaaactttcaaaaataatataatgggattacaataatataatggtgattacattatgtaataaaatctttattatatcacaaaaattacatcataaatattataaaatgaaagtgaaataacttaaatactttttttttttaaataagaacaaaattaatttagtccttctcttaggttttttctctctcattattattattctgttgtttaaatgctgatgtgtctatgtaaattagtaattttgtcccctaaactttgacaactattaaatcgtaccccctcaaaataaaaatgaaaaatattgaacattttttttaataaatctcaaaaaattaatgtagatcttaagaa

SEQ ID NO: 61630 - DNA, 1347 bp, Cannabis sativa
tttaaagtctcaaccactctagaacttgtttgataatcatttgaggcaaaatcgattaattacacatgattttgagatataatataggcaatttttttggatcaattgagcttctcaagactaccctatttgttaaaatcctagttttacccaatctgagcctaaatgttgaaactttgttttttctttttagccctatacaataacctttgagcctaaaaaataaatttcttattcatcatttttcacaccatagcatattgatgttttatgtattttgtaaaagtgtaaaaattttgttgatgagaaaatatttatggttatgtataagtgatgatgaagaaaataattactattcctttagaataaatgtttgtaagttgtaagtattttattaaaaatagtaaaaaaaatatatgagaaatatgtcagaaaataaatgaatacttgcaacaatttaagtgtgggagaatagtaagttttatgaaaaaaaaaatacaagatttgaattgttgaggagagtggatgggaaatacaaataggaattatttgagagaatattgtagatgtatgctatggtgtgatttgagcccaaattaactttttttatctacctctcaccctagccttacattatagcaaagtcctattgatctttaaattgtgtgtaattacattagtggagaatgatttgataattaagcttatggagtagatttttgttgaaatacacatttcttttgagatgagcattgagtattggcatgcacgaattaatttgaatgttagtaatatgatgagttgattacacacacatacaaaaattgagcttgaaaagtaattaccttgagttgaattctaatgattgaagaggtgggattttcttagaattataaagggatgtacaatttttgaaacaaattattttttataaagaccaaattatttttcataaagaccgatttattaaagtatctttcattttatcattagcttactcgaggacgagcaagagtcaagtgtgggggaatttgatgagtccatatttatcttataaatatgaccaatttatgtattaatattcttaaattgattctttaaattattgattagtgtgattttaattgttttggatattttaaagaataatcatgcatttagagtcattttgagggatttagcacattttggtggaaaatagtggaagtcgatgagatcagttttacaaagtgaaacttaattgcaaattttaataaacttagaagcaggactggacttagagctcaacatgaatgttttagatctcgttctaattagcttgtcgaaatatcttgaatcgtccaattc

SEQ ID NO: 61631 - DNA, 1884 bp, Cannabis sativa
  modified_base (1003)..(1014): a, c, t, g, unknown or other
  modified_base (1149)..(1154): a, c, t, g, unknown or other
  modified_base (1263)..(1263): a, c, t, g, unknown or other
  modified_base (1436)..(1439): a, c, t, g, unknown or other
ttaagtatcttgaactaattaccttaatttgaaaaaatagccctatttaagttgatcttaaattaacaaatttttaacttaaaaattgttatacccgaaaaatcgactactatttcagtggaggacacatgtcaagataaatggaatatggatcaataaaatcacttttaatggaataactcattaattgcgtaagtaacagagtgtacttgtaactcgctgactatagggtcttatgcgaggaaaagatacgcaaactgttgtttcgtgtattaacgagaaaccatatgttattgaatgcataaagcgagacatcaacttcgttacacctgggaagacaaaagcgacgtgtatcgattgtgaaaacacttagcatataatgtacaaagtattacagtagggtggactcgagacctaataagccaggcacctatctcgccatagggaggtgcattccaattacattcaccagttaacttcaaacatctttcagcaagacttaaagccttaacgagtcagaagctgacattcaattaattgttgaggtattcttagtaaatgagaactttgattgtcacaatgaagcattaagcttccaaacgaagaagcaacgaggcgtacattgtcgaactcggaaagataggggaaaaagctctagctcgctatcaaagtcattggaactgtgttcctatcaagacaacccagaaagctatgatttaagacatttttaaacacacgatcattttgatccggtaaaagcggataaatcacagttgtgtgatattaaaataatagccgcatttatactacataatatgtaatcaaaccccacgattttaagggataaacattgtaaagattacagccaactctgtaattaactgcctactatgtaattataaatagtcacaagttagatcaaaaaaggggacgaaaaaatcacaagaaaaagaggccctaaaaaactatcagaaatctaataagattgactcgtagattatgnnnnnnnnnnnntacaaaaccacgtaaaaaaactcttgagttcatactttttactctactgtatttatttttctgtgtgaaattatcactgataggctcaaattttagttaacaaaactctacgttaacagtttggtgctttcattnnnnnnctttgtgaaaaagctcagaaaaaatcgtcctctcttttgaagaaaaactatctccttcatggctgaaaacccagaagatgttaatacaccacatgaggaaactcatcancattctgggaaagagcccatgggctcctgaacgtcttccaatccacagtctagacggaccacccgctccagaaggactcaacctgagggtggaactagcactcggaccacacgttcccggaggacccaacctaacgttggtcccagtacgcgaacaacacgctcgaggagaannnngcgtgggaatggtcagaatcccagaactagggatgaggagctcaatcgtggaggtactcagcctatgggagaaggcaccgatgaaacagaaaactgccgccttagacaccgcctggaggaggcacagctgcagaatgctgagttagaggatgatccaggcgcagctagggcggcgcaggggactaacactcaaaatcaacctgaacctggagtgagaagaccatgaggcaagcctcgtggctcaggaaccaggagacaggaaaatgtccatgaacaacaacctagggaaaatgagattccacctgaaaattggaatgattaaccagaacctgatgaccaagaaattcctcataaaaatgaggaagatcttgggactcaacctagagagcgaaggtcacctgcgagaaatcaccagcgttcctcccgaacccatagagagagggct

SEQ ID NO: 61632 - DNA, 2585 bp, Cannabis sativa
ttccctcccaaagtgaagaattctgtcacagccatctggtttgttgtcaaagtcccagttttgtcagaacaaatcacagttgtgcatcctagtgtttccacactcgggagttttcgtacaatggcattcttctttgccattttccttgttccaagagccaagcatgttgtaataacagcaggaaggccttcagggattgcagccacagcaagagcgacagctatcttgaaatagtaagtacatctctcgaatgaaaaccgaatatttgttggctttccatcaacaagatcccaagacagaaagtttttgtagtttataatccaaactacaagacaaacaaccccaattgcagtagtgagcctgctcccaaattcatcaagctttttcttcaaaggggtgtcactctcttccaaagaagcctcatgtatttgcttctgtattttaccaatctcggtgttcatcccagtgctaaccacaatacacatacagctcccattgacaacagttgtccctgcaaaaaccatgtcttctttagcctgcaattcacaatcatccatgaaaacaggttcagttcctttcaaaacaggattggcttctccagtcaatgagctctgctcaactcttaaagtagaagttttcaaagctgcaactctcatgtcagcagggactttgtcaccaactcgaagctccactatatcaccaggaacaagctccctagcaggcaaatcgggcacgaaatatccgtcccttaaaactttcccagattcacattgcatctctttaagagcttcaagtgctttttcagcattactctcttgccaaactccaacaatagcattgatgactaagatcaagactatcacgactggttccacataggcctcaaatccagattcttttgattcagttccatgcatataagccaaaataaatgatatgaaggctgcaactaaaagtatcttgacaagcatatcatcaaactgttctaaaaccaaacgccacaagggctttcctttctctttagcaagttcattccagccatacctctcacgacgcttctcaacctcataaccactcagacccttatcaagtttcacattgtattcttttaaacactgctcaacagaccaggaccaagctgggaatggcttttcctccattgatgatgcttctttcttctctccttgaagttcaaatttcactccagaacaaaaaagacttaaactttaaaattgtctcatcgtgaccatatcaaattcctacagaaaaagccaaaaacatgttacgggaatcaacagctcgtaaaacaatccaaactcagtagaatatgaattggtttaattaggagggaagaaaaaataaagtaaacaattttcaaaaatgcaaatgattgaagaacagtaattaacttttggcatcgtcataaatcaaattcaaaaacgacataattgtttacagtttttctagtctaccttgattatatttagttatagaaaaaaaactgctcccgctccattcccaaaaggaacgttttttttttttttgacaaaacataattcttagatatatagtatgtataattaagataatatatatatagtataggcacagttatcaaccacagcaatataattcatgtcagaactgagaaagactacatatgaaaaagaaagagttttacaaaggctagcaaatgctaagaaccttccttccatatcaccccaccccccgaaacaaaaattaaattttgagataaaacttaaaactaaactagagtcaaaattatacattaaaagagatgtgaaagaaagtacatctaacctttaattatttgcagcaaccataaataaaaactacacaaaatcaaaacaagcagagaagatgaagaatgaagagaggtggttgtggttggatgggtgggtggtttgggttgttggcttgtgaacaaagcaaagttttaaaaaagaactggcttagtcctgtgctgtgcccaaaggccaaaccatatagttgtcaaagaaagagaaaggactatatatatttgttagaaggaagagtggactgtactcactggtcgtcctattctctttgctttttttttcttttctttttttctttcaaaagaatctcttctcttgtagcttttctttcgctttataataataaatattcaatacaatccttccatcaaaataaaatgtattattaatacaatccattcaaactcctcataattttttatttgttttttcaagagagaaaagaaaaaaaagaaaagaaagaaagatggtgtttagtggggttaaagtgataactgtgatttttacgtggtttgacttgctgacgctttttattcgaaaaccgtacgcgtaggccgttattgaaaatcgatatatatatatatatgcatttttcttttttcatacaaaatttaataaaacaaatatacaacaattttttttgttaagatttgtgatttattgttaaaatataactcatatggattgtgtgctaatttaaatttatcacataataaaaatttatctaaatttgaattagaatgtagcattacaataaatacaaaa

SEQ ID NO: 61633 - DNA, 819 bp, Cannabis sativa
tagtgtttcacatttttggttagtctgtgctattttgtttgactttttgtatcatattttggttttggttagtttggagtatgttctttgtttatgaatacaatcataaagagtgctattattaatttttacatataagttttaaatcttactttaactatattttaataattttagaagaattttttagctattattttatattattgtttttttattatttatttattagctaattgaacttattagtttttttagcaaaatagttaattttaattagcatttgattaatttctcaaattttatgtataatgcaagtttaattgacttgaatatttctgtcttaaaaaatttaattctaatagttgaacataacaatttagtttcgatgcaatggtgacatgctgaggaaaaaaacttcaaagatattttttttcttgttataataataattgaattttatctttaatttgaaattaataatattatcgttttatagagtgctaatccacattttatatctatttattttataggtagttttcgtccaatgacttatttattttagctgcctcttgaaggtggtctcgagtgttttgtctaaattttcgagataactttgtcttatataaatcgatttgtttgtagtgactcatattctgactttgtatatctttgactagacaattaacttgttgacagaaaatttctcttcgaaagttgtcatagtataattcatataaaaaaaatatttaaatataaaaattctgattgtaatttaaaaaaaaaaaaaaaaaaaaaaaactttttgaatattga

SEQ ID NO: 61634 - DNA, 1275 bp, Cannabis sativa
ggatataaatttagttaatgtatatcacaaaaggtattcttcaatggcaatccctcaacccaaccatcagaataaatgagccgaatgacacctgatttataatattttgggccgatattggagttggctggacattataagatcattttccaacctcaaaatatatacagaattatcatttttatgatttttaagataactttgtaaaaatatggctttttctctagaaagttattagcaaagttatttacaagaaagttaataataagtttaaaaaaaatgggaaaacagtaaaagtaggagtagtaatttagaccagatacgataatacgatttaaaatctacacaaaataaactggataatcttcatagcaccacaactacaaagaggttgtggtctatattccctaatttgatcccatagtgacttgagtcgagtgaagtaggttgtcactgtgtttgatccttgagtaaggctctgcatcgttttcttagcttcgaaaatccttggagcatttttttcattgaatctttcatgtaattcttcccaaatctctgcagcattatcatgatacattatactgtcagctatctctcctgaaatagcatgaagaatccacgaaatgactgtattattgcacctacaccagctgtcataatcctcatgctcctcatcaggttgtggaagctttccattaacaaatttcaccttatttcgagcaacaagagctataaacatagatcttatccaagtgctataattctcacttcctgtgagaatattgggaactaggacaacacctggattatctccattagagagaaaataaggattagagagatcattgaaactcgttgacctcgaattctcaccaagaacagaaaatcgattagaatcgtttgagttatcatcaagatcacgattgcttcgagttcgcactctcctcctctggccatgaatgcaaaacagaagcggaagcaagaagaatcaaaaacagcgaaggagtatgcttactcgaacctgagctctgataccatatcagcaaagcataaccagaaaacgaagaagagagaacagaggaagaagaaagaacaatgaatctttattattgagattgaatcaatcaatacaatctacagaattagaagagagaaaagctttatatagctgattaacaagaaaggttacagaaataacaaccataactgaatataacaaacatgacagctaggacagctaggaccaactaactcctaactaactatttctttgat

SEQ ID NO: 61635 - DNA, 801 bp, Cannabis sativa
  modified_base (625)..(652): a, c, t, g, unknown or other
taactccccttgagcaacaaacccaagaggttgttccgtatacacttcttcctcaagatctccatgaagaaaagcatttttaatatcaagctgaagaaaggccaatgatgagtagctgccatggaaatgaacagtcaaacagatgtgagtttaccaataggaaaaaaagtatcacaatagtcaactccataggtttgagcataacccttggcaacaagacatgcttttaagcgatcaattgttccatctagattgactttaaccgtaaatattcattttcaccctatgaccatttccagaaggtaaactaactgagtcccaagtatcatttgcaattaaagcattcatctcttctatcattgtaataaggcaaccaagatgagacatggcttcacaaatagttttaggtatagtgatagaatcaagagaagcaaaaaaaaaagagtaagaagaagagtataaatgattataagaaacaaaagaagaaataagatatgtacattgacgtatacttttacgtagtacaatgggaagatcaacattgagttctgggtctgatgacgaatatgtaggtgcatgacatgaaacaggaggtcaagaaggtggatgttgggttttgtgcccnnnnnnnnnnnnnnnnnnnnnnnnnnnnatttactaattaatataagatcataaattaatttatgttgcatggttcacatgatttatttcataattatgtttaatgtataaattatataaagtccagaacatatatatgtatatatttgttcatgattattgtatcgtcagcacagt

SEQ ID NO: 61636 - DNA, 1199 bp, Cannabis sativa
aaaagaaatatctatagataaaataaagagaaaccaggaaggataaggagacaagtctgtccatccaattttgtactagaaactaccgactcagctgtgacaaacgtaaacaagaagagaccaatagaaagttgacacgtgaagcatcgtacgaagaagaagatctttgtcaaaacgtggctaattataactggtcagtcatacgaatttctgacacagacaggtaaacgaacccatcttaccgttaaagaaagggagatagaagagagcacaatagaactggtgtggataggaaaatggcggcacagtcttgctcaattcccctcctctcatctcctaccttacccaaatttagcccttattcttcagaagcttcaactagggtttcgattccttccagaaagttcttatcatcgtcatggagattgaatgcgacgggtttttctgaaattgaacctgatctcaacgaagatccagtcgatcgttgggccaccaacagtgtcagcgcggtaatagatatagatatccgattcattatcgctcaaatttgatatttatttggctgtgaaattggttttgatttttggttgagttgaattattcaggaagattttgtgtatggggtttacgatgggcaccatactttccatgaaggcgaggacaacaaaggtattagttaagctattttttcttacatataaaatttttgttaagggggtttatccagttatttggtcttaattgaagtctgttacgtttaaattttaaaattggattgataaatactagagaaaattatggaataatgcattagttaattatattctactaataaagaacaattccaaggcacaacaccaagcacctaacaatattctataacaattattaaattatattatattagatttaatacttaattatacgggtactttttagcattttgtatgaaaaaagttggacacaaagttccaatgccatgtttatgtttagtttggtctaatgataatttagttgaaataatcattatttaattttgtaattccttcccaatataattattatcacaaattataaatataaattaaacttatacatctacttatgtaatcaccaatacaccatttatataaaaacagaatagttcttccctcaatggcagagccaacaataaaatgttagggggcacaaaatttctt

SEQ ID NO: 61637 - DNA, 934 bp, Cannabis sativa
  modified_base (38)..(52): a, c, t, g, unknown or other
taaatataatacatgaaaaaaaaaaaaaaacttaatannnnnnnnnnnnnnnatatatgtataacggtcggtttcaattttttcggtcggtttattattaaaaaaaatcaatagtttaatgacagttttaaccgttagcggttttttcggttttcggtttcaacggtgttcgataggtcggtttgaacagttttttcagttttctggattttatgctcacccctaatatttctattggtacacttaatattattatttaaaaatataaaaattatttcaaaatttataatattttatttttttttaaaaaaaaattatttttattttttataattttatttaattataaaaataattttaaataataatattaggtgtaccaacataaacgtgtacaaaagtacacacataagcagctcatagtgacagttaaccggatgacaccttaaatttactactagttcagtagtttagagagttttactgtcaaaatttaaagttagagggttaaatacaagtaaaacaacaattgagagggtttagccgccaaaaactcttttgatatatatgacataaaaatttaattgtactaaatatgatatttttcaaaaaaaattaaaaaatatagaaaaaaaatcattatatataaagagaaatgtcataaaaaaattttaaaattgtattttttttcttcttttcttttttaaaaaatgaaacactgaaataaagaaaaaatgatgtcaatcgtaactacaaaagcttagtttttaatttttaattttaatttctgaagcaatattaaagcaatttttctaaggcaataaattaataaactaagtaattctatataattaaaagggaaatttgacattatatacttaaaaaaagcataaattgtttttatatgcttcttaaaaaaatgtaaaaataatac

SEQ ID NO: 61638 - DNA, 582 bp, Cannabis sativa
agaggatgctgatgaagcttgttttggcactcctcaagtatattctttgcttgagcctcttgagcctaaatgtcaccaaaggattgagtgtttaactccttgaaagtcctcttcaaagccttcattttagagataacatagtacattttagtccctttgaattgcccctgctgccatgttttcttcaccaagtcagagtaacttggatgattttcccacatcttgtagtatttaaaaggcttcctaccagtcaccaccttgttgtgaaccataaggacaaccggagagtgatcaaagatcccttcattcatgaatactacttcggctaagtgaaatttttcaaaccaatattgattagcaaggacacgatcaatctttgagaagatgcgatcatcttcaaactgcttattgctccaagtatagtagttcccactgaatttaacatcatccaggtgacaattagccacacagtcaataaaatcagtggaaggaacatacctcacttgcttcccaatcctttcatcttttgccaagatgtcattgaaatcacctatgaccatccaagcctcgctcatcgccaat

SEQ ID NO: 61639 - DNA, 1176 bp, Cannabis sativa
accaagagtgaaagtatgggaattttgatatggataaaaaatcaatggtcttatatttttattttcgttgtgttcaaaaaacttcaaatctatttttaacatggtaaattatttaaaaaaatttaaaactttacagaaataatgtactaactataacgaatactactatagaaataaaaattagaaaaaaaaatattttgacacgtatttttaaactcagagatttaaaaatattgtaatatgaatttgtaattagtacacctccataaataataagggataatttcagaaatacacgaaaataacaaaagaattataaaaatacggttgtacaaaattttaaatatttttatagttttaagattttatttacagaagtacgatctttcgatgtgcatgttatttttatattgcactcttgctattttgttgttgattttttgttatttatattttatttttatgttgttttaattttatttgtctcttacttttatgtggttttttttttctttttttctaaatcaacagtaagactatatttcaccaaaacaaacacacatacaatctatcagcaccaatcaaatgcatgaaataataaaaacaatacaaaaactataaatcttttataaagactcccgccaaactatatcctttcttttcatttttttaggccagattatacacattctattcttaacatcatgttgtattctatatatggtggaatttaaaatgggaattttcgcttcccaaaaagccaggtttcgacacctccaaacatgataaactatcgttgccaatactagagtaaatatatgcttcttgaaaggagaatgccagttttgcttcaaccatatcaacaacaaattcaggttagttaccttagtgtcccatcccatctaatctttgataaattggagacatctcttgctataaagacattcaaaaaatatatgttcaattgattcagtgtaacatccacgtattagacatacctgattcatatagattttaaaatgaaaatagtttatattttatttgttaacgttccaaaatcgccaaccaaaggataatttgatgtttggggattttaaaacgcccccaaacttgaccataccaactcacattctcctcccttgtactcaacatatcataaccaagtctgatagagta

SEQ ID NO: 61640 - DNA, 846 bp, Cannabis sativa
catatatttcttcacctccacatttcatcaagaaaagctgtaaagaattttagtttcttagttatcacaaacattcgaaatagacaaattatgaatgcttaaacacctcatcaaaagcttcaaagatgtcgaggctcggttgatgaatggtgcacacaatggttctgccagtattcacagcattcctaacagctctcatgacaattgcagccgctcttgcatcaagccctgaagttggttcatccatgaatattatagaagggttcgctactaactcaactgctattgtcaatcttttgcgttgttcagttgagaggccattaacaccaggcaatcccaccagtgcatgtcttatcacatttagctctgttagctccatcacttcctcaatgaacatctgtggcaattagtaatataattagaatccaaagatgttgagcaaataaatagagaatttaaatttcaaacaaacctctctggttttggtatcaacttcagttggtaaacgaagccatgctgagtagatcaaggactcatagatagtaacatgtggtgaatggatgtcattttgctcacagtatcctaaaattcgagaaaatgtttcttgcttcttaggatatccagaaattttgatatcgcctttgatgtaccccttggtctttctaccggctaagacatccattagagtggtttttccagcgccacttactcccattagcgctgtcaaaacacctggcctgaaaacaccacttaattcctttagaagaatcaacttgtcatcttcaattccctggttcttcatttcctacaagtttggtttggttcaagcacatgagttacattatt

SEQ ID NO: 61641 - DNA, 1103 bp, Cannabis sativa
taatttcttaattttaatgttttatttctaattaataatatatttatgaaataattattataattaatttaattatattaaataatcaaaataatgttttttttaatatattaataccggcggaacaataattggggtccgccgttattaatgcatctacgtgtaaaagtgcagacattaataccggtagatcccaccgctattaatccgtcggtattaatattattaccagcggaataccattttggtcgctaataaccacttatagcgaccaataaacaccgacgaataattaccagcggtctgccatattaatacccgcggaggtatccgcgggtccaaaactgttgtagtgaaagcggctaattttaatatatattcttatgtacatcttgctaaaagaaattatatttattttacaaatacattattatttttaaattctgtataataaaatataaagttgaataataaaataatctaattaacatggaagcatgacagcatgatcgcaatgcacctagactcattttttggaaagtacattaattgtcatgaaaattaattatttcaggaaaccaatggaaactaatacaaaacgcaaattaaatcatcaaatagctataacaaagtcataatgtcttatacacatatagatatataagtggatcatataaatgctcctattctgtaagggagtgtcctataaatatatatacataaagctagtttttatacacagtgttcctgaattaaattttgaatagctaattagggagctaagaatacatgattcatatttctatatcagaggtaccctgtttctcgcacctgttataattaatggtgtacacaaggtacattatatacttgtcactataggcaatctaccatacgttttcaaaaataataaaaaagaaacgaattttatgaatcattatgactttgggaaaatatataggtttgagaaaaatatacgaaaaacataacaagtttaccaagtaacgttgataatatatataatagatataatagacttgatccagatatcaagtgtaataatattaaatatatatcacttacattacataatctatatatat

SEQ ID NO: 61642 - DNA, 863 bp, Cannabis sativa
aaggtctgagtctacgtctcgtctaggtttcggttatggtttgggttcgatttctgggtctcacaggtctgggtcctagtcacagtttcagttctatttctgggaccgggtttggtttcgagtcagggtctaggttcaggttggggtcggggtccgattctcaatttgagtttgggtacgggttttttagatcccgagctgggtccaagtttgagtttgggtcccaagtttgggtctgggtctacatttggattctagtccatgtcccgtgtttcgatcccagtttgggtctggttcggtattctattctaggtctaagttcgtgtccatgtctaggtccaaatcccattctcaatcaagggcttggtctgggtccttgatcagtcccgagttcaagtttgggtttagtttcgagtctcagacctagtttgggttcgggaccaggtccgggattgggtctaaggtcgagttttgcggcttggttatggtctagtttgggtccaagtcctgtgtttgggtccatgtttgggtttgggtcctagtcctagttttgattttgattcagtgtcttggttcgggttgggtcagggtctaagtcctagtccgagtctgggattgggtttgggtccaggttcagatcccggtctgggtctgaggtcatttcaggactgagtttgggtccccggtgcgggttcaggtcggggtctgggtcaaggttcatatcaggatccctatctacgtccgagttagggtctgggattgggcgctaggtctaggttcgggtccaagttcgggttcgggtctcggtcctggtctaggtacacgaccgtgtctgggcccgagtttcggtctcagttaaggtc

SEQ ID NO: 61643 - DNA, 1019 bp, Cannabis sativa
taatgtattaatatgttttaaaacaaatttaattttctagtagggccaattagaagtatttaataaagaaataatttcataggcaataacagagacgacgattttgatctaaaaacttatcttgattttgtcgttttcataatattatttattgtttagttttatttggttgaatattctgataaacctgaaaagagatgtaagatatttttggctttgatatgcagcctttgtctcatattggggtccacgtaagccacaagcatcatatcacatgaaccacaataattttgtttacgttggacggatggacctatcaaattagtttttttttttttttttgaaaggaaaatagaaaaaattaaactttgcagtcgttacaaaaaaacattcttaagaatgaacatggtagataatcgatcaaattatttgtggataaatactcacttaatttgccaaattagttctaaactctatataatctcctaatatatcattttgttaagttttatacaataaaaaattgagatattaacgactaaattatttgaactttaaattttttgacacttaaccaaaaaaaaaaaaaaaatttaacggcaaaacttactaaacacaaattcacatgataaactttttaaagttcacgtaatattacttattaaaataatttaaaaataatttaaaaattataaaaaaaaattattttattttattctttttctttttccttttcttttttttttctttctttttatctttttctgttgaaactcattcatcttccacagaccacactcatcgaaaccctaaccctcctctttgtgcggcaacctttcccaactccggaggagctattgccaataatcctcaacccaaacgggccattatgatccccaaccccgagaaacccaaacccctaatgacactccttctcgtgttcttgatctcccgtttcttttaccgtctttctctttctcatcaacagaaagggcagacaaaggtcaacacaggtcgac

SEQ ID NO: 61644 - DNA, 881 bp, Cannabis sativa
tacttcactacggatgaatattaaagatattcaaactcaactaagcatgcattgagaattaattataataacaaaaagttagcgaatggatatacctattctaaatccgatcaacactgaaatatatcgaacctcaaatattagctcacaacctataatataatgcaatatacaaccaaattagaattttaattattaaattacttactagttaataaaaaatgtaacaaattactagttaataaattctatagttaatttttgaaaaaaaaataacatatacatatataatcaattatatatcacactaacatatttttaaaaacgttaattctaaactaatttaatccctactaccccattctcattcacaacaaatacatatacaatacaattacacaaaatacacaaatagtatatacacaatatatacacacacaatatatgtaaacacatattcaataataaaatacaaaatatatacatatatattatataccaagttaacaaatatttaccttataaatgaaatctgacgataaattgcgacaaaaatccgcccacctatagcacacacacaatataatattaaaaaaaataaaaaaaaaaatcccaaaaaaaatttacaaaaatgaaataatacaaatgtacattaataaaatgaatagaaagcatatttataccttaatggttgttgggattcaacgttttctgcgctaaaatcggtggccagagttataacaccacctttttttttaaaataggtttgggtaaattgcaaatgggtgaaaaaacaaaactttttagtgtatgggattagatattgaaaatagaaaattttaagacaaaaatgggatgaaatggtgaagaaatgagagaga

SEQ ID NO: 61645 - DNA, 1280 bp, Cannabis sativa
  modified_base (271)..(271): a, c, t, g, unknown or other
  modified_base (871)..(879): a, c, t, g, unknown or other
  modified_base (995)..(999): a, c, t, g, unknown or other
aataacttttaagaagttaaagttatctttatctttgatctttgttagcaagtggtttagacacaattgatctttcgtgtaacaaaagcttacaacttagtgtttgcttttaaaatcatgttttggctaacactacctgagatatcaagcagaggccatcgctgaagagcgatgggaggccatgctaaaaagcgatgggcactagctcttttatatttagctacctctgtaaggcttacctgttggaagttattttaccaggatctagatntactaacatgtatgtttgattatacactataatctaacatcctaaaatacgaatttcctaaaacaatgaattaaacacatataaagatctagaaaatcttacattggtggcagtagaatattatggctccttctgttcaaatctctaacccttgttcctttctgtcgcagagtattatctgaacctggatattctctatcgatggaattcatcacaatctttaacactatgattgagtactgacttgatatgagtggacaaggtactcttcactatagggactttgaaattatgaagagataagagagagagaattcgatatagagaggagcctctttattttcaattacctgacagaatagactaatgaatgggtatcaggttataagcctatcattatctatttatagaattccttcaagggttaggatttaaattatatggaatgaaaaaaaagataaaataatggctaacaactcccgtaagtggtcgaccatgtaatgggctcaactagtttcaattttgccatttatttaagacctatatgccatattttaattttaatcctataaatatcaaatctatttatttaataattannnnnnnnnattaaataaaattatcatttaacttatttattaattagaccttataaagtcacttaattaacaaataaaacttaaaacctcttttcttctcattaagcccttacttagtgaaaatnnnnnaataagacatagtctaatttaaaattctaattggttaattaaaaccaattaaatgagtctacaagctaatattatctcaactagtgcgaggaccatagaccgatataatcaagcttccaataagtagtttagaatttatcgagtaaattccctaacttattaattcctcctgactccaagatttagaattgcacttttaattatataaaacactctatatgtttcaaataaaaagacactattaattatccattgttataatccaaataatcaaagatcct

SEQ ID NO: 61646 - DNA, 727 bp, Cannabis sativa
  modified_base (220)..(223): a, c, t, g, unknown or other
ttttctaaacagttgttttaatgtttatttttagtagttgtagtgttgtttaattttatttcacagtgaacaatttttttagtaatttcatgttttgcaaaatgttgttaatatattttttcctggttgttcactatcgagaatgggacggaaaatcaggggcaacacctgcttattcactatcgagaatgggacggaaaatcccctataaaaaattaannnntataaaatttaaatgtataaaaatattatattacataaaaattaaaatattacacattaattattattcaataaactaataattatccaaaaacacatttttaaataaataaatacataaataattatccaaaatacaactttttttttttttgacattggggagggggaatttgatcttgagatctcctctttgtgagagaagtgtgaaatcactatgcctatgaccactccaaaacacaacttagaaattcttaattaggatactaatatactaaaaaatataggcacaagcataaattataaattataaattattattagctaaaaatataaaataaaatactaaatgagtctccgtcggggcaaggagtgtgatccctgtactcactccgtttaatattcagggataaaaagtaattcacgtcctcttcccgttctccatttagacggagaaatcccgtccctttaagagcgatccccgcggagcccataattttaatag

SEQ ID NO: 61647 - DNA, 780 bp, Cannabis sativa
tatgctttgagaccttgaatccaactcataagaacacagtttctgatgacgaagatgatattgagtttgtgagattagacaaaactaataacactactaataatgatgatcataatgttaatcacaaattgagcaattttggaacacattaatcaattgcttaagatgttcaaagctactctttgggggtgaacctttaaagaatcattatattccccaaatatattgtgttgttaaatcaacattacactctcatctttgtcgaaacaaaagaagattaaaactcgacaattaagagtacttttatttttttttctacaatttttatgttatctacaattatcaataatttagaaattatttttttattttacacaattttaagttgtgtttattttattatttgaacattacttttgttttatttttggattaaattaaaagtaatttccagttagattatcaagatttctttagtattgtacaaattcattaaatcaaaatcactaatatattgcattcagtattaacttttaatttgcagcatcgttattttcattaattgaatatatgtaaaaataattttaaacaataattaaaaatatctttttcaattatttattgtattattttaaataaagtaaaaagacctaacataaaattaaatatacatgtcttgcacgtaattttttcctagtacatatatatatatcaaatgccaattagcccttcaattatgatcaacccattcttttcatttgtgttgtttttttttttttt

SEQ ID NO: 61648 - DNA, 784 bp, Cannabis sativa
tagaaaaggaaagtttagctccagttttctcttcaagaaatctgatatgagaaaatgggaaactcaatacaggatcaggttatacagctggttagataaaaaagaaatgggtaaccaaacttactatttttaccttttttcgaaaataggaaagctagacaactttccttccaagtttgaatacacaaaacaggaaaccatattaatacttaccagccgaaattaattaataggaaataataaaatatttttgtcaattatatatgccaaaaatagaattaacacgactcaatcacaaacgattcttttgactcgtctttttggacaagtttttgaatttagatcttatactcgttagagtttagcttgcctctaataccatgttagaattgaggattgtatggttgagaaagttagaatagagtgtgaaggataagatgtgcgaatttccatctcaaaaccaattgacaataaaaggagtaacccatgcatcttatgtactttatttagttttcacacattatcaatatgagactttctaacatcctccatcaagatggtggctattttaacaatcgaatattgtattacttttggtttgtaaggttgacacctataccactaacacaaaatagaatggcatagacgttgattttaaaccgacatacaaaaaaagatagatccaccattaaatgtatcattctttgcttaataacacattttctttgcacattcatatttacaaagtatgatatctcaaatcttagattcaaaccaacacaac

SEQ ID NO: 61649 - DNA, 1462 bp, Cannabis sativa
agtcttggtgtaattgcttttacaataataaagtaattacattttcacgtgttgtggtgtccaacaggctaaagcccaccctgagatttaaaaatacattaattaatatacaattcttattttcatatatacatagtagttaaatagaacaattggttaagatactttaaatttacatgagagactaaattttgaattttcttgctcctttttttttacatgtatctacattttatttattacaaaaataaatgaagtataaagttcaaactaagatcaaacttataatcactagaatagggagatgctgctaaaccatcattctacttaaatttagctagttatttattattttagattatattaaatgtataactacgtccatcctaaaattcaatcttgggtccgccagtgtatgtgggtacatctttgttcccatatatatactgcatgtggaccaaatatcactgacattggttgatcttctttgaactttatttatttggctatctaatattgattccattggggtcctcttaaagtactgaacattcattaattttcagaaaccaacaaaaaatacaattatttactaataaaaatagagctaacgtgttacaaaaaaaaatagaaaaacaaaaaagaaattaaattaaatagatatctttaaaagtttatttttgcaaaaatggacttgttttcattattattattaattttttgctaaaaagttgatattttaaacaatatcgatgaagtgttctaaaactagataagtgtattattggaaatgtattttgcagagaatgaaaaaacgaaaagaaaaacatttaacttaaaaaaaattgtcattttgcaaaagggcaaacagtgtattatctttctagagttgtctcattttgaaaaaaattgcaaactaatctttaaattgttatttttttccatttttataaacatattttactaagatttttcttaaacaataaaataataatattataaaaatactttcagttgaccaaataaataaatatacagcgcaaatgaataaaaaaattacacaaataccacttacatgtacattcaacccagaatccatgctttctaggattaaaaacttagtctgagacaaccttcgggcaactacgcagcaacccaatgcaaccgaagataacctaactaaaaagagaaccactattaatttcggccacttcgcttgaaaaaacgataaaaaataatcaaaacagtaattgtttcaaattcataattaaaagtgcagaaaaattactacgaaactaaaattcaataataaattcagtttacttcacataaaactaatatcctaacttcaatttttagatttataaaatacaaatctcaaaaagttaaactaaaattttcaaacaatctaattcaagtataatttataaaaaataatctcaatactataataatatatata

SEQ ID NO: 61650 - DNA, 780 bp, Cannabis sativa
gccaatattttgaacttttagactgtatagtatgtatggaaaaaaaaaaaaacttgattcaacaaaattttcaataccaaacatgaaaaattcatttgttcttttattctccacacttttttttttctccaaaatctaacttccaaacatagaattacagcagcagttaaggtttagtctaattcccagttatcatcacattcaagtgtttacttcatttagatacaatgactgactgaaaattgtccttcaaatgactgaaatttatataagacaaatttaaagttttattgtgataatgccatttttctgattttttttatgcatccatcctttattatttcttatttttaacatcaaaagatcattctttctttgctggtgtagacacacataattacaatcaggtttgtcagcttgcaaatggagaattcaaacacttgttcatctgaagctcatcaagttcagatagtgatcaaacttgaaagtgctctagtgggactgtaagcagagaaggtgaatagagtcaagtcttgtagtttttatatgtagcctctgtcttctacatgaactaatagtatgtcgagggagaggttacatttttgtttgtacaactcatgaatgatgatttcacatatatataattctctagtttgtactgatttcgacctggatttttctttcaaaatgctactgaatgtatgaaaatagaattaatcagagttcataacataaaattgtttacccttttgaattgtgagattcatacatttttttttt

SEQ ID NO: 61651 - DNA, 906 bp, Cannabis sativa
ttatgggacttggttgaaaagtgagagcagctgtcgagatgggtttcagggacaccaaattagcatggacaatcaaaattttcaagggaatcacactcacaagaaatctatgggggtaacacaagatacagtaatctccaattcattcgatccactggcagacacacttgtaggggtcgaaaagatgatcgctgaacttgaaggccagcaggaatccatgacaactatcaaggaaggggggacaatgccaatgatacaagccaaagacaagatttcaagtgatagggctcaagatggaataaacgcaacatgggatgacagtggaagaggtaagagacgaatggtagacaacatggagttctctggttatgaaaaaacaaaaaaatccaacacttcaatggccacagatataccagaaaacaatctcttcaacgtccctatatcttactcaatggaagctcaaaatttagaaggatcggcatcttttatggtgggaagtaactccaaagagatgtccaaggaaaatagaaggaaggtttcggtgaacaaagattccaaagccaagaaaggaaagatggagggcaaagtggttggtacttctcaaatgggggttttgccagccactaagaatatggaagaggcgcaccctgagaatcagggtcgccttcaacaatgaatttcttaatttggaacgcccaagggttggggaacccttggactcagcgttccttactttccctggtgttgcgattcactcctaaattagtcttcatcgcggaatcgaagatgaacaagactcgagcggagactttgcgggttaagttggggttccatgggtgctttgcggttgaagctaggggaaagagtgggggtctcttacttttttggtctagtgatgtagaggcc

SEQ ID NO: 61652 - DNA, 959 bp, Cannabis sativa
  modified_base (342)..(347): a, c, t, g, unknown or other
  modified_base (520)..(530): a, c, t, g, unknown or other
atgtcaaaatatctcaaattaagtctttttcaaatttcaacaaaaatatctaggttatttaaatatttaatatactatttaattataaatatctcataagtaaatgatataaaatatcatttttctaacttataatttataaaaaataaaatatttaacaaaataaccaattttgaatttgaaaacattattgttagaatatctataaaaatatctaagttaattttaaatttattaattatttaatttatcttataagatcattttaatataatatttcaaattaaaaggataaagttatctttttaatttaaaatatgactaatattaaaatatctgatnnnnnnattaaataatatataaataataaagaaattaaaaaaattttaaatctggccataatttttaaaaaataaaataatcaaatttgaaatttaaacctcaaaatatcataaaattaataataatctattaaaaattaaatattattaatttgaaattgatatttaagtttaaatannnnnnnnnnnatattttattttgaaattagggttggaaaattgaaaaaatttgaaatttggggaaaaatccaacaaaaatcgcagttttgggtgtgctgcctaggagggctgtacttgtagccaaaagaggctgcaaatggcccaagacgcgcgcggaacaagaggactgtagggtgaggcatcgagaaacctcagcgggtgcagcatgcacacagacgggattgcagccttacgtgtctgaaggcgcgcatcccttgtcttcagacacaatgcgccccggacatgcgtgcaccaagcttcgacgcccatggcacccgatatgcaaatcttcataactttttcaatttttatcggaattgacttctgtaaaaaccaaaattgcttaatttttcacaaggaattcaaataaaatacattcagaacgaaaataaaattatt

SEQ ID NO: 61653 - DNA, 698 bp, Cannabis sativa
tgacatgggaaatgctcgttttttatattgtatacggcaaggcgcatcaattaccgtatgaagattcaaagttcaaagccaaagcaccattggagttggtccattttgacgtgtttgggtgagtcaaacaaccatcaatcagcggtatgcggtacatggttacattcatcgacgacttctcaaggtaggtatggagtttctttatgaaagaaaaatctaaaacttttttagaataatttttaaagagtttaaagaaatagtggaaggagaagtcgggaagaaaatttgatgcctctgaacaaacaatggtggtgaatatacctcagatgaattttttgagtatcttcgagaatgacgcatacaccatcaattcacatgtacaaataaaccacaacagaatggagtagctgagaggaagaataggcaccttgcagagacatgttgaagcatgctacatgtaaagaacgttcaagggaggttttgggcagaggaatgaaaacagcagctcatgtcatcagtagacttcctcaggcaaagttagggttcatttcaccctttgaaaaattatggggatgtaaacctgtagtaagtcactttcgagtatttggttgtgtgtgctacgtattcatgccaagctacctatgtagaaattttaacgaaaaggtgatacgatgtatctttgtgggatacgacagcca

SEQ ID NO: 61654 - DNA, 518 bp, Cannabis sativa
tttgtatgtaattaattctcctattttctttgacatgtaagtgattcatgtaaatagagattatgtcagtttgtgctaatgacttataagtgaacatttatttatcttcaactgcactttttttgtgtcctattgctagaaactttgaaaaagagtgagttttgagacaagccttaatcccaaatctgtggctcagtggctcttgaactaaatccatctgagtttcaaaatgtgtagtattcaacaatgacatgtaatattacatattaagaaaatcatacacttaacttcattggcataacgatagttaaattggaaaaggacaacttttttaagtgtatccaaaattaattgtctttttttcctttctttaaattgataatcaaagtggactcctttaacaaaaattctaaaccttgttttggcctcttttgaattgaaaaaaaaaataacttgaaaacaagaaatagttcaaaaaagacaatcaaatcattacaaaaatctcatatttcatttca

SEQ ID NO: 61655 - DNA, 853 bp, Cannabis sativa
gaaaaaaagagggcatatatataattataggcgaaagtagctaggcatcttatcttagtgatataatacgttacaagtgataaatgagagaaaaccaaggagtgtggccaaccagcttttattagtattattatagggattaggagtagtaggagtgtacttgtcaattttagcatcagtacttttgaaaacccaacactcttgactctcaagtgaagtttctgtgggcacacacccaactcaaccaaattaatctacttcactaaaacttccatatgcatacatacatacatacaatcatacatacatacatattcatacttatttcttttatacaacagggattataatgtcttctcttttttatacacgccccaatcacttcagcaagcctcaactaactgagatataggattttcgaaaatcttcatctcatttaaataagtttatatgtttaggtttacttttatacaaaagaatataataatactatctacatataaatttatacataactaatatagttttaatgtataattctctagtttaatcataatcatagtaatatcatgtttggactttggagactgatcatatgttgcattatataacagtaattttatgtaatttaattagggacttttttatttttacattttaattacgaaattctacatagaaatccctattgcaacaattagcactgcaacttaaattacaacaaaaaatcatatggaaatccctattgcaactagtgctgcaaccactttaaaaactcaaaccgtaaatttaaaaaaaaaattaaaaaaatagtacatgagataattctctatttaattagaagtgaagtgat

SEQ ID NO: 61656 - DNA, 764 bp, Cannabis sativa
ctagagagaagaaattagcaagattgaaagataggtctttttgaatggggaagcaagtgtgaaatatgatatgaaattaataatacttctaatacttctaatcttggaaaaagctataccggagtgcaaagccatagctgtgtataatctctgtaagaatggaaacaaagcaaaatcaagtaaaggaattgggatgaaaattgcttctaattaagatcttaattctgcctttttgagaagaaaaactacctttaatccagtctcgaattctgataagagacttgggattgaagcaactacttagtcttctgatttcgaataaaatgcaccatcaagatcgttctgtcccatatcaaacatgtagagaccgtgcctgaagtaattttctgaaggaagaactctgcgaaacctactgtctaagtaaagccacacatgatttgataccagtaaataacacacacacttaaacaaattccaatttgatagagtttggtaattgaaatattatacctttggccagtagttgaagagcacggtccttgaatctaacaaattcagacacctgaaccccaaaggagaacggtcttaatgaagctgcattggctggaagtatagtggatcctccagtggcaaaattacaacccttttggaagcttggtgcgaatccaaatatggatttaaaaaaggtaactttaatgaatccactgatgcatgcagtcaattaaggaaaagtatatcaaatcaaatatggatttgtaaagtct

SEQ ID NO: 61657 - DNA, 739 bp, Cannabis sativa
acactaccatactatgtaatctcttttgggattgactttaattttattggccaaaacaattatctcataccatgagcaaactaaggatcctacaataaaattacctaaagcaaaatataataatatgatttgattatatatcacaggaaaattttgcggacgagcttaaagaggccttcaaagtatttgacaggaatcaagatggatatatttctgccaacgaggtatctttatgtatgaatgagtttttcctttatttattttttgatatgtgataaattataatacgagaataattactattattaggaaaaaagaacaaaagaaaaaacgaggataaatacttaggggtattttttgtcgaatcttttttaagtttattcatactcgattattcaattatatattagatattcaattttgttattcaatctcatcaaattaatttcagtcatttgatcgattgtttagattagatcgattttattgattgaatgtatttcatgtatatttattatatttttagaccaagtatttgttagctcggattgaatccatctaattttttaaatctagtatttattggatttgattggatcaatccaatccaaaacaaagtgaaaatttaatcttaattttcatatattcagatattttaagtataacaatataaaatttaattactcatctaaattaaataaaaggctaattaggatttttgccccctgaactttaacat

SEQ ID NO: 61658 - DNA, 1632 bp, Cannabis sativa
gaatacaattgcagagatatttgcgatttttatagtttaaaagaatttttaacgataaaactctacaaagattataattcgataataaatcttatttattctaacttaaatggatatataattatgggcaagggacaattcccaagtgttaaacaatatatatttttgtatatattagttagtacttttacaatgtacactctaaaaagagtggataaattttttattctaattttttttatagttatgttatagttatttaagatattgtgagacacgcatgcaattattttcagtgtgttaaattttttcgtcttaaaattttgagatattttaaataactaaaaaaaataaactaaaaaattctcttaaacaccaaaataaataaaagagtatcaggacatctctaagaggtgtattagaggtattatttttgtgaaatattcgattctattacaataattgtagttaaattaggattaaatacttccaaacacaatacattataactaatttttgtcatctacattcttaagtgaaataaccacattatttaaaatataaattaagtatttgaacttattttgttcttttctcttatctttttaacttgatcgggtctattcataggataactctcttttcttttttctttattaaaagtaaggataaacccaaaaaaaggtgaggatatataaaccctttaataagaataacttttccattatatttcgatagaaaaaaaaagttcaattcgatgaaaaataaaatttttaatagagtatatatttttgtatgtgtatattcaattaattaattgattatttattaacgaaaaattaatattttttaagccttcaaaaaaatattttgtgtttttaagggaacaacaaattaatttatgagtatagtataattttaatttttgggagttgatttaaaaagaacataacatctaaattacaaaaatgatttctgcatatatcatctaaggattcaattaattatcaaaaaaaaataatctaaggattgaatattcctaggccaatttttattttaaaaaaataataaaattgaatttggttagagcattactatatatatagtatcatgtccaataatatcatattgtgattagtatagtcgagtagcgaacctcacgtattctaatttaaatttaaatacgttagaattaatattaaattatacacttaataatattcaatacataacttttaatttaatttgagttcttttttatttttgatattgaggatgaatgattcaaacctcttctctgtaagaaaaaagtacaatttttatgatgcattttaaaaagagtataccaatatatttttttatgtattttcgaaacagttataatcttaaatatatttatatgattgtctataatatgattatttaaaatattttgcaattttttttaattttattgaataatttaatgtgtcaaaaacaaagttcaaacaatatatttcattcccaaattaaaaaataacaaatatatgtgtgcatacatacaataattattttaaattgtattttcaatactgtaaataattttttcaaaaatttataaaatatattaaattaccacaatatatactattt

SEQ ID NO: 61659 - DNA, 1379 bp, Cannabis sativa
attttgtagcagtggctctctcttcatctaatataataatctcaatcatgtaaaaatgagatattttttttaaattagatagtaaaattaaatataaaaactcgaatttttctaataatacttagataatatctattaaaagtgatagtctctcatgtataatcatgtaaaaaaataatcacaacaatatctttcatgaagtttgagaatgagctctttgaaaagagactcccgaagctaacgaatacaacatactctatgagagaacgatttgcatttttttcaaaaagaaaaaatacattactttcattattttaggaaaagaaatagaaattgttaaaagacaagaaagaaacggccacagattgaatcaccacaaccgcataacgccctatattaaaacaaattccatataatggagacgatgagataaaatggacgaatataaagttgattaggatcacccaacacaaaaagcgtgaccatagaaaatttagttcagaccaaattgtaagataaagtttgatctcgggaaggtctatgattctaattctatagaatgggactttggggagaaatgatggttactttgaattttctctcaaaattcattcaactaactagtaatggtatgcatccgaactcctaaatttagcttattacttttaacggagatatgtatggtttatttgaagctaagagaggtcttatgtccctcttaatttttgccctatgcatgaaatatctgtctcgaattctagctgaagtggagagaaaaatagattttaaatttcatgacaggtgctcagaaatgaaactcaatcatctatgctttgttgacgatgtaatgatgttttgtcatggagattttaaatctatttactatcttttacaaggacttaaattgttttcaaaatcgtgtggattatttccaaataaattgaaatcgaccttgtattgctgtatatgaaagaaagggagattcaaagaattattgaggctttggggtttgttagaagtgaactttcctttagaaaccggggaatatcgatttgtggaagaagattattggctctagaatgtgaaataatagtggaaaagatggttcagagatagaatttggggaactcgaaatattttttttcctggtcgcacaactttgattaattcaatcctcattaatgctattcatacataatgggcatagattatggttctccctaaggctgtcttaaagaagataaatgatatttgtagggtaatcttgtggaaaggtactgttgaaaaacaagcagtccaagatattctcttggtctaaactttgcaaataaaaaacaaagggaggacttggttcaggaacaccttgatatgaatgaagc

SEQ ID NO: 61660 - DNA, 1239 bp, Cannabis sativa
tataaaaaaaatagattcaagtataattaaatgtttaaattatattttggatacaataaattatttaaaaaattaaaaaacaaagtgaaatgcttgctatagaactataatgtatactcttatgtaaaagtttgggttatatataatttatttaatgccaaaaataaagatgctactggtgatatggataaaagtgacgtcctactatataattttaccttaccataccatattacaaaataaaatttagataatgaatcaaaaatttataaaaaattaaaacaatatgtcaacagagacaaattttcattagtaaaaataatatataccgttttttttttgttgctttatagtttatttatatatatatatagttgtattaatagttgttgaggttatttttttagttttttttttttatggttgatttatagctgtcttaattgatttcttattctttttaatttttactgagtaaagcgtatttttataattttaaaactttataagagtatttttgtaataaaaaattttaagcctaaaattgtatataaaatatatatatataaaaaaaggtatttttacaaaaatactgaattttagacaaaaatttacaattttattgttacgcggaattttttacaaaaatactctttttataaaacaaccttaaactaacaaaacagaacaattaaaaataagtacagtagaacaactaaaaaacaacagtaaaaacttaacacactacataatatttttttaaaaaaattctactccacaataaaaaaaaagattcatgatgtaaaatcctcaatacaaaatatatttagagataacaagtaataattatatataaatttttactttcatatttgtaaaaagcattagtaatcacgtattaaaataatattgagtaataattaattggtttaaaataataagtggttttgaaaaaccttttcgtcgggttataataaccgagggctatacagaaaatacaattttttctctcaattcttttctctctgtttttctcttttctgttattgatcatcagttctttgattagtttacagattcatcaaaaatgcccaatagattcaacaatgaccatgcatatataaactcgatcatcatcactttgtatatatatatgtaaatatataacatgatttagggttagggggttgtatcttgtattgcacatcccaatatgaaatgaaaaagtgaaagatacga

SEQ ID NO: 61661 - DNA, 1866 bp, Cannabis sativa
ttacctccaaccaaacgccaacctcccaattagaatataatttagttggtcccaaatgtattcttggataggaattctactctatattaataataacattatatatgtacatattattcgttaatttattatggctggtgtctctgcagctatctctgtccgcttattttctctcttcctatccatccctatatgattacattaatcgcccatcttgctatatgtgacgaaacatagaggccatgataaattatatttgcttatgcgctcatgaatgaaatgatttggtgtctctctatataaatatatatatatatatgtatatgtatataaaagtatatattatgtatgtatgcatagccccatgttggcgaaaattaaaacacactataaacatgtgtcaagatgagtcatgattgaggccctaccgaatatatatatacgttttaattttacttggcttgtacactagcttagaataatatattattgaaattgcatatcctgaaattgccaccctttccagttaagcattcaaaatatattaccatcggtttcttactaactagacgggggtggtataattaatgtgtggtcccgcataaaattattatgatcgagtgtatattatatattatttgaaaaatcttaatgtgtctcggcatcaagctcaaccacaacaaaagatgatatatcgaataatctgaatatatttcatttaataaattaatttagaaacactaactaattatagagaaatattaaaaagtattattagttcttaataccacctaaggtatcatattagtatctgagttgctttaataattattataaaatatcactactattactaataccttatacaaatgctctaattatatgattttaattgccatcatttattaaattctttgtctttattaatattagtaaagtcatttgattaagatcatgcatgtatgttcacccaaaattatttgttgttctttaacatgattttttttatttgggttcctacattcagagaataagttaggttttcaaatagaataagttagatgttgattgttaacatgaacatattttgtcaaaataatatacacgagctggttcttataactttcaatggaattttctcttatatttgtttttgcgcgcagaaatatcgggctctatatttgaaatggatgtgaagtgagaaccgacctatatataaatatatatctataaatgtatgaggacaattgttcagaaaatatatgtatgaggacagttagctagtgaagggtgaacgagctagtacgtacaaacataaaaatcaataatatacttttttttattaaatttacaaatacttttttggtaaaggagacgaccagtgatcatctatatattcatgacaagtaacaacatagaggtcctctatataaatatatatatatatatattatattaagcctgttacatacaaattcttcaattcatttctaacagctgatcattatatatatgatctctgatcagtacttagtcgtccaacgtctaaagatatattatagataatcattacaaggacttaattatacatatatataaatgtatatataactcattataaaccgatagaatactaaatgtatgtatacatacatattaacgtagcgtcatattgtagagctagctagccagaattaagtattgggcagttaaagttatatcgttctagctagttttattatgtacagaaattcgtagaatcatcatgcatgattttttttttctttaattagaatgtaaaacctacttcataaaatagacgatttataggtaattagtatataattacacatatacgtaatgcat

SEQ ID NO: 61662 - DNA, 1662 bp, Cannabis sativa
ttctgaactacaagtggcttgatccttcacaaagaaggtacgtatgtaggcagctcggttaattaaattgactgagttcagctgtaattccaaattcattccaaattttccccaaattacctcaattatttaatatcatcgtaattggaatcaaatggtgtttcctttaaacaaaagattgtaattaagagattattcttataatcttggatgagtcgaactaaaattaataaactcttatgctataaatttagcataggtaaaattatgttttgcatttatttttaatactttaaatgtgaaatttttgcttagcataatttttggcacgcccagtgggacccattcttcttttcatctccgactccaactatgataattattatttaactttatttttatggtgctaatcatgtttaccgttttaggaaaaaattacaccacaagtcacagcttacttccacaagctaccaacaacctcttctgcccaaggagggaaaaggaaccgcttcttggcagcattttctatcgatcgagtacccatttcatgcagggtacccgaaccagtggagaatgtgaagacacctataccagttagaaaggctagaagagggaaaggtgtgaagagtatccctaagattgcgcaggccttgagaggcaaggcagcaaagggcttcaaaaagaggcaagcccgggcaatgaaaaggtccgcaaccaaggttgtcaaggaagaagggaggccaatgaagattggctcccccgtaatgatccaaaaggaatggggccatgtgcgtatcttgattggttccattcctattttcttgcccactatcacctcagtgatagttatctccgctgaggaaactaaggcaacaccgacttctcaaactcagagaggtaggaaggcaacaaaaggcaagagggggacaaaaaattcaccttcaccaaaccctcttgaaacgaaggaattagtaggaggcacgccgattaggcctccgatcgtaatccctgttaatcgcccaggtcaacatggggcatctgctgagatcaacgaacaccctatattagatgaggggtataggacgcctttcttcttcccaaagaaggctaggagtgacaatgtaagggttcccaaagcaatccctaactcgttctgaaaagaacatggtgactggttattcctacagggataccgaccaacaagggtcacttcacatgctaagcctacttcctacacgggacttgtaacttgatcaagagcttgtgccatgcgtacaattcctgttcaggaatcagtgaacccctttgtccaaaaagtttaagaagaggggtgttgcacatctaaacactctttagaagacactccctttatcgaacacaataagggggtgtctgctgatctcattactcagttcgaagcactaaccattggcaatgataaaaatataccagtgttagtagttgggacaatcagtgatgaagagaaaattcaagaactacaaagattattggccgaaagggatgacgaagtagcccgactctcaacacaattatctcatcaagctaatatgagacaaaaggagagtgaggttgggtagcattcctcaccttcagcaccacccgtaggcaatacacaacctccaccacttggtatgcaaccac

SEQ ID NO: 61663 - DNA, 1502 bp, Cannabis sativa
cttataatttactacatttttctttataaatagaaattttcaagtttgaattctcacttctctaatatcaaaaaaaaaaaaaatacgttaataataatataatataatagtaaatttattaattagtacaagtaaacataaagacttttatatatttatttaacttaaatttattagaaaatgtgaaatttcaatacaaaatcgtattataatttataatagttaataaaagagaaattttcaaaaacaatattttttatactttatttataattttagagtctaaatttttatattgatataaatatgtttataaaattttaaaattaaaaaaatattttgttcaagaaaaatttaaaaaaataattcaaaaataaccaagatcaaccacacgacaacaactatatataaactataaaacaattaaaaaataatcacaaaacaactataatacaattataaataaaaatgtttaaaatgtaaaaagttaaaaaaatgatcatgttgcgttgatgaatttttataatatttttttaaaaaaaattaaaaaattttggtttaggtaaattttattaatgttttaaggtgttcagtggtttagaatatatcatagtaatactcaaataataaatttttctatttgataattgcccatttatagtgtagaatactctataagataattatatttaattgtgtgagttaatgtggagtacataataatatcatgtgttcgtttaaaaaaaaaaagaaaaaaaaatattatgtgttatgggataaggtagggagtagtttaaggtggcgtatcaatgctctttctattttctcttgggtctccaagtttcccggtcatgcaccaaggtaaggtttatccatttccacgaaagtaagattaacttcccctacttgacaatgctgactcagcttttgaacatttctttctaatccggtcagaaaggaataatggatttaaatctactgtctaattttgtgtaatctattacaatctgacacttgtaatacttcatttattgaaattgacttttcctcttttccacattaaacatttcaagtaaatactcattaatattaaaagtaaataggtattttatttagaaactgaatgcaagctatacattttttttttgaataaaaggtaaagtttcagtttaaactttaacagataaatatattgatgttatttttattatccatatatttatatttttttaaattagaaaattattttatatattatttttaattatttttttaaatgtatagtttgggttattttatatattattttttaaatgttgtttctaaagacaaaaaataactattttaatgtaaaaaaaaaaaactcttgtgaatttttgtcgtaatattcttttttaataatattagtttttattatttattttctaaattattattattattagttttaaaaattacattttagattaagttctctcttattctttttttttttttttttt

SEQ ID NO: 61664 - DNA, 1340 bp, Cannabis sativa
  modified_base (669)..(672): a, c, t, g, unknown or other
aaataaaaataagaaaaatttaattttttttaagtaaatcttcaaagtttaatttagatattaaaaaaattcattttaaacgattaagaaaattaaaattttaaaataattaagcgatttaaaaaattatttattttttattaaaaaatctattttttttttatcaagaaaagaaagcttcattaatcaatagagcaaaatacaacaactcgcaaaagctaccaagccacacacggttcaagaatacacaccgccccttataacccagccaagacgaaaataaaactacctatcttgtaatctcaaaaggtagtctcttagacaagtttttaaaaaatctattttgatataaagaataacattaaaaatttaacttttatgaaaactaaattttacggaaacaagtttgggtttattttttttttctccaaaaatctagatttattaaagtaaacataacaatttcttagtttaatttctaacttttttttaaaaaaaaaaaaaaattatattttttataaaatttataattatttttctttattttttaagatatgagtttgtaaatataaataagtttgattttttcttcaaaatcttagtttgtttaaattatttattgggttttcaataattttggtgttatttttaagatacgtgtttataaannnnataaaatttgaaaatatttttttttaaaataatttaggcttttgtagtaaacttaatatttttttaattaatttaatatttttttatcaaattttttaataatttttttcaaaattaatggaatattataattttaaaaattattatttttttaataaaagggggcaaaattttgtattggtcaaagctcagggggtaaaaatactaatttttaacggtaaaagaaacatgacttaacagaaagggcataattatataactgttatattttagagagaatttttaacaagtcgtatattttaaggggtaagatcaagtagtgtcaaaagtgcagggggcaaaaatactaattatcaattttgcctcctaaatatttgacaatactaattctgccccttaaaatattcgacttgttaaaagtatatcctaaacttttacatttacagaaacttgatccttctgttaggtttcgtcccattattccatttaaatgcgacgtgtctttgtaaattagtaactttgccccctaaactttgacaactatcagattgtaccccatcaaaataaaaatgagaaatattcaacatttcttttagtaaatcttaaaaaaattaatttagatctttaaaaaattatttgggatgattaaaaaaattagaaaaagaaat

SEQ ID NO: 61665 - DNA, 1832 bp, Cannabis sativa
tcatacatgtacatggtattacgtacgtccattaacggactacccaaacatatccaaaatctatgtaactatgagacttataagctgattaaactatcactctttggaactacgtggctgaaatctcggataaatagaaaaacaaactgtaagggtcattcacataccgatcaaaacatcaagatatgtcgcaagaaagattccattcaccacaactgacaactaacttccccgtaactatcctattttcaaactccaaatgtcatgtcatggaagtcttcaagagattggacctgggaaaatctctcaaaaggtccaacgatctagttgttgcttggcttcagccatgtctttttgtgccttctttcttcgataaaatataggacaatctcgactgagattgaaacatgtaatcagcaatacagcaaataatggcaaaacgccagttacacgatgacaaattgaaaaaaagtactctttttatgttaaagtttgatctactgagcctggtctagtactgaaccgtacatacaattagaaagcaagggagtgtttctcttaagtctgattgtaaaaataacacttgactttttattcctttctattcattttccgtctacgattcaattcattatagataaagcacacgtcactaaagtaccataatgtttaaatgttcacatcccaattctatcaaaacatgtatatgtaaatgtaggactcatactaaacttaaatattaattaatatactgtaccaaaccttacaaagaaaagataaatacctcgtgcagagcacatcctgatgcaatgagccttggcactcttggcattgtgtccaaagtctcccaaaaagcgtctctagctcagaaactacaagcatcacacgagcccagcaatttagttaaggaaacagtttgattcaagcacacaggaatgttaatgacctgagaagacataaatttacaggagaaacctaccatttgacactgatttgcaatatagttcagcctcccttcccttacagtgcgagcagagagtttgatctgtcttactgttagaaacaaaaattaacttgtatcagaatttttaaacattcaaaagtaaagacaaggtgtaatccacacacaacagtgcctacatatttgctcgctacaattaacctcatattactcagatacaagaatttcctaaattccttcatagttccaagttgaaaattttaataaaagcacgtagtgtataatgtactcatacaagacaatggcacaaagaagctttttcacggtctgagaagatgcataaaccataaatgatcagagtgctagaagagataggaaaaaaaaaaaagtatataactcgagtgttcttcagtaggttcccacaatccacatgctcacaaagcatgatacaatataagaccatcaacaaaacctatctataaagagaccttgggaaaaaggaatagctatgatggagaattttacagacaattatacatgcttcagcatgccataagtggattttatgaaaaaccatgagtccatgattttcaccagattataaactcaattccggaggaatgtaaatttatacatttgtgcttcactagaacaattttgttaccagattattatgtacatttgcagaaaataatgatctccattgttgttgcatttagaaacctttttagtgtgacaatggccatcaacaattagctcagaaagttcaaaaccagaacataaaaaaacaaagtaaaataaaattcacagatagtggcaaactgacaatataaacaaaagctataacatggtagccagagaactaattaag

SEQ ID NO: 61666 - DNA, 648 bp, Cannabis sativa
aaaaaaagtacacactacaaaaatgacaactcaacacaaaatgacaaaaaaaaaaaaaaagtagagtacttattaatattatgaaaaaaaattgtattttctaaaaatacattttggaaacaaaaatttaaattttgtaagtgaaaaattatttttaaaaatatgattggttgtagtttggtttaacatttttgagttttaaaaaattaaacatgtgattaattggaaatctcaaaataaaaaagtaagaaattttttgaagagtttttaaatttcatagtttgaaaacatagaaaatataaaaatagtgttttaattttttagcctaaaattcaaaataatattcagattttgtttttgaaaacactcaactaatcaagaatttttatgtggactaaggactcccatcattttaatttttaaaattaaaaactgttttcaaatcctaaactaatcacaagtaccatcttcggatcatattgctattggtataattaagtatcgaatcttatataacttaaaaaaatagcttttaaaaaatattactaaccaatcataagataccacttatataagatgctaaacaccactgatactcaataacaatactcaaatattattattaaaacaactaaaaactttaagatc

SEQ ID NO: 61667 - DNA, 1489 bp, Cannabis sativa
ttcaaaatcaaaaaactcaccacacaatcaaggatttggtccaaaccagtagaggatttgatatatccttcttcttgacccacatctgtatatcaccgccatcttcatcagcagcctaaatacataaacagattaaaactcaaaatacataaatgaaaaacatataacaattaaaaaagagaaaaggaaatcaatataacagatgaaaccaaaataatcaaaaccaaacaaactaagaagactttgcaaaatagaaattgggtgagaaaaatcaaaactaggatccaatttcgtttctattttggtctcggctggacccccattgattttgctacttatatatatatatatttatatagataaaaatttataaaatgagtggattttgtcccttacatttcgtggtcttcatcataactattagatcaaagattgaattgatctaaaaattgaaagctaaagtccatcaaagtttctagagtacatttcatcataatcaaagtacatttcatcaaagtttctagagtacattttttcataatcaaagtacataatcaaatacatttcatcataatcaaagtacactacacaatcaaaccattctgtaccagctagccctcagaatgtagattttcaatttggggctatggagacttgcccgaaaaagtctccacagtcgccatgaaaatcctagcttggaactgtcgtgggctcgggaacaccacaatagttcgacaattggcggctttgaaccgccagcatcaacccgaaatggtccttctctcggaagtcagattaaccatggaaaaatttacaagaatcaccaatcggttgcactttgaaggaactcattatatccccccaattggtcaatcgggtggcttgggtctctgttgggtgaaaggagtagcttgcaatatcatatcatccaacaagtttgttattgttggggaaatatcttcagacccctctggaattccttggctgctttttggagtttacggtcccccgagatatgaagataaataagctttctggctatctttaggagatgcggccctcactaaggacgatcctatactgctcattggggacttgaatggtacacttcaagattctgaatgtctaaattacgctaattctggtaattcttctcggtatgcttttgatctaaggcgcatggtgaatagagtgggtcttgtggaccttggataccaaggcccgggatttacttgggtcaagggctctagccgtagcatgaatgctggaagaagttgtataaaacgtgcaagacttgacagaggactagccacaacggattggagaattcagtttcccaatgcaatagtagaacacctctaggcctctgtctccgatcataggcctatcctccttgatactataggaggagttcgatgtcgtagtcggcttttcaaatacgaaaatatgtgggcttgtgacaaacgctgcttttgggtggtcaaagagg

SEQ ID NO: 61668 - DNA, 1049 bp, Cannabis sativa
cttcaacgttcattgaactgttacagtgttacctatgattgtctacatctattatatataggtgtacttttaacgggcattacctataaataaataatattaaaaaaattcgttttataattaatttaattaaaaaaatttctcatttttacattatatgagttggatcagtccatcaattgaaaaaaaaaaataataaataaaaaattttttggcaaaaaggtgataaaaaaattgaatttgacttaaatattttttatataaatatatttttgatattgtgtaagaagaagtattttttttatatattttttttaattaagtagctaaattatgcatagaaattataatttttcttttattattcgctatcggacaaaaattgaatagtttaatatttttaaaattaatatttacagttaaattggcttagtactcattaatgactaatactcattgagaagtatttacaatcttgtatacattattttaattaactacaaaatatttacaaaaaaacttattaccattttctcaaaaacttttttttaaaatttttttataatacatatatagtaataattattgactattatatatatatatatatatattttttttatattctataattcttgctaaatttaacttaacataaatacttaatttcatactattattgactattatgtattcatacattttacaagtgttttcttttgatttgtatttttttctttgttattatttgtgttatacatgtatgcaaatttttttgtttatattttgttaatatataatcacatttttgtttattataaaatatataattctcaatatgatttttaatttttttgaacagagttataaataattttgtgtacgttaggtaaattatatacctataaacttatctacaatttatattttattttttcaaattaaataatgtttgaagtttgtaaagttatgtttgtttatttattttttgatgtaagaattatttttcaatagattaatttattcactaactcattagaaaataatca

SEQ ID NO: 61669 - DNA, 1585 bp, Cannabis sativa
gattactcaaccttgattaaaaaagttaaaaattatattttataaaatcaatgtgatggctatgattattttaaatgataataatatattaattcaaatatgttaattttttttttcgtgaaactacaaattcaaatacttatagcaatgcaacaaataatttaaaatatttatgtgaagactcagtcaaaccgagtaagaaatggattaataaagaaagtgggtgagacccacaaaattatttttaatttatttgaacgcccctacccaccttctctctatcttttctctttctttctctctcttcaaaacaccaaagataaacctctataactaccacctgtggagcaccgacgtcccacctctactcaccgtctgatcacacgcaccggagctgcacgaccaccgaccgatggtgatcttacacctcaaactcaaaacaacctcgaacattaaactaagctcatgattacctatttacattacaataaacatatcccaagtaacataaccaaaaataaaatagaaactcaaaattcgtcattgttgagtcaagtttgagtactcaaacttgctcaaattcacacataaccagcaagaagttctcaaactagcttcaagtaactcaattacaacacataaaaaaaccaaaaacaaaacctagcttggatagaatctaattcaagaaattgcatgcttgagctcactaaaacctccaaaaaattcaagaaaaaaggtcctaggactttacctcagatcttcgcttccaaatcctactagaaattaccaacaatcacagaaaaataacctttgaatcccctggttccttggtgccaaagtaaagaaggagagagaaaactaggtttgtgttttactttgtatattctaaggttaacacatatgagaggttaattatttgatttaattaaaaagaaataaagtttaaattatactagaaaaatcccacacatactttaaaaacgaaaatccacctctaagagaaaatgaccaaattacccttgcttctcacttaagtaaattcaaagtttaggggtaaaatgttcaaacaccacaaccccctaaaccctatatttcaaatatcaacatgcatacacttcgctaaataaaaggttctaaactaacccatgtgactctaaccgtcgcatttctatcgttagatagcaaaaatcacaaaaatgtaaattttcacatatgtcatatttaagaaaatttccaaaaaaaattgaaaaagttattaaccctaatctctacttttaaaaataggacctacaatataaaatattcacatatagtcataaaacataaataattaatgctaattgcctctcaaattcatattctacatatgtagtcattacactagacagaatgggtttgcttttaaaagatctagaaccatgcgaccaactgatttatgatttcagtgggaatggagttgctttgtgtggtaagatcaaattaccattaactgtcgactcgacactgccttaaggcaaaatactattatgacaactttcatagtggttggcgcgaggtctccgtacaacgtgatgatcggaaggcc

SEQ ID NO: 61670 - DNA, 2324 bp, Cannabis sativa
ttgaatagagtattcttaaatagaagttctactgtataaagtgaggaagttacccacatttctttcaatcaaactttgtgattaaacaacctcatttgattaaatagaaagtaaatgaaattcaaagcttttaagattgagtaaaatttgaaaatttcagaagaaaccaactgccttttttgccaagctcaatataaaattaatcttacaaggctttttttttctattaagaatttttttaaacaaaggaatcacatgtagggtatataaagtgtagaaattaaaatgtcattcatattacctactaaatatttgtgagactcactacattcctacttagaatacaacaccaaacaaagagtttattttaagtgcactcacatttcaacacttatccccataacaaatacttgagttccaaattctaatatgaattacgtaactaagggtatttcgtaattaaagttaccaatatatttgtgtaaataaataacgaattacatgtaggcatataaagtgtaaaaattaaaaaatcaactaatatgtagcttttctctctctggagtcttctaggaggtatgcgaaaccgtttcatggctgttggtctggtcccaattatggtgtttctcgtccaccctactcagttaagtggtggttttcattcattttttcttcctttttgtcgttttagttcattttctttcatcattaagagcattaattgctctgtgtattatctcctgttcacacaatcccatcatattaattgcaaaccatcattttacctctattctcttcctatttccttgttttacttcgtatctgggggtttatgttgggatctttggcatttattatcgcctgagcatatctccagccatcttttctctcttgaagattggaaaatgggggcggaggtctgggtttatgaggattttaatagccttatcatcattatacctcttcaggtgaaggctagggatgtgactaggggcgattcgagaaggcacctacggggtttctggttttttctatatatagtaagactcaggtatggatcatggcacttccctttcatcttttcaattccttggtttgcttattattattctgtgtgtgtctgctttgttttgtatttctctatggatgattttctcaataccgtttctaatactttagtctttccttctgatgaaagcacaattttcacctatgatgctagctcttcctcttccacccctgcaaccattagcctccttctgaaactccatactattagaccttataataggccatccttgatgaaaaccctatctggtatttggtcatcacagtgtagatttcctgtttctgtcactgagcatgctgatggtcttttcctagtgactttcggttgtgagggtgataagggtagaattttagagggtcagccgtggcattttgctcaaagtgtcaccatctttgctgccccagaaagttctttccctattacccctgatactcttcattatgttcctttctggatacaagtttatggtataccctttatgtgtaagtcctttgatttagcccgtttcattgcctctaaggttggggaccttatagaagttgataaggacactgtcaaggagggaactgggccttatttaaggcttagaattctccttgatgtcaatcttcctattaggaggggtatgaatattagattcatacgtatgggtagagagtttgtcaaatggattgactttaagtatgagaggctccctgacttttgtttcttttgtggtaaacttgatcataccaagaggtattgtcatttttatcttcaaaagtgtgatgatagtcaaactgagccactatgcccttacactatcctcctgcgtggtaaggaaaaaattgtggacaaagctatgccctttcaataccctcaccctccagctattactgttgttgatcatgctcctgttaaccttaatcttcctactaggaattttttggataatattatctcttttccatcttttctggctggtactggtaattcagggtctggttttctcagccctcatacttcttctactgtcatgatgcctactcctcttaatcctaatagtggtcatgcttttcatactggtcttaatccctttggttgtcaccctttgaggccttcagcattcacctcttattccactgattctttggtggttgctaccactgttggcacaactgttatgcattctggtgaaatgagtatctcgactactcctgctgttgaggttgtctcggctagtccagttgaggctgttgggactcatgctgaagtt

SEQ ID NO: 61671 - DNA, 1417 bp, Cannabis sativa
ggatataatatttgtatccatttagagatgtggttttggcagggccccataaatcagcaactactaactgtaatggttcactatagacagtaagagatgagtgaaggaatggaagcttgtgaattttgcctaaacaacatgatgagcaaacagaaagaggatttttattattgatagtgatgttacaagattgaagaacagatttaacaatcttttttgatggatggccaagtctattatgccatagatcatactcagatatggtggatctgttacagtgagtacaaatagaggaatctgactctttattggaagacacagtggtaataaaaggcacatggggcagtggctggtgcagaggcttgcacatgaaattgagaaggcttaaaaatatagaggccattctggtgtatcccagtgagaagggtggctcgggtttcctgatccttaacaaaacatttatcagcatgaaactcaaagaagacattattgtcatgagaaaatttagaaacactaagcaaattctttgtgatttcaggcacatgtaatagattatttaaaacaagaggatgagaattatgtggatgaataaaagatttgccaatgtgttcgatggacagacctgaaccatctccaacatagagttgatctgctccttcatactcagtgcttatgttcagattttgcacattgggagtgcaatgattcgatgctcctgagtccggataccagttactgtcatcaatggtagttgtggcagctatgttggcttgagcattgggagggttggttgggggaaaaactcctgtgaagctcttgtcaaacctgtaaaaacaatcaagaacagtatgcccaagcttgtggcatagctgacactgaactcgatttgaggaagtattgaatctgccccctctgctgtaactagacatgccacggccattagtgttgagataaggaggtggattaggatagttacctcctgtagtgtttccccgattttgaaagcctcgaccatttcctcgtgaaaaacccgaaggtgttgggggaattctgtttgagtttgagaatctgttgatgcgattttgagcattctgataggcgatattgtcttcagcatactgatctatgtcagtagttctgagattgaacttagatcattttcttgatcaaaatcgatcttttcaatgcgagactcagaagcaagcaggagagcttcgatttcggctactgagtattcttcaattcttgtattagtcgatatgatgaaagtgtcatactcggggggcaagcctttaaagatggcaacaatgtggtctcttgagctcaagacttctccaactgaagcaaggagatccacatgctgctttacttttaatagataatcgtttagaggcagagatccttttctaagcttctg

SEQ ID NO: 61672 - DNA, 891 bp, Cannabis sativa
tagtttgaaatgtattggtttaagaataaaatattaaggttttttaagtatagaaaatcaaatttcccgaataaaattggtaacggatcaaatatgggttttattattgtaccatatcatctattaaaataatattttaaattgatatagtaaattgtagatttttgggattcaaattgtgatttttatagatgttattattgtaacgcctgtctttttttttagagcattcctaataaatattttatgatgtcaaatattatatttatgtagtacgttatgaatgacaattaaatttttatataatttagtaaatctaaatatgtagcactaaatattgaattgtaccaatagtgttgtgtcatttcttgtattgtttggcatcttaaggtgtcttttagtatttctctattttttaagtgacacctactattggtattggtcatagtactttagatatgggtcatactttttgatacggtacgaatctagtacgagtcaggtagacacgaaaaaaatataagcttaaacacgtcatggcacaatactataaattagaacaacatgatacgaaaaatatatgcctaagcgcgacagggtacgaaacacaaaaaatataacacataaacacgaatacactaatcgacaaactcaaaattcacgatacgatgtgaaatattaaaaaactttatatttgataattatatatatttataaattataaattaataaattaaactaataatggaatttaaatataacattaaatactataattctatatttaaattttttttaaaatgtaaaactaaaaccataaagtcaacccacaagttaattaatagaaaatttatataattgaccaaaaaattttttaaaaaattacaaaaa

SEQ ID NO: 61673 - DNA, 1426 bp, Cannabis sativa
agagagagagagagagaagaagatatgtttttgatgagtatgttcttcctcctcgtgtgcttgtcagtttcatcattctcataagtgcaactttgaccccattactagctagtagtccttctgtgccatctactaataataatatatattgtacgtactatatatatatatatatacatcccatgcattcttcacatctgtttataaatcatattgtttcattatacttataattagatcatgtaataagtatatatatataaagtgtgttattaatcatgagataatatcaattcagctatctatcccaaccaaagcacgcggtataaaatgccactaataattatattatgctatgtcatgtcatatcatatatatatatatatattttatttagttataattttctgtataaaactatatacatattgaaataattacaatttacaggagcaagctgaaacagacagagatggagtgtgagtacttgaaaaggtggtttggatcactgactgaacaaaacagaagactacaaagagaagtggaggagcttaggtcgatgaaagtggctcctccaaaagtcatatcaccccacagctgcgagcctcttccggcatccacactcaccatgtgtccacgttgcgaacgtgtcaccaccaccacttccaccaccattaacggtgactaccccacctccaccgttgcattgtcctctaaactcaccaacagccacctctgatcgtccccccatatctgcatccacattgtctaatattgacccccactttgtggaaaaaaagaaagaaaaaaagaaaagtttgatttaaaaataattaattaaaatttaattatgtatattagagaatgttatatataattaaatagctagctattaaaaaggaaagaggaagaagaaagtttattatgcaacaacgtgttgtgaggggacactactacactatacgttgccttaattaagaaatctccgcatagatattataatgatgttttggttgttctttggcaatttgtttgccttggaaaccatggccaaaaaagaaaagaaaaaggaaaggtggataattttgacgatatgttacaacttacaacaacgcactacacccaatttatattactatttcaacaagttgtgtataaatttcaatcattaattattagggtgaaaaagttaagtggaaatttagtatttaagggtaatactactgtgtgtgtgagtggttttggccgttaattgattaaccaattagaggatctctaatagaggtgtaaataagcggtgaaaagctaataaaatttatttaacaaaaagtgtgttgtgtcaaaaagtgatgtaaatttagcacatagcaaattttgtgtcaaatttagcacatagtaaattttgtgtcaaatttagcacaacatt

SEQ ID NO: 61674 - DNA, 734 bp, Cannabis sativa
tagactaaattttttttttggatgccgaaacaagtagatggtgcatcagtacatcctttttaagaaggtggattgtagaatcacccattattatattaccaattaataaaatatatttttaatttatttagagtaattatgtcaattgatttatattttttttgtcatatcttcaatcttttcacttttagagatattgaaaatagaaaatatacatgataaatcaaaaaaaattttaaaaaaaataatagaagtacatcaatagaaaaaaaaaataatttttatgctttgaattttttttatttatattatagttgtcagagattatttctcgttagtttcttactttttattgaaaaaaacgtatttttataattttaaaacatttacaaaaataacaatattaccagagagagcgtctgcccttctagtgctctgcggcagttaataagtttccagtaacggtttttccacaggtttttgttcagttttcaactggttttctctggttttcatggggtttcctttttcttgttgttaacttctcttccattttctctggattggctattgttctactctgttcatctattttcatggatccttttaggcaaaagatgaaagaacctttaaaattgacagcggaggaaggatctatatttgatctctctgatatagttgttcctgatcttcatattccatctgatcatttgttgtatgcgaaggttcttact

SEQ ID NO: 61675 - DNA, 952 bp, Cannabis sativa
  modified_base (45)..(45): a, c, t, g, unknown or other
  modified_base (544)..(546): a, c, t, g, unknown or other
aacgagctgcacagtatgtttagaaatcacgtaatacgcctatgntagttagggtgttacacatattaagaatgttgaataaatatttaagtaaccatctaagaaactttcggtatgcagccaaataggctataagaaatttaaggagaacaaaatactatatgttcacttatcagaaattagaaaacagaaaattttggagatcctttagattttttattctaatcttataaagattttagttgcgagatttttgtcatatatggctgcaaaattaggaatgatattgaaaattattaaaaatatatgttgtgacaataaataattttggttgcattttagtaacaacatgagctctacaaggtcaaaggcacattgactttgagctaattgttattaaaacaaagttcagactaataaggtgtgtatagaacataataaggacaaacttcatatttagtgtgatccgaatcatcaacgatataccacttaagggtttttcaggagcttgttgctcatatatggatgtggtattatttaagannntgctagtttagtgggagtttgtatttgagatgatctatcaagctgacacatatttattgtttgattctgcagaaaaagaatggacttaagtttgagtactctgaatgtattctttctattgaggtttaagtataagggtagaaagactaaaggattgatctcaattaaggaggaccagttgtaaataggcatgctaagattacatttgcatgtaatttccatgctacgcatccatgattgatctatgtcatttggctacagtgatatacgtgactattgatgagttcagctatgcaaaatgttgcaaaagccgctttgatcctatgttagtataatcagtggacgagattgttttgaaatacttataattatgatagcaaaagttaagcgcttataaggttacaca

SEQ ID NO: 61676 - DNA, 999 bp, Cannabis sativa
cattagtgccggttagggcatgggctcgtctaattcagcgatgcgatatattagtgccaggatatgacacgggctcacctgataaggtgatgcggtgatatgatgtatggtgtcagattatgacacgagcttgcttaattaggcaatgcaatatatgatcccttttatttttgtgcatatggttggttatattatacactctagaatgttattgtttaatcattttataatagtgaaatggatagttagttatttcatgtattctcccttattacttttcttgctcagtccttgtgactcacgagtgctctatggtgcaggtaagggtaagaaaaaggaaaagttagagcagccatgaggtggtactcttctccagtaatgtacatatatattgaccctgccggcctatgtgccaagttgccaagagttgttttaggctatatttactgtgtattttgacttgttgttgtatataatcattttgtaaaacttatataacaagcatctctacaacacagttttagtgtcgttataatgttcgttactagggattattttagtgaagtttttaatattatcacagattttaataatcaattaatctattagtactaaactagtttataaaattacacacttgacgtccatatagattagagcgttacactcgcatggtagatgtaagtagaacttatcctaaattagctagtcagtgtaaatctagttcactgattaatctttggacattaaataaatattttcatcatataatcatataattataaattaaacacatgagtaatatgatttactaggtcaaaataaattttatattctttattcataataaaaggttacaaatgaattaaggttttaattatggcacaaattcctaacaactccatcaacacaaaagctctagttttcgttctcatttttacatacatatgctctgtatctatatgtaacacatacattttggtgctaattttgtaatca

SEQ ID NO: 61677 - DNA, 1065 bp, Cannabis sativa
  modified_base (782)..(786): a, c, t, g, unknown or other
tatgtttgcaggtaatcgtggaggagatgatgacgtgtcacgtcattttgtgtgtgatacattattaacgttatttttgtaaaaacttacctaatatagtatattcctaaaaaaatcccaagaaaaaatgatttttacactacatactcaaatttctttttttttttttactggaaggtagaattttttttaaaaaaatattgtgtttttctaaaaaaatattgttttataaaagaacaatattttctaataaaaaatttcgtgtgatagtaaaattataatttttagcctaaaatccagtatttctataaaaactcctaagaaaaaagtgccaaattctattaggaaatttacactaaaaactatttttggtaaaaattttacgttcaaatattttttttatatatatattttacagttctttataaaaaccacacgaaaataacatggtttaataacaaaaaaataacatcaaaacagtataaaagtaatataccaaaaaaaaaaagaaaaacaacaacaaaacaataacaaaataatatgagtacaatataaaaatagcataaaaatatcaaaataatgtattttctgtaaataaaatctaaaaactatgaaaatatttaaaatttcgtataactgtatttttattttgtatattttttttttaataaaatcccttttctttttctttttcttttaatgataaaaacaagatccttacataaaaatatgttaatttcgtgtaaaaatgtattacaataacataaaatatatatatatannnnnatatatatttatatatatttgtaacaaaaacagtaaacataaagtcctcgacctttacatcaatttgagtatttttgtttgcggaacacattactatatcagtttctaaaaatgtataaaatttctttagtactatgttgcatgtaaatctccagaattgacattattattgaggtaaggtaagtgatttataagggggcgtttggtacgagatgtttaaaataatttgattatagggaatattatgaaggagaatatgattatagggaaatgtgtaaa

SEQ ID NO: 61678 - DNA, 769 bp, Cannabis sativa
cggcgtgtggttagaggtaataaaatagaatagaatggaaatgaaataattttcattctatttatttgtttggttgtatattaaagtattagaatgtcattacaatagaataaccttttcaccattttagtaaaatgattatttaattttaaaatgaaaaaaataccattccaatacatgatgataaaatatttaataaattttttattaatttttttatgcattttaaattttattttatttcattcatattcttattcatatgtttttataaaaataatttaatttaagtattattattggtgtaattaataagtatggatttcacattaatttaatttaataactattgtagaatatcattaccaattacaaggtgtcgtctttaggtagtgttaggcactactagtgtcttatagcaacattttgagaaatgttaaagaacacaatgatacctaacatccttaaaagtgtaatatcgcacatcatttgatttaataatagcaatactcaaagactagagaaaagataggcagtatatagggatggcaatttaagtttaatttgacatgacaatacgatatgaaattggtatgaattattgcgggtagggttatgaaaatagaattggatcgaactcgaatgatacgattatttatttgggttaggctagagttaacacatgtgacacgaattgactcatttataatctaatatattaggaaaaataataatttatagttaaattaatatttatttttatagaaaa

SEQ ID NO: 61679 - DNA, 639 bp, Cannabis sativa
gaaagaaaggtggagcaattggattgctttcgaagaagagctgaggaagggtcattactaggagaattggaagaccaagcttctaaaatgacatcatcccaatgtggctcagaaagccaaacattttcaaaaagaaagcgtttatcttttctcctaggacaatgagagtgagagtttggattgagggagagttgaatggctctatgatcagaaccgaagaaatcaaggtgatgtaaggtgctatttggaaactggcaatgccagaagctattgccaacagcccaatcaagacgttccaaagttcttcgattgccttggctgttgttggtccaagttaggggcggaccagcaggttgcaaaacttgaaaatcaaatttgtttataaaagtgcgaaaaagaggggaggggccattgcctaaatttctgctagatttgtcctcccaagttaaaaagtcattaaaatcgcctaacacgcaccaaggaacagaaatgcaagagagcccaattctagataataaatcccaagtttgggacctattagcaggattaggagcaccataaaaagcagtaagattaaaactagaaaaactatcagacgagataaaacagtgaatatgattaagagaatagttaattata

SEQ ID NO: 61680 - DNA, 1095 bp, Cannabis sativa
ttatctccccgtgaatcgtatgttaagaagataagcgagaaccctaatgcttacccctttataattttcttgaagatgaaaatatatcgtactgtttctctgtaaattttggcagagttttcttctctctccttctcctcctcctttttttgtctaatttttttatactcttttgtatgatatattgatcagagaatagataggtgagtagtgggcagttaaaaattagtggagagaaacgtggaaaaatattattaattaataatatttttttcttttttgtatgttgttgaacgagtcattctctttattatcattattattatttttaataattaataataaaaaaaaacagttcaatggatgcccctcgagcatgctcgtggtaattcatatggacatgtgtgatgctcgagtaactttgaactttctccccttttttaaatttcttattccaccactcttaatttgaaaggacaaatactttgcatatttgtctttaagcttagggagagcaatttgagattttcattaattggtggctgcatctattatctatttagattgcctacgtacccagattgggatcaagcctttcgtagttcaaagtaacactttgtgcatttgtgcttctttactccatgcttaagctttgtgctttgagatatttttccaaacacattttagtttctttgctttgcgtcttgactttttgtctttagttctcgctttctgcttccaactttaagctcgttgctactctccttttctttgagcttttgcctcttttttattgggctttctttttttctttgcccaatttttttcttgagcattagcattttcttttcctcaatttctttttcgagctttagctttctgcagtgctctattttatcaagctttaactttttgctttgcttattattatttttttttcaagcgtttgatttttttttccttgctctatttgctatttgctcgctctttttttttttttttggggcattcgcttttttcttgctctatttgtttgctcttttgctttctgcaacacctttttttaggttacaatgagtaacaacctttcttctc

SEQ ID NO: 61681 - DNA, 892 bp, Cannabis sativa
gtgcatatatgatttattaatttcacactttatacttaatcatatatatttcagtttatacatttaaatgtctaacacagacttgctgttttaaatttacagaaaaaaaaggataaaaagaagaagttgaataaagaaacgatagagagagaaagatgatgagcaatcttatcagtgtttctattttattcttcaaaatacctcatcaaaatttaattttttttgctttgtctcgtacatttacattatattatacatcaacttttttttatatcatttatatattatatcttttaattttttgaataataaaatattatatatcaatactatatattttttttgtgtgtgagaaatatgtaaataggagagagattgagaaaaagagaaaaatatattaaaataataaatgaagaagctttatatggtgaattaaatgtaggaaaaaatggatttttgtttataggtattatagtagagtattgttattgggcaccaataatgtctagcactttcaagacatgtcgcattgcaattggctaacgaaactctctaaaaattattacattaaactatatgagatccgatacttaattagaccaatagcgatattaacacgtaggagggtgctaggcaccattgaagctttttagcatttcacattatagtattatgcatcaagttttgaagcatctcacaaagcacatatttagctcattgttttataatttctttattttttgagtggttcaatgcatttacgtacactgatgagagtgctcttaagtcaaataatcacatgtttattctcttctttattctaccgccatattttctcttcttctttcattaatgagagcattgattactctgaggtttatactattttcct

SEQ ID NO: 61682 - DNA, 1299 bp, Cannabis sativa
tttttttttttttttacaaaattctacatagaaacttatattgcaactagcgctgcaacataaattacaataaaaaattgtatagaaattcctattgcaactagaattgcaaccactttaaaaactcgaaccgtaaatttaaaaaaaaagttaaaaaaaatattatatggggtaattttccaaaaaattatgactaattataaattatcattcttacattgtgattaaaaagtctgttgctaaaagtattagtcataaaaattacaatttattgtgactaaaactaaattagtaacaacgtttacttaaatattatgtttagtcacaagaaaaattttattacgactaaaagtcacatttaataaaaaaaaaaaattgttgcgaataaaaggtcactaaaagtgatttttttttttttagtaacaataaaactcgataataaatttgatgtgccacactcatccaatctctcttttcttaagaaacctctacactcttcattctcacttttgcaacctacaaaattccaatgcaaataaagaccaacaaagacatttaagtaacaatttaaaagaactaatctcttccatctgcctttgtttagaaactcatcacttccaatataagcacgaacttaacgatcatcaatttgagttttatcaacaaaactctttcgacacaattgataaaaattgaaccaatttacctctgccacactacataattgagaagacgacaaaaactctttggttttcaaaataaattaaaatcttctccaatttaaaaaattgaaaaaaaaaaaatatatgttaaaagattacttattttcaatcaaccgttatcagattatataatcatcacatttaatttttatttcatatcactagacctataatatattgagcacttcacaaataaaaatgattaaatgacccatttaatttatggattttttttaaaaattccctattgtagaattcttgtaaattcatatatttgaagatttgtctcgaaccagggttttagtcccatcaatctggtaaagattataaggagacacatgcatagaatcttattatttatttactaatttgttgacttttggaaagaaactcttaaaaaagtatgaaaaagtgggacatatattgacaataaaagtaagtttttgaattgcatttggaagcaaaataatcaacaatcttgtcaaagaaatacatggggccataaataaattttggacatatatattgtctaggaaataaatacatggcgccataaattttattttggacgtatata

SEQ ID NO: 61683 - DNA, 990 bp, Cannabis sativa
atttccttgggccttgtggttgttgcctggtcatgttggcaactatggggatttgtcccgtacaacaaaatctcttgagcgtttgcttcatgagtggttgcttgtagtactatactaaatatttccttcaaaatagtcttccttaaagtgacatgtgtggaggggattgaagtaattgctcaagttcaacacatctctatgcacccaagggaagtatccgtaatgttggtcatcaggacctcgggcaaagtacctacaccaagcacctctttcatcatggaaatatttctgagtgtggagtagtttgttggtcttcaccctttaaatctcatactttccactttcatcgaagatcttccaagtccctcccctaagattgattgcatgtctcttaccctttgtagagtcatgaggtggcctagagtcattggacctatgaagagaatcccgcagaggagattagttacccacattgttcaaattgctttgagcagaattgcagttggtcctaccagtggaaggtggagggcccaagccaatgatccttaatttcagtccttttggatgctttctcaggatctgcttctctactaggtgatcgctccacgatagatgaagggcttataggtctgcgttccttagcttgagtccttttggacacttgcttctctattagaaacctcggtgtctgctgctcactgaatagtggtgcgactaccaagagaggtagtgttgctttacgtgttcatggatgatggctttcttgaacttatgaatattttggaataaaactcctagcaaagaacttgaacagtaactgggaacttgagttatgcctatcaatgaagccaaaatgttgacgctgaaaaattggccaaaaatatctttctagatttgcaaaaaaattaatagaagaaagatagtaaataagaaagacaccaaaatttatattagttcactccccatgtcgcgatgctaatagaactacgt

SEQ ID NO: 61684 - DNA, 3450 bp, Cannabis sativa
  modified_base (1127)..(1128): a, c, t, g, unknown or other
gtctagttttggataatcaacttaattagctaattaattaagtattatatagctaggatgattaattattatttgtcataataataatatattaattatatgtgaacaaaggaaatatttaaataattacaaataagaaatttccttatagcatcaattagattaataataagattaattaattagtatccatgcatgtgaaattaaggaagtcatccttatgaaacgtccacctcaagcttagctataacgtattacgtgaaaaaagtccactataatatttttaattatatttgaagaaatgataatcttaatatatatatattaagattgtcaacgatatgaaactaattcacaccaaacaactatatataaattaatgtacaataatatatataattaattattggtatattcataagcatgagctaagatcaagggggccaaaaaataaaaacaaattgagtgagatcaaatacataatattttaaaaaataataaaaattttaatataaaattactataaatttttttgttctccaaaattttaggagggccatgccctcttagagctctctcccgcagtaatattttagctttatccttcaaaatatattaccataatattatttcactataattttttttttatttttatgtcacaataaaatttgtgattaaaagtaaaaatgttgagactaattataaattataattcttatgttatgactaaaaagtttgtggcaaaatgtattagtcataaaaattacaatttgttgtgactaaatgtgtttttaatcacaatatatacttcttgtaactaaaactaatttagtaacaacttgtatctaaatactatgtttagtcacaagtaactttttgttgtaactaaaaatcacatttagctacaaaaaattatgttgtgactaaaaagttgttactaaatttttttatagtgcttttctaatattctgaacgatgtcacctctatccttaatatcctgggggcagggccggccctatgcataagcgggttaggcccgcgcctagggcccactcattttagaggcctaaataaaaaaattgccttttaaaaaatatacaaattttttaataatttttaaaannactatttatctttatagtaaaggtccaattttttttcctatgacccatttcaactcatggtcagtcctgcctaggggaccacctccccctcttagacaaacttatttggtatcatgatcagtctaatcatattgttcgcatagttactagcatgcatggaatctgaatgaatgggattgggcagactttgggctctaatgagggacatacagtctaaattgtggaagatgacctgtgaaaactggttgcctacttatttcaatttggcccataggtttcagatttgtaaagttcgaagattgttcatcatgctcttcgctatcttgtgattccatgaggcatatttacgactctttggctagctttatatgcatgttcccgtgcgtctctctaggtttaaatttttgtgagttgtatctctaggatagtttcccttccttaatccttaaaaagttgtttgtatgtatctagagagtttgatatcataatatgcttgttaatgagaaataactgattttgttaagtggagtcttgaatatattgattgctttttcatcaactctctttctttgaatctcctatgaacttaatgtttccttgacttctgtcatggtgagtgaatccttcccatacagaatagtgccaataaaatgttcataggcttttggtagagaacttaacagaatgatagtttgatcttcatcatcgatttcgacgccaatattgcataggtccaggataatcttgttgtagtcatcaagatgtcttctcaacttcttgtactcatccattctcaatgtgtaaagttttttcttgaggtataatttgctggccagagactttttcatgtaaatcttagagagcttgttccataaccctaatgctttctcctcacttgaagcttctctcaatacttctctcaatactgttagagcttctgtatcaaaggcatctgaaacaccttgatggactaacaatgctttcattttaattctccataggccaaaatcattggcactattgaacttgtcaatctcaaacttcgagctggacattcttgatcttctcggtaagttctttgaagaacatatttgattcttgagttgctgagagttggaacctcaactctgataccaatttgtggagtcttaaaccccaaacaagaattaacacaatagcaaaaacaaaacaaaagatcaagaacttaaactgaacataaaccagcaaagataataactaatgaaagcataaaaacaacacaaagaacttacgtggttgtactacacaatcaagatgatcatgaacttaatctacgggagaaagcatcctttaatggtcctggagatgatctttattaagtctgaacagagattacaaaattagagataaacccttcactcaatggagtcttgatccttacaatgtgtctctcttatggttctcttaatcaaacacatgagaggccatttacaaccctcaaacacactttgattttctctcaaaactctctcactttagctcatctaaacacacacaagtgtgaggtatttatagtcactcggccaacacactaactaacaaaactgtcaagttagttaggttagttgagggagttgttcaactgtcaaaactgacagtttaggtacacttgttcaagggttcaaacctcaacaataacaagttctaaaactcttaattattgaaccatatatttacaaacattattggtgaagttatttagtagcaagaagacatttgaatctcgacaaatttgaaaattgtaatctaagataaaaatgtgtacacaacaaaaatccaaattagaaattggtacatttatgataaaaaaaaattatgtgtgttgcttttgattattttgtaatttgaaaaaatttgacgttgagcgtgtgggtgtgtacccaatctctaacttgtgtggccaaacattgttgcacctagtgacgagcatgtacccttgagttggtgcttttaatgctctcgcctttcttgccattgtgttaaaaatatgtgaaaattacgtggaatataagattttataaaatagttataaaaatatgtcatttataagtttattgttatttcttttgtttgtgttctagcaaagtgtagcacatgctcttcctcaatttgctttttctatcgatgggcactatgttcagtggcccagtgaccatgattgtactattgacctgatttagacaaacattaattaatcaataatatctcctaacactttttttcctcctaataatagaggttttaaagaggctattttctccaacaatataataataataataa

SEQ ID NO: 61685 - DNA, 941 bp, Cannabis sativa
atcatctaagaataataatatactgtacaataaaatagaaatatactgtacaacaaaatctatataccaacaaccaaaaacccacagcaactaataaaaaattaaaaaaaaatagacataactttcaaataaaaaagattttaacaaaactgatatagatataccataatctttaagtaatttgcttttaattttatttttttttttaaaaaaaaagatgaaaaaaaattattgattttttttatgtgacaaaggacaatataaataataaataattaaaaaaagaggttattttgttacaaattttgaaacaagaacatttactaacatatgtatatgatttgaggccatataaatatgatttcacaaagttaaatgggtcaagcccatttcaccaaaccctaacataatcatagcctctctttctctttctatattaaatgacatataatcattctactactaaaaaaaaaaaggttttagcttcagttttaaagtgacacataaacaatttatgtcggttggggttggcgtaatcgacacaataattgtagatgccaattgtcataatagaagcaaatagtaatgcaccgtaactaattaatttttttaatttttttttagaaaatatttgaaccaatatagtaccaccaccactaccacactactacaacccaacaataacaacaatagctaattaataccaacacatgttcttacaataaggatgtaccatgtcatatagatagtgatgacatggggcataagttacacgatacattggtgtgccctatcttctaacattatgaatatctgaatagtaaattcatgaaacttatatatagactgaattaatttggaggaaaagttataattggtagatttgactcgttcttcaatgccacaatatcttttagtagaaacttgtatgataattacaa

SEQ ID NO: 61686 - DNA, 881 bp, Cannabis sativa
ggcataaaacccaacataaacaggcttggtagggtaaggtgttgatgctctttctcatgacgcattaaattcatgtacaatgtctcgatccttgagtgacatgtcatctcttgttagtactcccgttccactctccgtatgtacttcactcgtggagtggaaggggcgagagttgctcgcagagcaactggattctctcggagatgactaacctattattactccttgaaaataatagactccaggagtaattaaggcgatgcagacatgacaactattcacacctcaaaggatattgtaaacttactggaatatcttttctattaaatatctaaaagttgatcttagattaatcatgttaattttgatatgattaggttctcgctcaactgtatttcacatgttatttgacttttttgttaaaagctttcccgctggtttagcttaaatacttacatcttggaaacatggtagtgtaattgagtgggagcactagtcatagatatagaatttatagattctataagttcatagaagtgaaataatgattttcttagagcttgggtaaacgagtttaaatgttggagtactcatttcggtaattatattaatttcttgaaatatcatttacaagtagccaagtattttcaggataaaatacattgaagggtaaaatagtaatttagtccttattcaatgtagatcatctatagaggatcattgattatttagattgaaacaatggataactaatagcgtatctattcttagagaatagagtgttctatgtaatcaggagtgcaattctgaatttatagtggagttatgaagaattaataagctaagagaattattttgtaagttctagaactacttattgg

SEQ ID NO: 61687 - DNA, 1036 bp, Cannabis sativa
acatttctccaacggggataggccctgacgggactcgcctctaatggagctggggttcctcacataaatgaggaacgggacggggacggaaattattttttgtccccgaatgttaaacgcgacggggacgggaattacactccccgcctcgatgggccgtttagtatttaactttatatttctaataatattttataatttgtaatttatgttcgcatgttttaatatattagtatttttttaatgacttttaagttgtgttttggataataattaatgtgtaatattttaattttatgtagtttaatatttttatatatttagatttttattataaatttttatttttttattagaagatttttcgccccgtctctgcccccaataagggattctccaccctatttcttataaaaaataggattatttacatcacatactgaaatttttaacttttttacttttttactgtggggcagaattttttcaaaaatactgtgtaagttttacactatgtactatattaagtttttacagttgttctacagttgttttttagttgtttcactattgtttttaattgttctattttgttattttttataaacacagtgtttttgaaaaaatttacacgtgacactatttttgtaaaagttaactcaaattctaatatttttttgtaagtttccgcgaaaatagagattaaaatcctcagacagagagaaaactccctgccaattccccactttgtagtagtaaaatttccctttccaattcataaggggactatattccaaagaaaaaaaaaagagaaatgctaaatggcaccagtggtgtctagcaccctcctatgtgttagtattgctattggttcaattaagtatcgggtctcatataatttaatataatagtttttaaggagtatcgctaaccaatcgcaacgtgacatgtcgagaaggtgataggcaccattggtgccttacagcaatgctaaaaaaaaagaacattgctattaggcaccagtggtgcctagcac

SEQ ID NO: 61688 - DNA, 807 bp, Cannabis sativa
gcacaggtctccactctcaaaacaccagagaaaacttgtccaaaagtggtccctcaacaccaaggagtacaaaaaaagtaaaagaaactatttttcacccaagaatcatgctagacgacttgtgccatctttgtgcacaaataagtggcataggtcgaccacacaaaatggcaaggagatattttttgaccaaagtactttttcatcgtcaacatatatcaaaagcaagtgaggaaagtcactaagtggtgcagaaaccacttagttgacttgtgccatctttgtgcacaaggagatggcacatgcttattggaacccctagccgacctgtgctatctttttggcgccaaatgatagtacaggtgtcatgttaggatttcagacgtcgagatgaggttttagggtcccaaaacctgcaaaatatggttcaccatcaaaaacacaagtcaaatcacaccccagagatatacaagaacatgtacggtcaatctgcgccataatgaggtgttacgaatcatgacgacatggcacaggtaagatttggagttaaaatgtacttacttctctatagtaaaacagacataactctctaaatttttatccaaatgacttggttcaacttgcattagaaagtgttgacccctaaaaattactaagtgtaatatttggagtcattactcttatgcttgaaagttttccaaggggagctccacacaccaaggggagctcccagcacccgcccacgtgcccaccttctccctacgcccactagctctccacgcccctagtctcctacactccttttga

SEQ ID NO: 61689 - DNA, 1100 bp, Cannabis sativa
gtaaatctgattatatgaaatgaattttatttagggcataaaacccaacagaaacaacatcacctgctgtcaatgatgtcaaaaatgacagcataaacctattgcatttgagacttgatcatgttagtgagagaggtctcactaaacttgacaagcaagggttgtctcaaggtggattgagtgggtaacttagtttctgtgaagaacgtgtttatggtaaaagctgcatggttaagtttactacgtgtcaggacactaccaaagaaaaattggcccacatacactctgatccctagggtctatcccaaatcaagactcttggtggtgcaagctatatcattagcatcatagatgacttctcaagaaaagtatgagtgtttctcttgaagagcaaggatgagggtttcaatacttttgtcacttggaaaagattgattgaaaatcaaactagatgcaaaattagaaagctaaggactgacaatggttgggagtattgctcaaagcaatttgatgagttctgtaaggaacatgggatagctagacacttaacagttagggatacacctcagcaaaatggtcttgttgaaaggatgaatacaactcttattgaaagagtaaggtgtatgctaagggtgctggtttggatagacccttttggggagaagctgttcagacaacctgctacttggtgaacaagtgtccatttgtcccattgaagtttaaaacaccacaagaagtgtggacaggtcaagtacctaagcatgatcacctaaaggtatttggctgcactgcctatgctcaccacaggaggtcaacctatagctctaaaatgcacgttcctaggctatcctaatggtgtgaagggttacaagctatgggttagaaccagcgaacaagaaatacatcattagcagggatgtggttttcaatgaggaagaaatggctatgaaaagggaggtcaggattactgcatcaaaaaatagtagcaacaaggaccaaattgaggtggacacaacctcatctagagcagcagagattgataaagtctctactgaagataacactataagtgacactcaaactagcctcagaaattacca

SEQ ID NO: 61690 - DNA, 976 bp, Cannabis sativa
attttcctatcactaggatatttctctagatatttctctagaaggacttctctagaaggactttagaaggacttaggcagctactagtaactaatcatagacctttcattttcatcaatattcaatccaaatttcttgggggggggtaagtttggatacaatttgaagttcaacttaatgatctttgaacttcataaccaaatatttctccacccatatcagtttgcaagatctataaccacttacctcaatatttttcaacaatgatagaaattcatgaaatttctcaaatatttcaaatttctttatacaaggtataatctagagtgattgttttagaatttaaatttaactcatatccacccttgaatgtacatccatatgttcaaatatagatgatcctactgttatacccaaaattcggttgtactttagaaagtgacacgtgtcaatctcaaggaatatgaatcaacgaatataatgatagttatatcattaaatgcaaaatggaataactcattaaatgtggaattaatagagtatattcttaactcgctgactgtatagtattaagcgagataagaatataaaaactatcaattcatgtattgacgagaaactatcttgtctcagaaggcataatcccaagggagacatggacaacgcataacgaggcatctacctcgttgcatgtaaagaggtattgatgaggtgaattggttattaaaacacttagcatataatatacgttataataactaagtgtaatagcttgagaacttagaggacatgattgttcaatctgcaaggccttgtggtcaaagagcagttcttaagtttgctcagtacactggtgctcatgccattggtggaagatatatgaataaactaagtcatctatgtacaaggcgagatacctttggaagggagttaccattcctgttagcgttgaccgccttaaagatagtttaagtca

SEQ ID NO: 61691 - DNA, 1108 bp, Cannabis sativa
ggctactctcatataaatcctgctcaaaaaaaagtttagtatgtatcataataaggcactttccgttcttcatttctttccaaagaaaataagggtaactatggttgaattttattaacagatagatttttctcaataaggatttgatggcatagaagcagaattacactctcataaattttgaagagctgaacaagtacaccgagcttaacaagagctatctctcaatacagctggagctccaaaactcttttacacttgcaacctttttacttttaacttttggtttcctgttccgcatagcacactgtaaagatgtataatatttctactaggtagatgttacgtgccgagccacgtattgttagtttcatttgaagttttgcttttttttttatataaatttttgtaattaaagtgatgtgattatttgaacgatttgttttataaaataccatatgaaaaataaaatgaagtacagtgatattttatcttgatctttcatcgtttcagcagtttaaatggtgaattaattgtactttggactcattgtttgttttgaatctccatacaattggactcaaatttagaatacccttatatgaaaatcaaagcaaaacattgaatgtgaaactgtaaaatagaattttaaatttacagacctattgatataatttccaaacaatgaaaaacttattttcctaataacaatctaattttgtaatataaaattaaacacataaaagttttaataaatacataaacacaaatattatatacatatatatatataattggaagaaaaaaaatctcctcagcctaggccaaccaccagagaccactggagtcggagatagagttgaagttgcgatacaacggtaagaaaattagggcaggaaaataaatacaaacctgtcgatgtcaaagaccactaagagaggggatgaatcggagtgatatgaggaaagaccttcataaactcttgtaaataatgaaaaaaattaaaataatatatttacatatttatacacatataagagagcaatattatacagagctgggctttggtttttaacctgaaaatagaaaaaaaaaaaatgaaaaacat

SEQ ID NO: 61692 - DNA, 844 bp, Cannabis sativa
ataacctttgtattatagtgctcttaaatttcttaatcattacaaattgtctttgaactattcagagtgttataaattaatcattctgttaagttttatcacacatgaaaaataaaatgatatgtgacttcttagccaattattacgtcaacgatacatgtataatttaaaatttaaaaaataaaaatagtaaaatgatcattaacttaaaaatcaactaaagattaaaaatttacgtaaaacaaaattaaaaaaataaattattttttaaaattaattacacatgtggtgttgacgtgtcaattgtctaaatagttatgtcatcattctatttgccacatgtgacaaaatttaacagaatgatcaatttacaatactgtaaatagtttgagaactatttttaacagacaaaatttcaagagaccataatacatatgtcataattcaggaggcaaaaattctaaataatatttattttacatattattttaggttaattttaataattatttatttttatatatattattcagatcttgtataattttttcaatgaaatttcacttaacaaaatataaaaagtaactttatttacaaaaatgtggtaatttgcctatttaaattttataagtttttatttaataattttactattttgtaatattctattcacaaatatacaatgtattttatatttatttatttattgctcatacaatttgttttttagataaagatcattatattacttgaaatgaattacataacagtcataagtgaaggtagaaattcctccaactaaaaacaattagttgttgggttttatgccctaataaaactcatt

SEQ ID NO: 61693 - DNA, 1567 bp, Cannabis sativa
aaactattatgctggcaacaccgaagctacatcaacttatacctgaggtggagacacaataggaggtccacgttgcctcaacctctgaatttcctcatcttgctgttgaattttggcttacatttctacaaacctttgctcccaatcatgaaaagcttgtggtggattttcatgtgcacctctgtaagtcatttcacggcctctactggtctcgaccatattgccctgacccctggtgtttcgatgagtctccattctataggacatgtctgcaaaaatacaagtcaagttagccaggaagtgatcataaccgtaaactaattatcgcaaacatgagaacttaacatgctcttaatcagctagtaagctactaacatacttcctatctggcttttctattcataaaattaatttaaattacaaaaacatgtaaaggcttattggatagtgagtcgagcttatctttgatgatgattatacatatcttgacgatctttgaaagataatttggcagctctgataccaaattataacgccctactagattaggcacatcactgttttttctaattactgtgcactcctttgctaatcaaaaagtttattaaaaaacgtgattaattaaaactttttaaataaacttgaacttttaataaataaatactaaatacaaaaaattacataatttgggatctcatttttatttacaaccatattcaaaatgctacatatatgaaagtgtcgcctagcgactaacaaaatatgaaccatattgttctgaagaccctaacactcgaggaataatcatcccgatatgtacaatcttcttgactctagactcactgctactcaatatttgctttgcccttacctacacatgtaaacataattgtgagttgacagactcaataagagaagcataaaacataaacataaaactgaaatgtaactaggcatccatacacctaattatgattctataacttgcatccaatgcgtataagtctcaaacgttcttgacaacagtcagcggggaaagaattcccacttacatatatatatttatatatttaaaaatgatgtctcaaatagaattaaaaaatatatatatcataaaaattattcaaaaaaacaaacataagtgaaataatgtgtataataaatggagtaagtaaatacaaattagttggcaatcaaaaataagtagttaagtgtcatttttttaaaagcagttaagtgtgattattaatatgcatcgctgtatttatgaaaaactgaaatgtctcataatgtaatcaataaaaaacttaaaacatgaagttgttttaattgtaatagttaagattttaaaatttaaatatatacatatatcatatcagaataggttggggcaaatatctattctcccgccctaaacttgacttgagtatgaacatttaaactcatattcgcctctgctcccaaaatttgacccctgcccccaccccattaggggtggatacccgcgtatacctaaacttgtaggtataattgccatatccctaataaaatatatatatagctacat

SEQ ID NO: 61694 - DNA, 1216 bp, Cannabis sativa
tggtaggattacacattaaatacagaatacactaatcaagggatttggacagcttgtcatatctctgtaatatgatcccataattatagggattgattctgtgaattacgatgcaagcgttgaagttgctaagtgttggcacgctgcccggaccgtctattgcccggctaagaaggcttcgtccgtgcagatatttgcaatgctttgttcggcatatctcttttgagcagatatgtgaagtcaatgccacgtgtcactagtatgtggtgccacatcaaattaccaaaattgggataacaagaggaataaataaagagatacatgacatccatgtcctaaccctcttgttcgaatcacgcggcctttacggcgcacattgattaagaaagtgtactctaggatcgtcacacaatccatgataaccctaacccaaccctcagcaaagctaaacgctcacatcatactggctaagaacctccattctaccctgtcatatgctttactcttgtcaagcttgagtgccataaatccttttatctcgttattatttcttttaaacagtgagtgaaacagctcaaaactgtccataatgttgtcaggtatcgaacgctttgggacaaatgcacattggaaagataagatgataggccaaaaacacttttcatcctcagtgataaagcattagagacaatttacattatgttacacaaaacaataggtcgatactctttaactaattttagtttttctacttttggtgtcaacaccatgtttagcttattaaactgtcacactgaaaactaccatcatttaagattgcaaagtatatttggctgaccctttctcctataatatctcaaaatttctaaaaaaaaaataaagtatgacaatcgtctggtccggaagcgtttgtatgacaattaattgttttaataagtgaactagctattaaataataatttaatgaataaaataaaatattgtgattttcgtcaattatttacatcttatatatattatgaagacgactgatataatttttttttcaaaatttaatggccataagaataaggttagaaacaaaaatataaatatagaagaaagacttaattatacgatgagcgccttcttcatgtatattaaagggatcgaagaaaatttctatgcggcatgtgaataatgctgcatctaaattctaataataataaaaaaaaaa

SEQ ID NO: 61695 - DNA, 1810 bp, Cannabis sativa
attacacctggggctgcaacacgaaaagcaagtttaggcaaaccaagcagcaagattctatcaactctattagagcaaaaagatgaaatctttccaactgccccaattgaaagctttgaaattgcagtgaattcactgactgaattggtcctagttactcttcggaacgaagtggaagaagggagaggttcttgaatgaggaaaaagatccaataatttttaaaataattttttttctttctatcccaaataataataatgcgtctttctcccaagactacgaaaataaaagatataaataactaaattcaataaaaaaataataatcaaatcgcaccatctcgataattggcgaatgcctctttcttgcccgaagttgtcagaattattcgtaataagatattgcttgactaaaatatatcactaaaaccggacatcattcgatagcaaaaaagtgtttcggggatcactgttataaaaggtctaccaaaaaggctatatacaacaacaattcaaaatacagtagatacagccaatccaaaacaactcctgggaactcgacacacaggtcggtgggatcaatatgtacattgctggagaagactatcatctcatggttgttctagcttttccttgctcttacctgcaccacagagcacccgtgagtcatataaactcaaaaagaaaagtattaaagaaggatacataaaatagctaatgatacatttcattatcatataataatcaaacataacattcaacagtaggtaatataaccagccatatgcatagaaatagatatgctcatatatttgcattgtctaatcaggcaggcttgtgtcataatccaacatcatatataatatcattgcaccacctaatcaggtgagcccatgccacaacttggcactaatatatcacatcgtctaataagttgagcccatacctacgcccggtacttatcatacgtcactgacgcccgtacctatgcccgatacgtcaccaggaagaaactcaagaatggttttgatctgtgcaataacctgataatagggaaaccctacacagttccattctatcactgatgcctgtacctatgcccgatacgttgccaggaagaaaccttacatgggtttcattctcttccataacctcgcaatagggaaaccctacacggttccattctgtcactgacgcccatacctacgcctgatacgtcgccaggaagaaaccttacacgatttcattctgtcactgacgctcgtacctacgcatgatacatcattaggaatatcgcatcacctaatcaagtgagcacgtacattatgtccatagtatcatcacattatcattacctaattagacaatcgataattttaggacatggaaaatagcagtttcgattcatagtcatgactttataacggttaccccgcaggtataacctaaatgtcaatatccttatatcacattacctactcaagcaagattatgtcatggtctgacattcatcatatatacatatatttcattgccttattaggctagctaaacctatgccataactaggcacgatatcacctaatcaggtgtacttatatatcatattgactaatcaggcaaacctatttcacaatctaaaattcatatatcatatcacctaatgaagtgaagtcgtatgtcaaattcacattattattgtctaatcagacattcaacgattacaaaacctatcatgccatgtagtatattatacttttttttacctttgatccagattcatgcatgtcggccaactcaagtagagaaa

SEQ ID NO: 61696 - DNA, 2358 bp, Cannabis sativa
acatccaattgcctaattgaccaacctcgggtgatagcaatagccaagactactcgaatagttattggtttgacaacatgactgaatgtctcatcaaaatcaaagccagcttgttgatgaaacccttttgcaactaatcttactttgaatctctcaacagagccatctttgttgtatttaactcttagaacccatttgcagccaataggttttctgttgggaggaagtctcactagaaccaagtattgttgttggtgagggccctgaattcttgagtcatagcaccattccatttgggcatttgaagagcagctttcactgttcttggttcacatgatgcaagaaaggctttaggctttctaatgcctgcttttagacgagtgatcatggggtgtgagcctgttgctgttccattgtttgtgggcctgtgagaatctgcattagaaatattagtagaaacaggtaatatggttacaggattattagatgtggtagtgagaggaggtgagtttgcagtggactttactgctatatcaaccagttgattgagattaggaacagaggcaggggcagagggaatgggagaagcagtggaggattcagaggagtggaagtgttgtggcatgggagggtcaggtggagggtgatgagtggaaagaagagaggataatggtggtaaactaggtgtgtggacatgaaaattggtgtcaatagtttgtttgtgagacacagcatagggaaattgatattcattaaagattacatctcgagagatgtaaattcttttgtctttagacatgcacttataacctttgtgagacatgctataaccaagaaacacacaaggtgtggacctatattgcatcttatttttattgtatggcctaagatttggatagcatagacatccaaaggttttgagtagggaataatctggtggggagtgaaaaagtttctgcagtggtgatatgtgttgaatgacagcagtgggcattcagtttaacagaaaagtggcagttcgaaaagcttcatcccaaaaagttaagggtggtgactagtgaggcatgaacaagtagtgtcaaacttgtttccactacatgtcaatgctttctctcaagtacaccattttgttcatgagtatgggggcaagcaagcctatgaacaataccacctttctcaagaaggttggtgaatgatctgaaatcacctccccaattagactgtaaagtcttgattttgtgtcccaattgtaactcaacttcagttttgaatttggtgaaagtaggtaaggcttcatctttagttcttaacaggtaaatccatgtgtatctagagtaagcatccacaaaactaatgtagtatctatagttattggaagaattagtaggggctggtccccatagatctgaatgtaagagttgtaaaggagcatgataaacaattgtggaaaaagtaaagggcattttgtggtgtttaccaagacaacaggcattgcagaaatcagcattagttttattatctattgtgatattacaagattgtaaagcctgttttacaattctagcagtagggtggccaagcctactgtgccataaagcaaattaagaatctacactagacacatgattggtaaaacagtaaggaggagaaggttcttgagtaggactggtactagtaggtagatgagatcgttgtgtggaggagaatttgtacaacccattctcaagcttcctaaccaataagatcttcttggaatcctgttctttgacatagcaaatagaggggtgaaattcaaagaaaacagaattgtctttagcaaattgagaaacacttagaagattttttgtaatggaaggaacatgaagaaggttagataaagataaagccttagatgtgaaaggggagataagggtagagttaccgatattttcaatgcctaggccagtcccattgcccacaaacacttgttcttgtccactgtagttgctgctggaagcaatgttggcagcatctggtgttagatgatgagaagccccagagtcaggataccaacagtcatcttggacagtttcaggtgtggcaatataggcttgactttcaacaatattagcagtagcagggaattgtccaaaacactcagggccagtaaatgatttgtcaaacctataaaaacattgcttgaccgtgtgccccaatttgtgacataattggcactgaggtttctgtgtccaagattgagaagcaccacgaccagctgtggagtttcctcgaccactgtgagaggtttggccacgaccattagtgtagttattttgatgcatagattgcatttgagaattaggaacaagatacctgtag

SEQ ID NO: 61697 - DNA, 783 bp, Cannabis sativa
tatattcaataaattgatcaaccaattcatttctctcattaatgaacaaaagagtcttcagagtattatctgaaatttccatatcaataataattctagtaaatttaaccatagatctttctttggtaaccttatcaatcataacaggcttaccaatttcgctcaccatagcactacggctgttgcgaccccactttttgaagaacgagaccatttaatctaatccaaaagggaactgatttcaccatttgaactgaatccatgtccgacaactagggatgaagaatcaccggcttcttgtcaaaatgcacaacccccgtttccagaactaaatccttggtagattcatctggaaagctcacaagagtgaaacccgagtgcattctcactattttcccaatacccaaattgcccccaaattcttttaacaaaaccttcaaacacacgaaaagggggaatagtacccaggactatgcaaactatagaatccttctaaattgaagcctcaacttcaatctcttcaatatcaagcaagacgatcccccactttcataggctctatataatcaagacgagtatatggagtacgaacttcattaactttgaattttgtccaaatctctttggcagaagactagaaaattagttcatcaatctcagcctcctccgcccaacgagaattcttggcagatctcgactaagaagaaaggatagactgagtagctaaataaaaatctaattcatcgcacgggtaaagaaaaacctcagactgattctcagtca

SEQ ID NO: 61698 - DNA, 684 bp, Cannabis sativa
  modified_base (46)..(71): a, c, t, g, unknown or other
  modified_base (620)..(651): a, c, t, g, unknown or other
atgcaacattaaatgttattcctgatctatattaataagtaaatcnnnnnnnnnnnnnnnnnnnnnnnnnnagggcataaaacccaacaaagaaggggagtgtcctatcgagcaattaataaaagaggagtttgggtagtacctagcagctgaaactctagcaacagttgagcttggatgtttaagaaggcgccaagcttgtttagccagcaaagcctggttgaaatggaccagagatcgaaagcctaacccaccatactctttggacctacaaagctttttccaactttgccaatgagtcttgggacggttgttatcattaaagccccaccaaaaattagccataatagactcgagagagtggccagtggcgaccgggaggcgaaaacaagccatggtgtacgtggggattgcttggatgaccgactttaggagtgtttctttaccaccttttgaaaaaactttatgtttccagctgtgtaggtgaccccaaactttatcatgcaggtagtgaaagacttgttttttgggacgcccaatacgttatggaagtcccaaatatttttcaaaagaggttctcgcaggtatctactggtggttttgtgccctaaataaaaccnnnnnnnnnnnnnnnnnnnnnnnnnnnnnnnnaagatcagaaataacattttatattgcatggtt

SEQ ID NO: 61699 - DNA, 1313 bp, Cannabis sativa
ggagtaccttgtactccgggtgcatcctcctggacccatgcgagtaacgcttcctggtgttattcaaagacttagtagtcttctcaagtaatttgatccacgtgtcccttcctgactggtccacgtatattgggcgattttaggagcaacaattagaattaggacattctatgaatgagagcatcctttttcatatatggaatgagggcattccatagaggactagcgaataagagaagaatgagtacaaagtaaaagagagagatagaagaataagtgcattccatgaatacttacccttgaagaccttgaacagttggaagaacaacattgacagttaatttttttctttctctttgctttttttcttctctgatttatctttttgcaaagtatcgataccctctctgtttttttttttgccttttgtctaattttctctctttataggctctaattttttcttacgttatatgaaaagtgataagaatagggagtgaaaagttagaaaaaaaaaacgggaatctatattatccattagtaataataataatatatatatatatatttatatgtagtccttcactttattattactattttttaacataataaatgaagaaaaaaatggttcaacaaattataattgcaaagactgttttattagaatttgggataaaaagaatgtggttccatctcatcaaaattaattagcaattagaagagtaacccatttatataacaatttatttctatacatttagaatgtgtgactaactctaataagtttctgaaaaaaccttgtaacactccgaaacatgaatccataattcatcatcccatgagccaataatgttcaagcaaatagcatagtcaacactctcacaaagacgttgatcaacactctgaagccactgccactgtcacaggcaaatttgacagcaagagattactaaaactacttgaagaataaagtaaatcaagaagtgcaaactttttctctttgtttttaaagtgtgagttccattgtaattatagggtccaccagaagtcaacccaaacagtaaattgtaccttcctcttgtattgggatgtaagtaaagaatatagaacaacctagcaatctcaagaagtgcaatagggccacttccaatgctatcacttcccacatataaacctgacaaagaaaaaaaattctcacaccttggtaaaatgcatagaagtgaattttattaatcaaatctcatatagttacataccggagacgccccaaatgtgtcatatgatctcactattgcaatagtaggaagttg

SEQ ID NO: 61700 - DNA, 1155 bp, Cannabis sativa
caaatattttgttgcacacgtgacagtttttccttatacacgtgataaccaattggctgaattttatttttacatgtagttctaaataactacaatgtaaacgatcataaaaaaatgatctaaataactcttctaaatgctaaaatgaataaggggattaaaattttaatagtagtatatatcgtaagaaacttctacagtgcacccctgaaaaaatggtgcaccaatgtacctcttactgtttcaacatttagaaaaaaaaaattaatctatttattaccatggatatattatacttatttaaaatattttacaaaattttgagaaatatagagtaatttacaatatgacaagaagtgttaaaaaaaaattataatatgtgaaatattttaaattatatgaatttttgttctaattaaaattataaataaaatgtaacatggagaactagacacgtgcattccacgtgttagcttcacctagtatatataaaagttatataattggaggtatgtagtattggtacacacaatgataatggtagaatattgtagtggatgtttcacttgttacatgcaaaaaaatattaagaatatgaaactttagtcatattccaccatgaagttttacatgaaagagtgtgcccgcatgcatcatatcattatattatatattcaaagataaattaatctaaaagaatattctactttttttaaaaaaaaaaaatattataaatacaaggaattttaaattattctaaaataataattaattaattaaaaataattaagttataaactctcatcaatatatcgatgtattaattaataatacgttttctcattttgttaattcaacgttagatgctccctaaacttaggtttctgttaaaccaacgtccaaaaaacgtttttattaattaattaattaattttcttatttttgacttagttttttgttttttgttttttttttttttttttggtaagtgttagattaatttaagacagttttcttcccacttaattatagcttgattcaaaacataatgtaaaattaacattatgagttttgacacatacgtacataggataatgtatctaaatttatcaactaagatggataatgatcacattataatgttttcttcattta

SEQ ID NO: 61701 - DNA, 837 bp, Cannabis sativa
  modified_base (35)..(38): a, c, t, g, unknown or other
ttcgaactctgactagaggatacttcctttttagnnnnggttagggcaaggttgtaacattctcgggcaacctgttgatttcctctcacgcacccaactccattctttgttggaaacttaaggcatgaatgaaatattgacgtaatagcttttaggtcatataaggttggtaagcccaacatgacattaaaggctaatggaacatcgaatatgaaaaattgtgccatcacagttatgctcttcggagcttgcacaacaatgagtggtaggcaaatttgccccagaggtgcaacactctagccggagaaaccatacacgggctgaagatagggggttaagtctttgagttggagccccatcttttcatatggtgttttgaacaagatatttgtagaggctccattatgtatcatacttcgggccagcccattttgttggctctctggacttccacgaccaacggatcattatgtgtgaaattaatcttgacaacatcttcatcattaaatgttatggtgggttcccctgcctgtggtatttttggcttcctttcttcgacggccaagataacttcctcttgctcgtgctacagtgtttgggcatacatctcccgggctttgcctgaatctccggctatgtgtgggtctccaataatgacttgtaaatgcccgtccattggtggtggcagtaattcttgattattatctgtttgagcagtcctttgattttgatcggtcttgaaatatttttgcacgtgcgggttattctttctaattaaaaatttgatttcccacttcaaattgttgcattcgttggtgtcatggccataatctccat

SEQ ID NO: 61702 - DNA, 715 bp, Cannabis sativa
gggttgttgattacaggggtactagtaatgaccctctacaatcatctagaccacaaggcgagcaggtagagcctggggtagcccaaaccgatccaccggcactgcctccacctccgcaaaatctaggggacaatgcgaggattggtaatgctaatcctcctgcccactgtcagcaaatgttttaagaaatgcgaagtgtcatacttcgttaagaagaagagttacggcggttatgggaaccggctgcccctattgatcaagtgttaccaccagcacctgtgccagtggtgggtaacgaagggtttgtactgccgcatagagactcagtgtttgagcggttcatgaagctgtaacctctgaatattttgggaggtattgatattataaaggctgagtagtggatgagaactattgcccgtatccttgataaatgggggtgacgggaactgagagagtaaactatgcagccttcatgttacaagatcatgcccgcgtctggtgggatatcatgggccaaacccgagatgttaatgtaatgacctgggaggaattcaaaaatatgtttgaagagaagttttacaacattattgtgagaacttcacagatggaagattttgcgaagcttactcaggggaaaatttttgtggccgagtatactctggaatttgatcgcttgtcaaaatttgctggtgatctggtgccacagatttcacta

SEQ ID NO: 61703 - DNA, 3939 bp, Cannabis sativa
ttaatagtttgattggaaactgaaattacattcataaagataattggaggtattagaaataaatattagtaaagttgttgtgacttatgacatgcatcaaatttttgacgccgttgctggggactactgttttattttattattcatagttagttttagctttactaacttgttcttctagttgtagttttaatttctagatcttcctttagaaacatggtgacatacaatcaaaaatggggaaattattctaccactacttcttacggtgggtcaatcaatatgtttaaccaacttcttactataatgcacaatttcaacaacctattcatgttgcaccatatagtgaaaaccaactactactgagctgattgaaatgttagcagctaataccttgcaattttagcaaagctgtcatgaaattatgcagagccttcaacgatctctgcaaaagttggagaatcttccggagtcaatggaaacatatatgagtgggtatgaaattcaaagtttaaatacttttccttcacaagtggagagtagcccaatggagaatgtcaacgccatgccacaaagtggtacacaacttgaattaccaccacaccaagaagttaatgatttgattccaactaaagaagtcaacaatttatcccttgaaagctcatctctaccaaaggttgaatctcatactttagttggtccaccatcacagaaaaagtcgtacaaaccagttgtaccaacttatgtcactcctccagtaccttttccaagtagattgtaaaaatcaaagaaaaaggagcccttttgactcgtccataggatagtatgagttatggccctgatgttataagataagcattgagactcatccgggtctgagggctgggctaggattttggttatggtccaaggcccagagtttgggtccaggctggggtctagattttggttaattatttgggtctaggttcgggtcgggatccaagtctgggtcttggatctaggtctagtgtcgaggctcagttccgggtttgagggtcgagccatggtctgggtccaagtccaggtccgagtcgggtaaggggttcgggtctaggtctaggtttaggtcggggttcgggtctggtccagggtctagttctaggtctaggtcgggtctagtccggatctaggtctaaatcgggagtcctggtctgagttggggtccaatatattaatgaaaaataatacaaatatattataattaagtaaaaaaaaactatttaaataaattttgaaagtgaattgtttttgtttttaaagtttttatttatttattaaaaaagtgaatacgattttatacaacatatttttttgaacacatttttagttagtctaatttttttttattgattaaaaaaaactatagcaaaacacccctagctttctaagaaaatgtaatttgttttgctcctatagaaatcaacgtgaaactaccaattgaacaaacaaaacatttattggaaacggttgtgctttcatttgcttttcccagcttctgaatctgaaatgcgtagcggttatagctttgattcctacaaaaaaaaaaaatctaatgttacctaattttctcaacgtcattaattattattattataagtaattctttttatatatctatctctgtcatcgaattagtaaaagattaaatcctataactcattatagattcctttctttttctatagagactttttagacagtagacacaataacgtgcagtcacactaccccggttgatcatctaaatcgcctgctctaactcaaaaggtcacacttcttaaccctaacttcctcttaaccgttacagaacaccatatatatatagacatatataaaagtaccccttttcagaattttactttttttttcattggacttttctacattttaggaccggagcaagtccagaggtggttctctattaagaagaacatgtgatatggacaactacagctcaaccgtagagaaaaaatgacaaaagaaaggacagcagtggaaaaaggagaagtttctcaaattgagaaacaatcttcttttcaccgtttttttgtttgtttgttttttttctttttaatctttaaatgaagagttgtagactgatttagttaagttcatgttagtctatgagggttatacttaaaagggtgagccaaccactaaccatcctcacttaacttgtattccatttttactctagaggaaagacaaatgaaaaaccattattgttcttgagaaatttaagtcccaaccaactttatcgacctctatttatatcaaatccttcttgccagctaaaccaaccacaaaccaccaaccatttcgttcaaacattagaatttagtgttaaagtactaagggaaagaaaaaattaaaaaaaacagagaaaatcaatgaaggcagagaaggctattaactggttcttcttagtacatattttattccaatttcttaaaatacatgcgaaagttccagccataattgtgtttggagactcttctgtcgatgcaggtaacaataacgcgatttcgaccctcttgaagagcaattttgagccatatggccgggacttctttggtggcaaggctacaggaaggttttctaatggtcggattccaacagacttcatctctgaagcttttggtatcaaaccaattataccagcttatttggatccaacttataccattgaggattttgctactggagtctgctttgcttctgctggaactggttatgacaatgccacttcaaaagtcttagtgagtataaaataattatacctcaacaattaatagtgttacatttattataaattattagctttatttattgattctcaatatgttttgtagtctgtgataccattttggaaggagttggagtattacaagcaataccagaaagacttgagaagctatctaggcaatgagaaagctaatgaggttataagagaagcactatacttgctaagtatagggacaaatgattttttagagaattacttcttattcccaaatggaagatcttctcaattttccattgaggagtaccaagagtttcttgttgggattgctagaaattttgttacacagctttatagccttggaggtaggaagatatctattggtgggcttcctccaatgggctgtttaccattggagagagctacaaatttcttatctgggggtgaatgtatagaaaagtataatgatgtagctaagcaatttaatcagaagttaattggtttggttaaagagctcaatatgaaacttgttggaagttcttttgtgtattcagatccatatggtcttctctatgacatgattcagaatccgtctacttatggtaagtccttttagtacttaaaataaataaaaagggcgattattttgtactatgctgtgaattttgctgatgaagtgtagactattgcaggatttgaagatgtagcagtagcatgttgtgggacaggattctttgaaatgggatatttgtgtgatatgatgaaccattttacatgtaaagatgcaaataaatatgtattttgggattctttccacccaacagagaaaaccaatgctattgtagctgaccatgctgtgaaaggctctctggctcagtttctggtttaatatctaatgagcacaatagtcttctgtgtaagtttattgtagatgaatgtaaaagtaatattttttcttttctgttttatgcggtaactttgacttttttttttttttcagataacactatcaatttctgtatccgaaaatgtatgttaaaatatttgtaaactatttaaatttttttaaaaatttataaaaataatattgtaattataataaataatactatgaaaaaaaaattaaaaaaaaaatatattccaaacatataatt

SEQ ID NO: 61704 - DNA, 677 bp, Cannabis sativa
gaatttttctgaaatatcaattcactcagattgctatccaggaaaagaaatgtactaaaactgcttgtctaggaaaagtttttgcccacattgctttcatgtcaaataatttaaattcagtacggttgctgtgtcagcttcatcaactctgtttttgatttgaagtgttctaatgtacccttctatttgtgatgttgtatattttacacacttgatttggcatggcaaaccttggattaggttatggtgacatatggatataacatagagcacatgctcatggttgacactgtacccgattctcatgtgcgcatagcaatgaacgagattaataaagtggggcgtggtgttcatacatgtgaggatgggagccggtatgttggcgaattcaagtggggcgtcaagcatggtcttggtcactaccatttaaggtaattctccccatcaaagtgtgtaggatccaatgttttagtggaaatttttggatatgtgattgtgtggttggatgagttttatttacttgttgacttttagctttggttttgccactgtatatttccatttagtttaggtgtttaattagcacaaacttttgaaaaagagagaaagatctttcttgttgtgtttggtgacttcatgcaagtatggtgtttctattggttgcccaagtagatata

SEQ ID NO: 61705 - DNA, 966 bp, Cannabis sativa
  modified_base (790)..(792): a, c, t, g, unknown or other
agggcataaaacccaacagtgagagcatatttggttaagcttgttactaattgctttgataccagctgttttccacgggagttgaatgaaacaaacttggttttgatccataagaagaagaatttcacctccatgggtgatctacaaccaattgctctttgtaatgttgcttataaggtgctttcaaaagttattgctaaccgtatgagaagccttatagaccttgttatttctgacacccaaagcgctttcattcctggacgtctcattcaaataatgttatggtggcgtttgaagtgatgcattatcttaagaggaagacgaaaggcaaaaaagattttatggctctcaagctagatatgagcaaggcctatgaccgtgtggagtgggattatcttaggttcgttatggcttgtatgagtttcgccgagaggtggattaatctaattatggcatgtgtcttttcgtcaattatactgttattcatgcaaagccatactatgggtccaatcattccttcgagaggtattcgatagggtgaccctttttcgacatatctttttatcatctgtgccgaaggtctttcttcacttatcaagaagtttgaatctcaacgacttttacaaggatgcaaggtggctcatggggcaccacccatcactcatatgttctttacagacgatagctatttgttttgtcaatcaactactagtgttgccggcaatgtctcaaacttgctcaatcaatttgaaattgcatctggacaaaaggtgaacttttctaagtctannntgttcttcagtcctaatacgtgtcttgcaaccagtgtccagatttttgatattctccatatgcccgaagcctctgacagaagcctctatctgggacttccaaacattattgggagaaacaaaaatgttgtactaggatttctgaagaccaaggtaattgcaagaattaatagtt

SEQ ID NO: 61706 - DNA, 954 bp, Cannabis sativa
ttcattcatcctaactaaatatcattttatcttcatttctataaaaataaacaaataagatatctttattagtcttcacataaaaataaaataaaaaataatatatctttaattatttatttttttaagttaatatattattcttaatattcatagttttaataaaataattatagaaaaacatttacatttttctcatattaatattattagttttctttaataatattaattaattagaaaaataaatttattttcttttaattagatattttttttttttgattaataatggtaaaactgtaatagtaacaaaatatcatggtcaataatttgttaaaagtaacattacttaaaagaaacacctgtcattattcagctaagagtaaagtgcaaaatagagagtgccctctatgtacataagtggcataatttattgttgtggcatattgggttgaggtaataatttcatgagaagagaaagttaaacttaaattggcacatgtctcaaagttcattcaactctctctgtgttgtatttaggtccagcaataacttcattaaattctacttcaataaaaagtgtacacatactttgcatttgcatgcatgcactcattcatgctataaataaataaagaatatgagaattttaattcaccaattactatatattattaccattaatatgtacttgaatgtaatgtattgatacgtttttttttgggtgttcttattgaaaccagttagtcattgaaaatgaattttcgaacaataacgagttcgtataaagtgaaacatatatgactatgtataaagtgcgtaattaataaaacatatatgcactataactaaggatcgaaatgcctccagttcaaacccaacaagctttggtctgcaaaagaaattgactaccatgggtaatcgagctttctcgctctctcaactctcttt

SEQ ID NO: 61707 - DNA, 576 bp, Cannabis sativa
agatctccccacaataaagatccaattcctagtcctgatgttaaggccaccattttcatgtcatcagtaactttagttttagcaaccacatccaccatgcagtgaatgaatttctttagactttctctcagttgttgcttgacgctggtcaaggaactggcttctcatacatagtctttagctgctataaactacttcctaaacattgcttataggtctctctagttgtggatcgatcatggagacaacctcttccaccagtcctccacagacttacttaatgttagtgaagaacgtaaacacttcacatcttcactaaccttggcaacttacataatgcggttatacttggacaagtggtccctggagtccgtacgtccttcataaagctccatttggggcattctaaagcattttgacagtggcacttctatgattctctttacacagggctcaacatcttctttcttaaaagctaacacattgccactttgttttttagaaattttctccctgatcttctttaacccctctactttgcgttctaggtgttgagtcttatcacttgaagattct

SEQ ID NO: 61708 - DNA, 3074 bp, Cannabis sativa
tacaactaacttaaattgtaaaaaagccataagttaagtaaatctctaatttttccatatttatgaaatttaaagaaaaaatgccatattctacgtaatttcctctttactctttactcttcatgattacgatgaacacatataaaataaaacagtcatgcgtttaatataatgttaaaacttatttttagcgtgttaattttttaaaaaattttctaaatattccatgatgtcttaaataattacaagatgtcttaaataattacaatatagattaaataattacaatatagacaaaataattacaatatagacaattacaaaaaaaaaaaaaaaatagactaaaaaattcttaattgagcccctaaaaaaaatatacaatttataaatgatatttttaaatattattatacggttatatattttacaaaatactaaaaaattcaaactattttattaaaatttttattgattctaataaaaaaaataataaataatagtaatagttttttttttttttgcttaaaagcagtaatagaatttaaaaatgagctttgagaattgggatggaagtgactaataataagttgttaggcccttaaaaagttgaaaaaattaaaaggcattaaataaaaaatatattgaatcatatgcactagctcaatttgcacacctattacctatagagtcggccctgcaaatgagttttggaattttgtcattactattattatttttgctatttggttttgtgaaaactttacatttaaaaatttttatgtttaaagatttacttttgtatatatatttttacggtattctataaaaataacatgaaaataactagaaatatttaaaataacaggaaaataatatccaatcaataacaaaaaataaaatatatataacgaaaaattaacaacaaatcatctagattctaacataaaaatacatcaaaagactgtaatttctgtaaataaaatcataaaaatatttaaaattctgtacaactatatttttgtaaattttttttattatttttgtgtatttgtaaagtaattccttattattattatttttttgaaaagagatcttttgcattttactttttgactttcatccccttattagaggtaggggtagtacgtgttaaggtcagaaaaattagatgcatgtaaaaaataggtcaacataacttgacacaaaataaaaacggatcaaacacgacacaattagcttaacgaatttgacataattttttaaataaaataaaataaaaaactattattaataatatatttatataaaaatatatatttagtgattcaatctttaagttaaaaaattttaaagttaattttttaaaaaaattgaaaatattttaaatattttatttatatatattaaaaattatatatgcataaatatatatgagttttttaatagaacataaatttatcattttctctacgacttcggcttcagtaatagtaaaacgggttaaagtggatcaacatgcacacgacacaattttttacgggtcgaattagggttgagaaaattagacactaattaaaaacggatcaacacgccttatacaaaatataaaaacaagtcacgtaaaatataactcgaacacgacatgatgatacattttatcactgctaattaaaagtaaatttgatagtgtgataccttgtgaggcatcacaagtgtcccaccacatttttccaattatagcaaatggttaaaatctcaaagtagtataaacgaggcagtgacagtgaatgcacccttttcaaaccttacatcacacacacaagttggcttatagccttataccattttggatggaagagccaagctgtagccaaaaacatagacatacagtgttaattgttttatagggattggaatggaagctacttctactccattgttatttgtcgaaccaagcgttgagcttggatagttgtaatataattacaaacaaatattatcaaattcattacatctcatctttaggtacacttggcaacttgctctgtttattaaaagttataactttaaattgtcttggataatctgtttcagcattaatcttctccaaggtgaaaatgttattgatgccatgctccaatacttcttccaaatccattacatcaacaaaattggcattattttactaagcaaaactcttcattgctaaattcaaagcattggtttgttgcatagatcccttagtgctagtataatataccccaattgtcaatgatttcaatcacctttgtaatgtgtgcttcttgcattaattgtaagcacaatgcagctataatttgcttctggatacttcaagcaaatcggtattcccctttttgcttcttttcatttatttattacgtactttgaggcaaacgagagttgcttccaaatccaataatactatatatatcccaactttccatttgatggttatggtcatcaccaatagaaaccatggccagcttcacaaatcctgctatagcattagaaatattaagcttcttttcatgtctcctacttgtagcatcacttgaaaatgagacaaatttcgtgtacaatggcttccttcaagcaaaactgaagttggatggagcttctgttgtgagatctaacgggttactggccataacaaatgacacgtcaaagctcctcggccatgcattctacccaactcctttacaactcactaagtttacatcaggcagcagcaacaaatctgctgctttaagcttcagcaccaattttgtcttttcaattgttcccaagtatcctggtttcggaggccacggtctcacttttgttctctcatctaaataccccatgaaaggttgccttgcaaaccagtatcttggcctccctaacgtcactagcaattctcaatcttccactcgtatgatcgccatagaatttgatgccattcagaatcaagatttacaggacatcaacgataatcatgtggggatagacatatccagcttggtgtccaacatatctgtgcctgcagcatactacaatacaaatgatggtaatga

SEQ ID NO: 61709 - DNA, 1498 bp, Cannabis sativa
caaataaagtaaaagacaaaatagaataacagaaagagaatctccaacaatgctggagtattaggcagtgaatgattaggtgattaattagatgactaattaaccaatgaattactatgtcttaacatggcgcgggggagaaaacacttggtcatcacgtatatccattatacatcctaactatgatacttctctatgcatcccgattttatcttattgttatgtgatgcataacgtgggactcaatcttatctcggttcctaaccttctcgcatgtttctatcatttgaggacttataaattatcaggatttataccgtcgacacatcatccttttcctttattgaaatgggtccaagtgtaaattatatacgacagtgtactcgttatttagatgaaaaaattatttgacaacaatagatttattttcttgaattgaaagggaattcgaactagggacctcttttttataaggagaaatgtgaaattactaaactatatctattacggtatgaccacataataatattggatttataattccattgtaactattaataaaggaataattgcggtgaaagtctctaaaaatttagagttgatgtagattagtcttcaacctcgaaaatttgcagtgatagtctccaagatcacgttttgtgtaagattgttagtccctaacttaattgatttgtcaaacccaaataaaatgctacgtatcaatttttttattgatccaaataataattttaattaaaattttttaaataaaataaaaactcaaatatatattttaaaatcataaatttactttattttattttttcttttcatttttttatattttttttcttcttcgtcttcctcacccagcattgatttcaaaaccaccccgaccttcacccaccccatccttggatctactaaggagttcaaaaccaccctaacgttgatttcaagggctctaaataagcttaaaacccttataatggctactacccaagctcacttaagctccactgtgcacggtggtcatctaccatcatcgacaatgcatgtagaaatcaaccacaggatttgaaagatctctaagagtagatctcatttctgaaaattatttggctaaatgaaactcaaagagaccataacggagtcacaaagttttaacttcgatgattggcttgcgattggaggatgctgacacatggctcgggatctctaggttgggggttttatgtacgatgagtccagctattgcctctaattttgccaatagtggtcgaagacagcttgtttgcaccgggccaacgagacacgaagagagagacagagacgaggagaaagagaaagaccaagatggggatcaagattttcttggttagggttttcgtaatcgtagggcttgcaagtttgaaccactgagtgtgtgggggtgatagggatgggggtggggtgaaggtcggggtggttgggaccttaggggtgttcattggatcac

SEQ ID NO: 61710 - DNA, 655 bp, Cannabis sativa
ttaataatatgtatgttataatgtacatgcattatatatatgatttttatattttgattttttttagtgatgctatcgtcaaccttctatttcaatcaaccttctatttcaatctttgcgtctgaaaatatatgccattttttttttcttttagttttgttttcatggtgataattgttataagtacaatattaattaagttagtagaatttcaaaaaaatttgaataatttacaatattaacaatacagctcttgacagacacactaatagtagtgtgtggggactagcgctatatagccccaataaaataaaattaaacatattctatttaattaaataattatacaacaaaatagtgaaaagccattataatttttatgtaaattagtaactataaatatttttataagaattaagcaagcttccacaaataaaaaattatgggttcgtactatggtttttgatattccaatcaaccattaattgtatgtgttcaaaaaattttaaatttattttcgatcgtataaattttgaaacttttaacaaatttataaataatattagaactataataaatactatataatataattttttttttaaaaaaaagaagttattcctgtatttattttcgtatacacactacaagaaat

SEQ ID NO: 61711 - DNA, 1161 bp, Cannabis sativa
catctaaggacccccgtacttccatgaaaaaaaaggcttcttgtcgaagttgatggatctaggtctcaaatttgggggtccttggttgattctcgaagatgtgaattttgttctgagaaactctgagagaagcggctcgaaggggagagaccaattcttgccgtttatttcgaatttgatcaatggatttggtttgattgatctacatgttaaaggtgatcgccttacgtgggataaccatcgggatggcgacgctcatgtaaaatcggcccttgacaaagccttggctaatggggaggggctaagacttttcccgaaggcgatggtgatctcttaccatacgtgcaactcaaaccactggccccttagtatcgatacagtgaaccgagacgctaaaccttctaggccgttccggtttgaggcctgctggactagggacccacgtagtaatctgattgtggagaattcttggagctcaatgtttcatagttgggcctcggtgaggattttcaagagagtgggcgctactcgccatgctctcagtaaatggaatagatgtcaatttggaaatttggacaaccgtattgctaggctggaaagccacctgaattccatccagagcctcccttctgtttccagagtgtgggctgaggaatcagaaaccagaaagtctcttcacgatgccctaagatgtagggccctttacttgcaacaaagatttcaggtttcctggatcaaggacggggacaaatgttcaaagttcttcttcactactgcaaccatcaaaaataggaggaatgaaattgaggcaatcatgatcaaagatggggtgtggctgagtaatagaatggacattggaaaggaattctcggatttcttgggcagtatcttcaaaggcacgatgtatgggccgttggaatgctttgaccacctgatctcagaccaattctccctccaggagaaaagggatttggttaccatttttaactctgaagagataagacatactctcttctcaatgggtagtctaaaggccccgggacctgatggtatgtcagtgtttttctagaagcactattggcattcggttggttctgatttttgttaggcggtggaagattttttcatatctagctacatgcacagaggagttaatgctac

SEQ ID NO: 61712 - DNA, 1644 bp, Cannabis sativa
  modified_base (1601)..(1619): a, c, t, g, unknown or other
gagtaactcagtgaccacttcatcactgtcattcttcgtttcaacagagacaaactctagtgggcatggtttttgaccatttagatacccctctagcctatgacctctaatgatggtaaacaccatcgtcttccacaaagggaagttattacggtccagtttgagtgagaatgtttggcctaatgtgttgctaaaaggagttgtgagtgaggggatagtagcaaccgtggatgattgtgctctggagcttccatttcctactctcgcatgtgagatttgagctgtttggctgttgacatggaagaggcaagaaccttggctctgataccaagttaaattttagagaaagaattgattggaaaacttagctcatcgagtgattgctacaacctttcattaaataggcaaaaatacaattcagggtaaatacatgagccaataaaggcattacacgtgttacacaaatatctaggctcaacgaaaaggttgttagcaaaaataatgattacaaatgattacacattcatccttgggatcccctcatttacaatgtccatcatgcccttgtgccacttcatgagcataatcaatttcttttacaagccttcaacaatggctactcaataccagcgcaacataacaaattataggaaaactctctctcactctaacttgatctcaccacaagtctctctcgactcttctcttcctttaactcaccaaagcagaaatgaaccaaccctaataataaacctattgaatagtttatatagacaaaaaaaaaaataaagttgccaatatggcataactaacttaattgaattgaaaagaacctgactaatagaaattggtggctgtccaacctagcaatacgagcgaatcattgtagactaatagattatgaacatgtagcaagtgattaggatgagctgaaactaacacatttgatgaagttttatacaatttgtgcaaaagtgtataattttctaaaaaaaaaagttatttattagaaaaattcaaaaaaaaaaaaaaaaagttaaagaaatataggattaccttacactatttttattcttatgatttttatggggttttatttatttatttatttttttttggcaaagtttacaaaattatgattttttttttttttgaaaaaattattcaacacgaaataaaaaaaaataaaaattatgagaaaaataagttaaggcaaccaattaccttatattaattttcttatatttttaattttcttgcataaaataatttttcataaattgtataaaaaaccaataaaatatgaaattttcacttaaattactaaacatctatcaagtgttttattttttttattttttttctcacaatacacctatcaagtgttaaatttaactaaaatgaggttgtcgaccaatcagaaagtaccacacggctagtattagaaaggagccagacttgctatgagtatgaggtaaggtaagcaaagtgtgtgcattgagctctctaacgctaactaaagctccaaaataataaataaaaattattattcttatattgttacgaaaattatgaacactacgcaagtatacgcagtcaannnnnnnnnnnnnnnnnnnaggtcgaaccacagggaattggact

SEQ ID NO: 61713 - DNA, 1291 bp, Cannabis sativa
  modified_base (217)..(220): a, c, t, g, unknown or other
aattatttgggcactattaacgtcggtcaacgctatgaacagtagtgttgaccaacgtgaatagtgtaatttgtagtagtgctttcctattaatgttttaacttttatgacagtaattattgcttcaaaaatcgtagttttatttacttcatgttatgcttgaggtgttagggtaattatctcatcttaaacaaatcttaaaattattattgatgannnnctaaattattttaggtaaaaaaattaatcttataaggtgaaaaaaaatcaatctaaaacataattaaaataaaataaatacaccaatgtaaaactcaatatataatagcacataattttatgagttataagaaatttttcttaccaatgtactacgaaacataaaggaacgtactcggtacgtgatattttgtacactagttttactaaacatcatgcagaaacaataaatgtacacggtacatgatatactgtactcaactaccatcgcacaaatacatagaagatatgaaggaatgaaaagatgaaaataacctcactctgacaacatggacccactgtccgcagcacttttatactgttaactaccacaaacagtaactttgttgtatctttttgtaccttaactaccacaaatagtaacttgattgtagcttttcgtacatttttattttttaattaaaaaatcaaattgacaatcggtgaagaaacctacaacaaccggttgtcaaataaataaaaaaaatacaaaaaataattaaaattttaatagaatgtgggaccctcccttccgtacaacggattacattctgatatttcaaatattaggcataaaattggctgcctatgtatatattcttgcaaaaaaaaaaaaatatattagctaattagttccatacaaatcggtatataaaatcatcaattaatgaataagaattgtgaagaaccctaattcttaataaaaaaaattatgaagaatcctaaaaaaagcttagtaatgctagactttttaaaataaactgcgcgcttgttgaatgtttacttttggaaggggacgtgttgattcatatatttgactaaataacaataataatataaaatgtgagttaatagttaatacttttctagtcaaacgaaaaaccatacgcaaagcaattaaccataaaactttattttcgttgaccattctttatccttcctatcggccaccaatttgggtactcaattatagaaaaaaaaagaaaaaaaaaagataaaagtaaaaagtccaacacaagcctctcactctctt

SEQ ID NO: 61714 - DNA, 1037 bp, Cannabis sativa
  modified_base (533)..(542): a, c, t, g, unknown or other
aaaaaaaaaggggaaaagaaaaaaaaaacttaaatatattattataaaatttaagttatttatttattataaccgaatgttttagctgtcaaattaggatagtttaggaaatttagtttaatatgtaaaatatggtattttaatatagcacttaattaaaaataatatatctatacttttattattcttttccatagctaaaaaatatccttacatcttaaaaaaaagtctttcactctaactaagtcttgttgtctccaccctaatactttaaaatctatgagctcaaccacctcgaaatcctcaaaatccctactcatcgttggagttcttcactcgcactataaaaaactactacttttagtgccgactttttaatcacaacataatttttttgtgattaaatgtgacttttagtcacaataaaattttacttgtgactaaaacataatattttagttacaatatcactaatttagttttagtcacaacaattattgtgactaaaaatacttttagtcacaaattttgtnnnnnnnnnnagtaagattttttgtagtgtcgcttattttctgtattttttttccttctgatttttgacgatgtcgcgaaatattgctaaatgtctctatatcgcaaaatatcgctaaatgtctctaattcacaatatcactaaacacaccgctaaatatcgcgaaatcacactcaagttttcatgataattagcgatgtgctgtgaatttttagtctcatataacaaatgcatcgctaaatacgcaaaatatcgcaaattattgctacattcatccctaacctcaaattcggtctatcattgtaaatacattactaaatatcacaaaatatcgtaaaaatttagaaaaccagaagaaaaaaaaatgcaaaaaacgagagaggtcatgagagaagactacgacaagggcttgcgactgcgcttttgggtctatgtgttcaacggtaggggttctaggtcggggttcaacgccatagagtgagatagttagagagataattttttt

SEQ ID NO: 61715 - DNA, 3368 bp, Cannabis sativa
  modified_base (3318)..(3323): a, c, t, g, unknown or other
taactattgaaaccttcatatatatataaatatataatagattattttaaagattgattatttttcttaaaatttgaaaataataataataaaatagttatgactcttaggtgatagcaagaaacctagaatttgcatctcgtaacaagaaaagatggtgagaaatgattggagataagaaacctaacaacaaccataacaaacgaattaaattagatttagggtataatggggagtgaaaaacgcttagaagcaattaataatgggtgttataaaatatctaatctaatccaacgaatcaaatctaattcgcaaagtgcaaattaaatttgattggaaaatttaaaatacacacttgtgcgtctagattagatgttattgacaattaaaaataattgatccgatctaatctaatccaattaaatccacacatttatatatatttttaaagaaaaacaataattatttttatgtgaaaaatataacttaactattataaaaatatgtttaaaaaataaatagtactttgaaaagtatttgaaaaaaaaaatatatatagaggaatgtgaagaagcatttgctcttttactcttcagaattttaaagaatccaacgagttattgtgagtactcttatataagataaagataaaatgatcaacccattctgttcaatgagcatttgtcatttttctgaaagaaaaaaaaaatgataaatgaacaacacgttacaaatgtattgtaattattaaagaaccgaagaaagaaagaacaaaaaatatgtaagccacgaaacccatttattatactcaaggagttcaattgggataactgatttctcatcagaaaatgtgccacaacgaagatcccaagccttgttgcaaattgcaatgtgtctcttaggacagaaaaaagaaataaaaacatggccaagtaagtataattagctttcctctgttttagggggacccttccacttgaagttgtcagcatatgccttcacctgacagcaaagatggtaaaaagtagttagagctacaagaaagattaagtatttatcagataaaaaactgaaacaagggcaatcaataatatcattatcgtcactcggaaatgggaaggacatatcttcttaaacgtgtttcagctatggaatagaaaacaaaaggaatgtaatatgagcaaaagctcatttttctcagaatggaatatacacttggatggataagcagaacatggatgacaaattgaatgccctagggcctaagccactttatagaagacacaggtaagctcaaaaaatagaaagactcgtgaggtgaaagttcttcccacagttcccaggccatcgctaaatatacactcccacgatttagcattcaattcggtacctataattggataaagctattcaagctcaaaatgacactgtgaaattggtgacaaagtcaagctgttcctggaaagtacacatccattgctctcaatataaatgttcactaaagttttcaatatgcctattgcgtagatagaatcatattatggaatggaaagaaaagaatttggataaaggttataaaaggagctcattaccatagaaagataaccacctatactagcagacaattggggtataaatgaaccatactgtacacactgttatgattagttatagctgcttaatattaacataataatgcattctcaacccaaataattctaacatgttataaaaaaaatcagggaagtctatgagcagaaagtatcagaccttcaataatggagtattgcgttttttaacctgcaaagtttgaaatccatagtcaacaagtgaaacaaaaatgaaaagaaatcactgcttacgaaaacatttatcaagctaacaaagaaaatttcaaaatggacaaatattgatagctgctagcctatcccctacacactcgagactagtatgaatccatactaaaaaatataagaatatacttgtacataagtggcttcaagggtatctcaagcgaaagaaacaataaaaataatagcacaaattaaaaaaaaaaagaatgataatgaaaacgtaccacataatcccaaccgtgtttctctgcaaatgccttagcagcttcttcactatcaaaaccgagagcagaatcaccaacattggcatatggatccccagtagatgtccagcccattaatggattctcccacctataaaccaatcatgtaaagtaactatttacaatcttgtaaagataaatgatagttaattaatagagcattaagaaatttgttgtcttcttaacacaacataaacaccattagcactgttttgaacagaattcaaagaaaaacgttcccaacacagatatttgctgaaaaattataaaatcaataaaattctggaacaagaacggttatggtaattactcgacaaatgtaaatggtgggaggaaagttctatgcaaatgataataatttaaatgaggattcaaattctccatataaagcacaatcaagttgaaagctttgactataaatctaatggaccaaaagtgaattggtatacaaagaccataaattgaaaaacccatacgcataaataaactaatgaagtgaatagcttcatacttctgtgtggacacaaagttgattttccatctcccaagttttcctgatccttgttgggttgctgttcttgcaggagagtaaatcacaacctgcccatacatgaccaattactgttaatcacagaaattacccaagaaaaaaggaagggaaaaaaaactaaactataataatatttctaaagataattccggaaacccaaaattcattctgtaaaattccctaaattaggtcttcgccctaagctcaatgaagaatacaagaaaatggagagtcgtacccgcctactaaggtgttcgtcggggaccccagagaccataccgatctcaccaggcttgtaaacctctaaagcatcggcagagaaaggccttgaggcagtgatgaatgtggttcgaagagcaccaccatggctcgagatgcgtcgcagagaggaagccattgccgaaagcgtaaccaatgaattctaacgagagattgtagctcgctgcctaataatggtcgctagcaactataaacgacatgtcgtttcatatagtttgtcattttcttttaagaaaatatataacctactttaaattttaaattatgcttttattcttgaaaattataagaacgcccgaacttatttctatccttaatagattgtagaatacgagtggacaaataaaagtaaaattattattattattattannnnnnttattattattattatttgttataaatattaataattatgtggat

SEQ ID NO: 61716 - DNA, 840 bp, Cannabis sativa
ctctgtcttctctctttatctctaactaactgagagcttctaacttccgattgatcttcattgtcttctccttctattaccttaggtttatctagaacaacattaattggtgtcataggagtaacctgctccacctcaatctagacattctcatctccaataacttctctacctttgggaatgctcttggttttcatggccatttcatcttccttgaaaacaacatctctactaatcaaggacttcttgaatccatattctaagcaccacactctatatcccttaactccttcagggtaacctagaaagatgcatctcaatactctaggctacaactatcttgtctaacatgcacaaatgtagtcatccaaacactttcaagtgatataagtttcaggatttacttgtccataactcttctagggttttgaagttatttggcacagatggcgatctattgattaggtaacaggtcgtgttaagagtttctccccaaaaggttccatctaaaccagctcctattaacatgcacctaactctctctatcagtgttctattcatcctctcattaagaccattttgctgaggggttttgatcacagttctatatctcttgattcccattttagacacaatcccttgaactcatttgagcagtactcaaggccattgttagtctttagtaccttgagattgttcccagtcttgtttcctagcagcctcttccatgtatcaaaggttcatagagcctcatttttgcttttcaacaaataaacccagaatttcttgttgtaatcatcaactatactcataaactagtgtgctccacctttggttgga

SEQ ID NO: 61717 - DNA, 926 bp, Cannabis sativa
atcaaatgttcatatgcaattgatcgagtgacagggttaagaaggccacactttacacaaggacatacaatttttccttcatagcttccattttttaatgccaaatcaagaaataaatttactcctttatattatgaatcactcactctagattgcttcatccaactcttatctataatttatcttatgaatttttttggttaatacctatcaaaatccaaaaaattatttatttaaaatatatataaaaaaacaaatatatagagaagaaagaaacttgaattaatagccagtgataatttatttaaaaatatatatctttatttcgaaatccatagcaataataattttaaagcttgaatcaataatacaataatttcaaacaaataaaggaagctggatagaatttcacccattatttttaaagacaaataataataatagtaattaaaatcaaaagttaaaaatactattacttctacacaattttgtttttcactccctctttagattaacaaagctgaatactatttaatgtgtttcaatagagagtactagatgaagatatagagatgtaacaaaattatatagtgatcatatatattgttttctataagttcgaaaatttagccacaatttcagtttgatttttttagaagtaaaatatcttaaattaaatattattgcttaataaaaaaataatacttatatgtagtttatatttacatgtgatttaaaatataacataatttaaagataacaattattattaggttgaatttatttaaaatatattaaaactagatagttacgtgtaaaaaaaagggctagattcttatacatataatatataatagttttagtatttaaaaaaaaaatctaaagcgttgattaaggaaaaaaatatttttcaaattaaaaaaaaa

SEQ ID NO: 61718 - DNA, 1474 bp, Cannabis sativa
tgaagaggaggaggaattgttgagagaaaaaaaaaattctgaaaaaaaaaaggaaaatggagtttgctcgtcgaaagggcatatatgaacacttttaccggtgcattgaattgcgccggtaaaagtggtcatataaccctaaacccaaacgcacttttcgttaaacacttttaccagtgcatggtaaaagtaatcccacctaccaccactttccacgcgggatttttccccctaaaatttcatgtgggcggtcaagattcccaccaaaatttgctaacttttaccggtgcaatttttcaccggcaaaagccttacagaagtggacatgtgttcgcgccatttggcggtttattgctgatcttttaccggcgcatgtcattgcgccggtaaaactaggctttcttgtagtgtcccttggaaaaactttggtccttccttcaataagaaaccccttgtcatctctcgcaaccaagccaaggccgaatccgtttagatatgcaaaagatagcttcatctacgttgatcttgacactatttaacggtggtaacctccattgctctgccccatcatctttggatagaccagataatgtagtttctaaaccaaaaacttgagcaatcttccactgttcaagataacttatcgcagatgatacaaccttcgatgcaacaacatttatttgattccaaaccttgtcattgcgggccccctgaattgcccaacaattggcagcaagaagatcttgcctattatcattgagctgcttaaaacaagcctcaaaccagctggaaaaaccagcagccgtgggcaccccagtgccaattccaaccttattccagcaaatttgagcagctggacattcgaccaagcaatgcacaatcgattcttcactttcatggcaaataggacattccatcgtgaccgccacatgctttgtacaaagctggaccattgtaaggagacagtttgtacaagctcgccaaaccaggtccttaatcttgggcgacatatgcaatttttaaaatttcttccaaaaggcagaggaggtggcactattccatgttccattttcctggataagtttgtaggctgactttacagaatacaaccctgaaacctctttgagccaaactattgtatcaccacgattcgtaaagttaagaggaatgcttagaataagagcctgatctctctcattaaacatatcattgattagctccacatcccacgccaaagaagaaggaaccataaggttagccaccattgcctcttgcagcccgagagaggtagaagttaccaagggattagacatatttggtagtcaaggatcaccaagtacccttatcttttctcctgaccccaccgtccatcttgaaccactacgaacaaccgattgagcctctgaatatacttcttcaaacaaaactgggattgtttcctaattgggtcaatagaaaattatcttgtggaaag

SEQ ID NO: 61719 - DNA, 700 bp, Cannabis sativa
ttaaggccattttgtatcttggccttttggcctttattttttttttttttataatcgtatatgttatagctttttaggaccacttgtagatttttggaaaattataagtaatttataatgttaaaaaaaaaatttacatatttttttgtacgtgtgattacttttttttttatacgctaacggtttaaattttatttttgatattgtaaattatttaaaaaaaaattaaaatttataagtaatcctaattatggtgtagtacacaatcatacaaaaattaaaataattttttttaatacaaaaaatgtgtctattgcataaatttcccatgttattatcttttttttttttgaaaagaagataaacttcattaaaataagtcatccaaaattaaggatgagatatcagttggcagggtagccatactgaaactacaatcagccataagaacagagttgcgtgccaatgcatacacaactttgttcgcggatcgcttaacaaaaacaattgaaacattaacaagttgtactaaaagtgccttacaatctttaataacaaaaccatatggagagaccattagtttattagaattaatatcatgaaccacattaaggcaatcggtttcaagcactaagtcactccagcttttattttttatctagctaatgcttccttgattcccactgcttcagccaacaaa

SEQ ID NO: 61720 - DNA, 683 bp, Cannabis sativa
tgtatggttcaaatactgatcaaccctatcacataggtatgactagagtatgactagcgtaccgagtataggctaatattatggtcgatagtactgttgtacaaaaattctagactcagtcctatgttggacacggagataggattatggttgggtgtatgggtgcctgattataatctgggttatttttatgttattgattatacttttattactgagtctattgactcacaaatattttttttcaggtgtaggtaagggcaaggctaaggttgagcaaccgtgtgagcgaggggatgaagattgtacatgttggggcgattaggcatagaacgtacagtctttaggagagttggacatattttgtatagtcgttaggcgataacatttgtatctactaattgaaacagttgtagatattttgtacacaggatcccaatatatatataaatgttagtttggtatttataaatatttaaataaagtttcaattattcacgatttttaataaactcattgattagcaatgagcttcacaattagtataaaatcccaataacactcctaaactagtaaggtgttatatttattagacttagcattaaataattacatatattttatatgtggtagctattatctctagaactacatataatatatattaatataaataattaatt

SEQ ID NO: 61721 - DNA, 1498 bp, Cannabis sativa
ccttttggaagctccattaactcccaagtattgtttctttctatggctgcaatttcagcatccatcgcctttctccactttgattctttagcagcttcttcataagctacaggatcacaatctgaaaataaacaaaaatgtgtgagtggatcctcttcagaatcgtcagaatcagatacctaataatccatcatccatgcaggccttttcctctctcgttgaagcctttgttcagtgggtgcttcatcagcatgtggactttgagtgattgttgttgtaggttgttggactatctctacaggttgttgttgttgctgtcttttctcttcatcaccatcaaaatttgctggaatttgttgctgaacaatattctcgttccatgcccaggttctttcctcatcaaagattacatcgcggctaataatgattttcttggtgttaggattatacaacttataggcttttgattgatcactaacaccaagaaaaatacatttttctcctttttcatctaacttcttcctcttctcatcaggaatatgggcataagcaacacacccaaaaattctgaaatgatctaccgctggtcttcgtccactccaagcttcttctggtgtcatattttgaacagcaaaagtgggacttctgttcaaaatatgaatactccaattcaccacttctggccaaaaaacttttggaagcccactcctcaacagaaggcttcgcaccatattaataattgtgcgatttttcctctcgcatactccattttgttggggtgtgtatgctgttgtgagatgcctcctgattccatgggtctcacaaaaatttgaaaattcatgtgagttgtattctccaccacggtcagtgtgaagaactttgatagggctgccaatttctttctcgacgagcactttaaaacttttaaaggctccaaaagcttcagacttttcctgcaaaaaataaacccatgtcttccgactaaaatcatcgatgaaggtaattatatatcttttacctccattggaagatggatttattggcccgcacaagtctgaatgaatcaactcaaatggtgtgtttgctctccatgattgtccttgcggaaatggattacgatgttgtttgctaacaacacattcttcacacacttcgacgggagctatgatcgaaggaagaccagtcatcatattcttctgttgcaaagtctttaatccaccaaaattcaggtgaccatagcgaaaatgccaagccatgatgcatctttaagtttcactgataggcacgaatgagtagtattgtggagataaagtgggaacattcgattcgccgtcatgttcacttgagcaattaagcccaaatttgcatcttcgattcgacatactccatcttcgatagaaattctgtatcccttttcttgtagttgacccacactaagtagattcgttttcaaatctggaacataaagaacataagaaatagtatgggtagaatttcc

SEQ ID NO: 61722 - DNA, 1480 bp, Cannabis sativa
ttgttgtagcagaattactttctgctgctgcaaacgattacagtttttatattttcttatatacaactgacatttgcgaaaacacggttttttagaaggtattatgagcacgcctacctatagcgagatgaatgcctcgctattagttgtttgggtttacccgtatattataaaccgagtgtctttagcaaccattatgtctcgcttatgtcttgccttcgtctctttctgcacaacgaggttgatgtctcgctttgcaaatctgatgtcgtatggtttttcgtcaatgcatgagttaacagtttgtatatatatatatctcgcgtaagacctttcagtcagcaagttgtaaatattctctgttgattccacatttaacgtatttcatctttaaatataattacatttgctggttcgtattctatccaatttgacacgtgtcctcctccaaagtgctagccgaattttggatataataatatttatatttgaatttgaattttgaattcaaatcaaattagatatttatatttatcttttattttaaataaaagctttatatataatactatagatagggatatatagcatcgtaaataataagtgaattaacatacagaaaaagcataacaaagtagagagaaaataggattgttattttcactcctctctctctctctctctcttcacgcctactctctctctctctatctcacacgaaatcacactattccaagtgtgtgtgagattaaaccttaatcctattatagtgtctcatgagttgagtacacactataatacctaaatttattcatcctataagatctaatagcttactctattcatgagtgttgaggctaacttggaagatcaaggtgtggattctttaatcaagttctagattggatgttcgattgtttatacgaaaataatcaagaataccctgataagcatcaaaaggtaattattttgtttttagtagattagatttgatctatattcattatgttaaaattcttaggcttatggttcatattagataaaaattattttatcaaaattccgcttccacttttataactatgatatagaccataaaaaatcaacaattggtaccaaagcaatcttcatattgatatagattaaatattatgttaggtaattatgcatttatatatataatgatatattgtgaatggatggaattaagtttttatacatgaatgtgaatcgttaattatatggtaaatttgggttagtaattttacagttttactagaaaaattatacactatatttgtggtatagactttgatataattttctattttaaatttatttgtaattttttgttaaaaattgtaacattaaaaatccacaataactctattgatgagtgagttcaggtttaaggattaaacctcggcctcatcaagatgacaagttttgaaccttaaataacgagccacaaatcccaaag

SEQ ID NO: 61723 - DNA, 587 bp, Cannabis sativa
gtaaaataaatattccaacaataacagcccacagttcaagcttaattcaacataatctagcataatcaaacctctgaaaacaacattaaataactacagcaaccacagtagcaaaaacactaattcatgcaaaaattcaatcttaaaactcaaagaactaaagaggaagttgcaaagaggtttaccttgggttgaattaaacttagagctgctggaaacttgcaagatttgaagaacaaaatcaaaccctagctggttctagggatttcgaagaagagagagagaattaagagtgaaatgtgatttttcctttactttgctttttctttgaaaatgagataaacacaccatatttgatcaattaaaccaacttaaaatcagattaattaacctaactaaagtcacaaaaagacaaactaaagattggcaaaatgaccattttgcccttccatactattagctactaaaggtcactaagggtattttaagaaattctaaaataccgacatatcccgacatttccaatgtctaactaaactgccccactatactcaaaataaaagggtgtgattctaatagccaaacac

SEQ ID NO: 61724 - DNA, 1158 bp, Cannabis sativa
attccatttagaggagggagcttgtaatcaaaacattgaagcagagtcatagtaggaaggataagaattataccctagttgagataacaagaatactgaatagcactatcaagtaagatcccagaaccagaagcaacagcaagtcaaatgtgacactagcaacctgcaataggacaattgaacatattaacactaagcagagtagctaccttcaaaaattgttcgacacaacatgaatcggaactttgttaggtcttttaccatgagtaatactacgaacactaattatttacattacacctagcaattgcaatgagacatgattttgaacaatgtaacggtaaatggcacagacccgcttcgaaatcagatgtgatacaaaattacaaatcatgccattatttgtgcttttgttttgcattagattgctttgactatcatggctttgtaggttgtcatttggatgataccttatcatctcttattacacactaacctgtttttcttttctctagtttttttttaaaacacacaaacacaagggatgaatgtgaaatatacaaagctgagacttccaaagacctattataatccattgctttatgaagtataacctcactagaaatccataaactctaacgactaaaattacaaaaaaaaatataaaaagagacaaaaaatggcacattcaagaaatctataagaaccaaactcaaaggtaaggtacataaagatcaatacctgatatatgttaagtttagctttagatgaatcgtagaaagtgaacattccatcaaacacctcatgttgcatattcacttcatgggtatgatcttctaattcctgtcaataaaaaacaataagatggatgaaaagaaaatacttcaaactgaatgataaaccacttctattattcaaaggatgaagttttctttcagattcttatggttacattcaatgattttaattttatttttctcttagactttttgctttgtctcaaatttttaatggccttacattttacagtacttgaaaccctcaaccacattctcccacacaagtacattaccattaagccaacgtcaagtagcttgtaggttattctttaaacaataccctaaaaccaacatgtcttgtttaaattaaaataactaa

SEQ ID NO: 61725 - DNA, 6756 bp, Cannabis sativa
  modified_base (6704)..(6712): a, c, t, g, unknown or other
tacactcagaacaacagcatgctcatatatgtcccctgatagttctcaaacacaaaaatggtcattagaaaataatcaaaagagatgacaataatgacaactttactatctatacacaaacacaatcatttgatgcttgatggaaattggttttgtcaaactcaagtttatataagatggacaagtccttaacctaatgcttctaaaccaaacatgcttagtctcactaccaacagaatattaatgaaaataaaatttataaatataaaatccactgcacagcctcatttacagtttctatcatagtcaagcctagaaccattgaaggatctcgctacatactagaaagatgttaatcaccatattggagctagctaccatgaaccttctaccctgaaaccccaccacttagagtccataggagattacgggatgggaaacaaaagactagattatgttcgtaactagatacaactacataggtttcgaaatgagataccttaaaatttataaccctgtggttttatagctagatataatgcataataataaggagaatcttagctaagggaacaagggctttgtgggatctcatctcccccattaagaagaatccatctatcttaggtgtaggactaatcatgatttcctaacagcgctggaagctctctaaaatgaaacagagtaaggtgagtccttcctatgcacttctcaatctatactctttcgggttaggcttgaagcagctaggcgttcctttagttcattttagagaatggaattctgacatctctctaaatataacaaaaaattgaagggtaacactaacacatattggctaaagttttagaataaggaactaaaaatagtaaaacaacaaagtagtgcaattgtaaaaatcaacacttgcaaaaaacatagaaatgattgagaatattacttgctaatgttagttcatgaacggcatttggtgtttcttcaaacaatggtggaaggcttctgaattcagtcagcataacctgaacaaacaaatatccagttaaaacaattcaaccctaaccctaaccctaaccctatcatcacttaagcaaaaaccaaaaattccagtaaaaaaattccaacatataaaaattcccaactaatgaataatcaaattgggtatgggtaatcccaaaaaagcaaaaagatcatgactgttccaccccaacttccaatttcgcacaattttctgtaccttcttacaaaaattaaagtaatgcatcgctagtgtagtaaaatcagattttgatttttgaacaaacccaacaacaaaaatcaccaaattagaatcataattttccaatataacactacaacagaagaactaagtctagttcggtgcgatttaacatgagaaaaatcccagtaaaagaaggaaaaaggttaccttgagctgagagagaaacatggtacatgaatcaaaatccttccttgaaagtgcagctttgaatcgctcgaacagctgcgacacttctgtgagtttgggatccattttcgccgatctcttttctcttctctctggtttggtttttgcttgtcgttcaagaaggaatttttggcttttcctatttctagggcttgaaaatggaagattataaaatatacaaaacacaccacttttttaaatttatttacataaatacttttggcaaaattctaaaatgtcaatcaatacaccatttttaatttaaatttcatggtcgcgtacttttataagacatactgtaaaattttgaaaaattcaaaaaaatttaacaggccgaaaataaatttatcgaaatttattgtaaattattataaatttatcgaaatatagcaagatatcttaaataattatactgtacatgactataaaacaaattaaactaatttttcataaaaaaattcgtactttaaaggattacactgatacacctttatctgtttcaatgagtcacgtgtacaataatattctgtgaaccttatttttggtgtgttaaattaaattaaattccttaaaattttaaaagatgttttaaataattacaacatacatcgccattagaaaaattaaactaaataattgtctctgaaaactaaacagatagaaatgcattgttgtatataaattgtaaaatttacatatttaattaacctaatttactgtaattatttttatttatctatttctttctttattttatgagttaattacaaggtaaaaataataattgtcgaaaaaaatcagggctgccttgggtggtaccagctattcgagctaactattttagtttatacctttgcaactgttgttagttattgtaaagtgttgtttgaatcatttagtaatgttgtggttcattatgttaaacggcctgctaattaaattgtacatatttgtgttagtttttctcgtacttacgctaatcgtatgttcttaaagcaagatcttcctttaaaacttttatatgttattttaatatttttttttttaaaaaaaaaagtcaaagctagagtaataatgttaaatgataccactgagtgtgtggtgtaattggttagatgactttacgctaagtctcttatttagttgctcttcggagttcatctatgcataatagcacttatcctaggccttaaaagtaaaactcatttagatgtaacacatatttgtacgccctattgggtaagtcatggtatccttgcgtagaaatgtctcgacgaacaaccattttagggataatatataagctgtcattgactactcggtggtctctataattgctattaagccgaagaagtgaggataaaatgtacactacttgatccagggccggccctgaaaatatatgggcccaagatgaattaaattttggggcccttaaaaatatataaaaaaaaaaaaattaaaagaagagtgttatggaattagaacccatgacctggacattatgccatccacctcaaccaactaaactatgaatatttgttacttataatatacttaaattttatttaaataaaagcctaataaatttttttatttttttattttgggcctccggaaagtgtgggccctagcgcgggcctagcccgcctatgcctagggccgaccttgacttgatccccttccaatacactactttatcttgtaattttcgtttatttctagactgtgtaattttgttgcccacaatgtggctaagtgggccttgacccagaacattacaggtttcgttgagctatcctcgatacctaaaactatcatttataatgaccgcgagatctaattctatttatatataacgctttagtttaaaaaaaaaaaaaaaaattcccttccaaaagttatataaaaaaaaaattaactgataaaataacaaaacgacatgtcgtatatataagcaagtaaaaatgaaacgacaagtcgttttcttaacgtacgccgtaacacgtagcggaacactacgcacctccttccttatcttataatccacactctcaaagctcagtcttctgaaaactcaaacacacacacacagagctcaacaatggcgtcctcacctctcacttcaactctcaccccttcttcttcatcatcactactcaaaaaaccccccaaatccctctcccaattcccatcttccttcactcacagaccattctcaatatcaaaatcgaatcttttcatttccccaacaaagacctccttgaccgtagtcgtccgggctcagacgctggacttctccggttcgttcttcggaggaggtgggattgcatcggatgacgacaccccatctccgcctgggtcgggattggcagccgtggaggacaaagaggagcctcaatgtccacctgggttaagacagtatgagactatggcggttttgaggcctgatatgtctgaagatgagagactttcacttacccagaagtatgaagaggtaaaaggtttttctttgtatgataatttgtttggttgctgggaaaatggaggaaagaaagaacttttgtgttatatgtagattaacactatatatatatacatatataattatataatgagcattgctatgtagtgttagttagctatattcaatcaaagttattattataaccatatacttaattgtactaataactgatagtttaagtggtgttaggcattattggtatcttttaccatttttcgattataatcataggtagttttttaggttaggtatcacttttgctcttatcgttggagtgttttcttttattggcacctagagaaactgtatttgcttatatgagagtgtacaccatagtgttaatgagtattgggtttgagttgttccggtagttgctacgtggatttaagatgtgatttagattgtttgttggttgttttgtgggttgctgtgtgaatttccgtaaaaaaaaaaaactgttttgaaatgtaaaaatgaaaaaactcctaaaataatgtaaacacgtgtcgaactgactatttgaatcatattttcaacaactatatattctgaaaataagaaatattaacaaatttcaactgcattttgcttgtgtttaaagaggaaaggtggaaagttttctcctttagagaagtgctagagtatgtttggttaagctttttgaacaagttaagaacactcactaaacaatatatgggattaaaatgtgcttggtgaaacccaaaataactaatagttggaacaatttggttcaaaaaattgacacctatgtggaaatctcctttagcttttggctttgaacaagaaaagatcacccaaattagtccatttttgccaagatgatcactgctttagtggcctatcttatcttattccccatttgtaatatagcaaagaaaagtaactgttttgatggtgagaaaagatttattatagcaaatgtgaattagtaatggtaataagaatatgtgctgcaaatctatgcttaatgggatctaaagtttattgtgttgataccatttggtgactaatttgtccacactatttctctacaatatgcttaatgggatctaaagtttgtctttttattaaatttctttccaagataaatactttacctttcccatctattttagtccacaagcattcttattcggttgttttactttagtgtttctttataatgttcccaatttctgcactttgagaagttgctgtgctttgattccttatgtctgctgatgtttgaatgtggacttttgaattttgtgtctcattttagcatttaaaatgagacaagggaatcttacatcaaaccgagcaggtcagtcttttgttatgtatgagaaatgagctgcaatttcggtttggttattcttttttgttccaaccttgatgctaacctcccatatggtatagagtttaagacatgaggtgtttactcaatgaacaatcctagaaatggggtacgaagaagtctttcgattcttcagaatagttaaaacagttgtaagaatgaagtgaaacttaattctaattcactcctttgttatggcaaaagggcatagtgaattcaccattgctcataatgtcatctcaattgtgcaattcctttttattgagcattgaattctcgagaactagtgtaaaataaccctacaggcattgttagaaatcttttacctctatggattttgtaaccaagatttatctcaagtggataatcatggtcaaaatagactggttagaagtcatatatttgagggctaattagaatttttgcaactattaccactactgcatcatgctaggttaaaaaaatttcccgaactatattaatagtgtggaaatataagtcttctgttaagttttatttaagtgactaacaaaatgttgatgtgtaaaaacatcagaagaactatgcattattcgggagaatttttaacgggcaaataaaatcagaagacacggtttggtagtatagcctataaaagagctaatcaagttaagtttatgcttacatagtatgttatgagtagagtcttaagaaatcaacatactaagttatgaacttaccttcactaggctgttggaagataatttcgacgaaatttgctgatgatctgaatgttggtttttctcagttgcttgttgccgggggcggtatgtacatcgaggttttcaacagaggagtaattccactagcttatggtatcaagaagaagaacaaagctggagaaactaacacttacttggatggtatctatctcctctttacatatttcactaaaccagaatccgttgaagctttcgaaggggtgcttaaaaccgacgacgatgtcatccgatcaatgagcttcaaaataaggaagaggaaatattagttacagtttaatgtcattcctccaattcacatttgtgtagcctttttttaagagagaaaatgacaagttttggaagggaaaattttaatgttctatacttctttgtaatttcatgttgatctaatttccaatgccttgttattaagattctattggtatttttttgtaaacataattggattaatgaaataggacaaaatttgtaattgtttaaagtggtaaatttgaatcatttcattcaagaattgagcccaagtgagtacatattggaactcatttctttctttttagaagaaattacactttatactttttttatattgtcctnnnnnnnnnttaccttcttttttaaaatttattatttttacttctttttttaa

SEQ ID NO: 61726 - DNA, 1311 bp, Cannabis sativa
gaaacaaatgaaaagtggtaactggaattcactaaatgcatttatacctaaaaggagcaattcacatgaaaagaggatgggtcgtccacgatcaaacttccagaaacacaagtttcatccaatggatggggagttcaacaatctatgcccatctccgcgattaatgctccccaaaatcaaggcattaatcaatgatgaagatgccatttttaaattttcatgcgagaaaagtgaacaaccgtcaaaatatagccgtttttagaaagcaactcctcgatggccatgtcttttgaccatcatgcaattaacacgtggatgtactacaatcaaaaatggaagtcacctttcgcgatcgagtaatagctaaaaagtcacgatattatctttcatcgtccacatgtccatactgaaggagtgaaacaaacttccaccatatgcaacattctgtaagcttaagggtaaatgttattcgtgtttccaacagtaaacacatggaatttaggttgacatcaaaggcccattagtaggccctcaaagaagataaagtgggccaagaccatttggacaggtccttccaggaacatattctagctctatcaccatagaaccttttgccattgaaaactcatgcctataagcaagtccggtaccatgaggacgaacgggtaagagagcatgttttgggaagactaattcggtttccctttttattcctgtgcccaaataaggaaataatagttgtcagatctcgggagaggatcctatcatgctaaatggggaaacttcctaaaataaatatcaagcaattaattcacagttaattgcccacaatcaaagcacaaggtgttgaccaaatccaactaaattcaatctgtctagtcaacaaatcctctcctctgtgggctggacttcacgaagcacaagtgtgttattcactgtaagctccctaatagagggaaaaaggaaactaaatgtaattctcaaactactataaatacccatcaaatcctatagattaagggttgaattctcttacaaaacatactcaagcaaacttgagaacatatattcattatactcctaaaggcttttctagctaaagaattattaaataacactaacttgtgggctaaggctagttaacgccccaaccacgtaaaaaattatttgtgtctttttactttttctcttttaattatttgtttcttcaattcttattatttataatgagttttcaaaaatctcaataatcacacaagatatagatcgatctactattgatcatctttatgatatgaattagatctttat

SEQ ID NO: 61727 - DNA, 508 bp, Cannabis sativa
gatcttccaaaaacaaccttggaataatctaagctttcttcctcaccattgcttaaagggcacacattagtattagattcagatggagagggctgcatttttaaaggacaatgttaatagtattaaggtagagaattgatagaagaaagtagtattacaaaacttagtgctatcccactattgtatatatagctactaataattagtgtaaataaatacaataaaatcaaaacctgtgattagtaagcattaatgacccatttattccagaatccttcaaaaaatagaaaaattaaactttctaaaacaatttaatatttcctttcctaaaatattaacaaattcctttgttgtactaattcttaattaagcactattattttacatattgattatattcaacctatattgaattgaaaattacttaacaatcaaattctgtattatgacaaattattccttatttattgtgtagaaaaaacaggttgtaaactttccaaaaataccg

SEQ ID NO: 61728 - DNA, 599 bp, Cannabis sativa
tttaatataaaaatttaaattctgagctattttgattagtaatctcgattaggggattagggtttcataaacattttgggtagcgtgcctaattatttatggcgttacaatataaactaccgacaattaatcttgacacgtgagttatatattggagtaacaaaaattaagatttatattgtataaataaagaaaaatacatttataagtagctcagttacacaaatcaaattatactttaccagacaatattcttttatcagtgtttcattttaagtccacttctaaataaattattagttgaaaattcacccaaatgacaattaagtttagactaatttttatttttattttttacttctaaattaaaaatattttcattattatacacatgagatattgtaagtatgcaacttatgatcaaccacacgatgctcagtacttctgtacatcttctctacatatattcagtacctgtacttgacactgtgtgcgtacaacatgtagtataacttagataaaattagatcctataagaactttgtttttcgttgcaatgaaactaaggattaatattgtaactttttcatctcttttga

SEQ ID NO: 61729 - DNA, 1874 bp, Cannabis sativa
cgctcttccgatcttttgtcatttaacaaaacagagggtccaatcaataacttttgcaaaacacagggtccaaaatagtatttaccctactataaataatcgtaacctatttctaatttgatgcatattataattgattgcatttacagttttcgaatctaatgggtgactcttctccaacaaaaagttctccaacttttaaggtaaatttgtttgtgaattttagtttgattatgttcataaacaaagtacaagttttggtactatcatgcttttcattagtatcatctatgagattatactttaattttttattgtaaggccattgttattatgatggacaaaaaagaattcttatgtctagttcaatacattaccctagaagcactaattaggtacaaagttacaaaaaattacattaaatgtaattatagtttttctttttcctctatcaccgcactagagaaatggaagagacatacacaacctctttgtattgatctcaagtccaattttaattttatgtttggtacatcattatttaatttatattgtaggtctatacttataacatacacattctttttatttctttaatatttgcatgcttcaatttaactttacaagacacgacggtttcaatttcatttacatatttatgagagtaagtcacatatttggcattgccatgactactcacaagctatagcttgatttggttatagtttttgaatccacgtctcactgaggaagatatgaaatggatttttaatgtcttcccaaataagccattaaattcttgttttgttgtagagtataccaatttcttaagttcaaatttattattgttactatttaaattttttaacgtgggatcaaattttttgcatcagtaaatttggtacaccttacaatttaaagaattattttcatgtcaagtttagaatatgttgtattaatttttgtgaatcatgcttatgctactattacaaaattagattttagaaacacttaattagtaacactttaaaaaagtcttgcgattttgtttattttaagaattagagacagttgtagaaaaaacattattaaagacttgttccaaataaataaataaataaatatgttactaaattgaacataagtcgacactttctaattaagtgttgttgtatattgaaagatagaataatagaaaataacactttgtatcttgtcttagtttaaaaataaataagtataaaattaaattatatatatatttttgagtattgtttcaactatgtgcctatgaaattttgaaactttaatttaaaagtattaataagaatttcatattacacgttctcgacataataaacttactactcatttactaacttctatcatttaattgttctatgaatattatattttccttcttgataacttagtaaattgtttgccttgcatctgtttttctttgagataattacaacattatttagttgttttaatatatctccaagtttacctaagtaattgttaatattgtaattcttatatataattttttaataatccttcatttagtaaattgtttaccttgcatatgtttttcttttatttgatattttactctttgtcttgtggttgaaatgatttttttgtatcccctttcatatacgcactgaatattaattatatactatatatatgaacatcttaatattttaagtttacgttattctaatgcagattttttttgtagtcaatcagtaccacatcaacaaatatagagctttgattaactaaacaattcaagctttgaggataacatcaactacttttcatttttctctaagctttgtaattagatatatatagttagctaa

SEQ ID NO: 61730 - DNA, 3308 bp, Cannabis sativa
  modified_base (263)..(263): a, c, t, g, unknown or other
tacacttatttaactaaaaaataaattatggtttttcgtttctaaatttatagctataggaggttgtattttttcttcggacaagctcgtcagccttccctggtcataggtgtgacttggtcgggatagtgttttactattgcgattctatttttgctactgtgaccattcttatttttgtgacatggtcttaagtgttttagccttgtctctgtgacatggtcttaagtgttttagccttgtctctgtgacatgattttgantgttttagtcttgtttgtgtgacattattttatttgttttatttcattgttggttcttatttgttcttcgatgggtcgctagctatcaaatcattgttagtacttgttgggaataacaaattctctgcgactgaaggggttgttattagtgcatctacttactttacacaatagttgagtgctcaagctactaggttgaatgaacctgttgcaatagtttctattgttgtgtcttttgagcgatagatgaaactaaatatatgtgttcttaaaattaattgtgatgttgcaatcttgtttatctgattttattttagttcttttgtcaaatgatttgaaaattaggcgactgactatttgactcgtttttctaattctaatcttggtcgtgttttcaacatgaaaaatgtcttcattgggttgcagactattattttggctaactgctattaataaaattccataatttattaaaaaaatattaaaaattgaagagtagtgttaattacaaccgtctacacctgaaattatatgttaaaatatttttttcttagcaatattcgttatagttataatattattctagtaaattttttaaaaaaaattgaataatttataataccgaaaacagagtttatgatattctagtttaccacgagtgtttaaaaaacttcaaacttatttttcggtactctaaactatttgaaaattttacaagaataatattgtaactataatgaacaccgccataaaaaaatatttcaacatgtgtttttaagtacaaaaattaactaagagattgtaataagaggttaataatagcactctttaaaaatgagaataatcacattatatgctattttagagtgtttttattttagagcattatatgtttagctaacatgtaggtgccttttaatatttcttgcctattttgagcatgtgagtatttttaatacttttaaacttatttatttaaaattttttagaatttattattcatgttctatatttataaaatataatttattattttaaatatattttattaattgttttagattaattatgttagaattttatgatatatttttcaaaaaattaatatatagtgtaataattttttttttgataaaataaaaaaatatatattgttgatatattttgaaaaaaaaaatagagaagtcaaattagagtattctaatattatagtctagtgtgccacaatttatctcgcaaagagaatatcttaaattcgaatcttctataattttaaaaatatatactaaatactgatttggtacatgtattttattgaaatactaattttgtgtattatagtatacttattttgataatttataatttaaaattatatatataatgtatattatcttaaaatattttttttttaattttttctcccacgtaagatttatcatcttctattaaaaaaaatattttaattattgacaactttaaaaattattcaccatgatcatatatcacattaaattaatgacttttaagtaaaaaaataactttgttctaataaaaaaattaaaaaaaattcatatgaccattatttatattgagaacacttcacataaaattagtcttgaaaattagactacatcggatatgtggcaagactactttaatagataactccggttagagatgctctaaaggacacctatggtacccaatacttttatgatattatcattattagtacaattcaatatcaaatctcatttatattactttaataaacattataaaaaaccgttaactaattataaaacgtaacttcatagtaatactatatagtatacacttggtgctacataattgtgctcggaattttatccagttacttaaatgtaacacttattttcactgtaaaaactaaaagtaaatatcccaacttaaaaagttaccatttaattctctttttgctttttttattgcttttataatttctagtaaaagtagctctaacttcttttatcgttttcttcgcatttgtccccctctttagttgtaacatggtacggatgtttgggtccaagttgtttaataatgacccctagttaaaaagtaatactacaattaatttttctcttaaataaaaacaaccacaattattaatataaatatatagatgtggaaatagtagaggggtattagtgacataatagcaaaaattaattgctatgttttttccctttctaataaaacaactcttatatatgtttgttaagttataccatttgtaatgaaagatttaaaatttagagcttgatacaaaaaataaattcatcttattttggataaataattaaaataatatagattatcaattattaaaattaaatctaaaaacattaatcatagttagagtacattaacatttaatttaagtacatacaaaagtggcaaaatccattataaggtcaaaactaaccaattgtaatatggggaaatcaccttaaatcaaatatcttaaattcatttgagaaaaaaggacatatgtatatatatatatatgaagcttttacaatgcatccattaaaataaatctacttatatatttttatttattttagcatttgaaagaattttttagtttaatttttttaacgattatttatgttgtaattatttaaaacattttgcaaaatttaacatgtcaaacacatatttcaaacagtctgttgcacgtgactcttttattttatacgagtgtgaaatagattgtttgaaccctatttttagtgtgttaaatttttttaaatttttttaaaattttatataatattctatataactacaacataaataaaacttgactaaaaaactctcatagaccaaaacaaataagaaatgcatagtacattatagaaattgtatatcttaatctagaaacggctcctcaatgggataacaatttgacctaacaatgagttattaaagtgcacaaattgtagcttttaggcagtgataaacagtggagatatttatgggtgtaaataattggct

SEQ ID NO: 61731 - DNA, 1226 bp, Cannabis sativa
atagacaatgttatatataggataagttttagagtatggttggaatgaatttggtgtaaaattttaacaaatttagcattttagtgttccattggagttggcttaagaacactaaaaaaatgagaaaggcaccaatggcttagtatgcttttacatgtcaatattgttattggtttaacttagtattgcgtcatagttttttaataaatataataaataatttttaaggaatatagctagctagccaattacaagacgacacgtctagaaggtcctagacaccactgatacccaatagcaatgctaaaaaaaattaaggagttttgaaaaattgggaaaattgcagcaaaagtctttaagaagtttactttgatgtaaataagtcatcaacttcaaaaaataatggtaatagtccccaagctcaagattcttataagtcttcgttttagttgctccaaaagtgttatgtgttgatgatattaaattacggcataagtaaaaaattcactttgatgcaaataagtccctaatcttgaaaaattacagtaaaagttcccaagctcaagatttttattagtccgtaagtatccaatttaataacttcatttgtagtttttaaaattgccaagtgtcaaaattttatgtccacgtcataaaaaaattgtttaaataataaaaaaattattaaaaacttcaataactttttttttttcattttcttttattaaagattaaaaaaatatgatacataaaaaaatttataaacttctacgatttgtcacccacccgtctcgacaatgaaggtttattgccgaccattactatttcttcatctccactttcttccttgtctcatctcactatcccaaaaaactaattaagcaacagaaaacgaagagaagtgatcggaatcggaatcattatcaagattgggatcagtatcgtgatcttggagagagatgaagttttttatttattttttctttatgtttccaaaaaatcaagagacatggatggagtatacggtagagaaacaaatatatgggtagtggtgagtggtgagttttggtggtctactctttgacatcggtttttctgattcaaagtttacttagacatattttttctttttttttttttttgtttttagagcggcccctcttgctaatggaaattggagagttttagtagagcatatcgggattgaaattgaacgagaagaagaa

SEQ ID NO: 61732 - DNA, 665 bp, Cannabis sativa
gggctgatcaaaggattagggttttgaaaaaaagggtacttggtctgatcaagatgaacatgtgaaaattatgttaatgatgcaatcattgggcataaccctttttactcagtccaatcatttggattgatgtacccttgtactcaaaaatgccaaataaagtatacatagattacttagtggggctttaagtttttgactttattcaactgggcccctttactaataagagcccacatctctcagcccaatatccaaccctaccatttcatcatcttcatttctcatccctgtaccacccgaagccaccataacccagccgttccctccatccgttcaaccacgaatccagcctccaaacccgtaacctccaccgtgactacctaagacatcagctcaccacttccccacttgactgagcttcaacccaaccatgaaaccgagtcaccattcgactcaactcagccgcttcgttcaacagcagtagcaccccggaagtcacccaagcactcaccattcgaaccatctccgttcactcaaacagaaacccagtcgaaccatcacctcgcaccagcaactcaccattcgaacctaacccagttgaattccacttctgttcgcgcacacacagcacgcatcaaatctcacatacagccgagccttcc

SEQ ID NO: 61733 - DNA, 847 bp, Cannabis sativa
  modified_base (605)..(606): a, c, t, g, unknown or other
gtaatgctcaaatgagttgactttgtatgttttggcagcttccacaaagtttatagtgagctcatctccatgtccaccaaagtttgatttgatgttgttaagcaagtggaatatgtaaagctctatgaaagtggtctgggtaaatattcttcaccgcttttttaatacttttatgtttgtctgatattattgtaatcctgcatgttaaaattggttttagttatgcattacatatgtatatttgtcttatgtcagtaactagtttcttcaataggattaaaagtaattactgataattttttttactgaatttgaaattaactgtaacttgttactattcaaaaaatatatatcatgtagatatatatatataaataaacttaaaaccagtttttgatattgtaccttctctatcaccaaatgtttctcttatcttgttgaaaaaccaatcccaagagtcatcattttttaagtcccctattccgaatgccaatatgaaaatgttgttgtttgcatccattgtagaagctgaaaataaagttccgctaaatgatgtttttaagaatgttccatctgtgacaatgactggtctacaatgtttccannctcttattgaatttgcgaatgctataaataagtattttgaaacgattttttgtatttgtttccaagtgtgtgattgttcctggatttgatactttcagcatgtgtaggtacattggtagctgttgataagaatacatcttgtctccctcttgccaattctaatgctttttctcttgctctccaagccttttggtatcccattgacaccccataatcatatagtgtgtccattacaatgtct

SEQ ID NO: 61734 - DNA, 2392 bp, Cannabis sativa
agttgctttacgacatgtccatctatatatgtgatccgaataaatatcactcacacattagaagtatagtatgtagtaaactgtacttaacagttccatattaaagattcccattactttaatacaataccaacttattttattcatatcgtataatattaattctcttgtacatcctcacaagattataccttctaaatatgaataaagaatttttaaatatttaataattatactcttataattaatatattatttatgttataaatgtatttcatatattctctaatatattatctatttattacttacttttaggtaataaatcccaacataatcttccccagaacatcgtgcaagaggcccatctagaggtgttctgcaaaataaaaggtataaatgaaagttagaaacatatgcaaaaagaaaaaaacacaactaactcaaagatagttaaaaatagcaacaagactcaaatctgaaagcaaccattgactttgctatattttggttttcctcgagcaaataaagctacatccttcatgtccaaaaagctaccatactcctcgaaacctagataggacatgaggaggaatggatctatcttataagacttggatggttgttcaaagtgcaagcagagtcccgaaacgttattggctttgcggtgctcatcataccactacagcacgtcgtagctccagaacttatttgtaatatggtaaatttcccatatggatgagttataaatgattggggttgacctctttggatgactcctcctcggagtggctgctggagcaacatcctcaactagctcttctgctagttcccctactccgattgacttctctgggaggtccactacttcaagataaaacttgtcatcggacatggaatctatgtgtaaagaaaacgagaaaacccaagcaattaataccctaaacaaaaaagattagcaagagtacgggagagtcctcccccaaaactgcttggagaggtcctcaccggactcgtcatccagaagtcatgcctttgtaaggcaaaacttctggatgactagattgggaactcaaggataaatgacaaaagtccaaaaatttcagtcgaagtcctaataactttggaaaaaggggtttaagatcgattttgcacacatgaaatgcaaattcaattgaccaaaaaagaagtatgagctaaaaaccctagattttatctacatccgtatgatgacaacattataacccctataagcccaaaaactatacattcaaactccacattcacatgtaaattgttcttcctaaaaatttgagcatgcatttccagaaatcagaaaaattatacaatttgaaaaagtaaggaaaaacttacttgaagaaggaggtgatggagtgcgacgatgactggccttaaaatttagcgcccaactgagaacttggtcagtgctcgtttgaatccaatggcttcgacaactgggggtggattactatgcttagtggtggtgctcctgggtactctttggctcaattcgcagaagatggtcaataataatgtcgaagggatctgcccaaagaggctaataatatagactcgtggactaaggatcattaacgcctaaagcacgtaaaaatctactattcatatcgtttattacttgttatctccttcattctctcaaaatatttagttttcgaaaaactcagtaaacattttggtgctttcattgagagctaaaggaagcttagtggtgtttatcatccccctatcatggtgaaaactcgacaaaaatctagtaaaagaacaccattagatacggttatggaggaaagcacttctcgtgagctgacacacagatggaaaatgatagagaaggtgttgctgctaccaagaaccaagagaagaatgcccttgctcggaatctagagacgaacgatgaaaacattgagaaggtcacgaagacataaagaatggtactataaggatggttatgtatgacgagcacgaccctaatttggtgtgtgtagctgaagagttggcggcacgccaggaggccctcgtaaaggaacaaagcctcactactaagatgaaaaggaccatgtagcaattacaaaacaagtttaatggttcaactaaaatagacggggagccgtctatagaagaggtagctgaagcgcgagcctagatgcaaactaacgatgaggcccaaaacccccgcacagacaagggtaaaggtaaagtaggaaaacccttacgcagaactactcctaaaccttgttagaaagatgagccgccaattaggcaaccctcgaagacgcaaaaagccatcagcgccttcgggcctagatgcccttctgaccctcgaaaaagggttgcactgaaaggaccaaca

SEQ ID NO: 61735 - DNA, 599 bp, Cannabis sativa
caatcatcgacaatccaccgcgcaccactgcccagacccaagggccaccaccaccaccgccacctgctccttcttcatcctggaatccgttccaaaattctctaaattcatctcttactgtcaagcttgacagatccaatttcttggcatggaaatcccaagttatccctactgctatcggccattgccttgatgatgttctacttactggtattcctccaccagctcaacttgttaatggtaatgtcaaccctgaattctcggcctggcgcagaaaggatcaattgctactcagttggctcctatcttcaatgtccgaaaccattcttggttctttagctcaatatgaatcctcattcacggcatggaaagctttggagcagagattcgcatctcaatcgaaagcaagattattgcaaatcaagtcccaattatcaacaatccagaaaggtaacctttcaatttcggattattatgacaaggttaaagttcttgcagattctttatccacagctgggcatccaatggacgaaagtgatttgatcatgcatcttctcaatgggttagggcctgagtatgaccctgttgttgttcatgtt

SEQ ID NO: 61736 - DNA, 1120 bp, Cannabis sativa
  modified_base (248)..(250): a, c, t, g, unknown or other
taatctttaatttattataaaaaatttgtttcaatttgggccaactataaataagaataatttttaaattatagggggtatttatataaatataaaaaaaataaagctagtttgcataaatatgataataatatttaatagaaaaaaaaatatggtatttcaaataaaaacttaacatatatggcatatgccactttgaattaccataaaaaattaaaattctctttatattttttttttaaaaaaannnaacaaatgaaactacagtgatcgtcgaagttgtcactgatgctagaaaaagcgtcgcagtagttgccggtgccaaaaaaatcgctagagttcttgttggcgccgaaaaagtcgtcgaaaaaaaaaataccaagaaattagtttttttatgtttataccatttaagtacttaaattatttataaatacttaagtttatatcaataatctttatattaagagtaatttacagcataaatatttaagtttaatttgtgattgcgaataaatacctaaatttaatttttagcaataataatgcttaagttatatttctggaactcggtaggtacctaatcattaaatattaagtcattatccgcatgtcatttttttattgatatatttaaattaattttaaaaaaaaattaatgacttagatcaatcaaagattatcacgtgacaatttacttaacacttaacagtcatgtacttacagaagttctaaaattataacttagatattattattgttaaaaattaaacttaaatatctatgttgtaaattactcttatatcaatatcaatctaacagtggtactagacactgaattctattttggtttaatttatttttgttattattaattttgatttatgacaatgaagtccattctagaagattttgacaccaaaaccccaaaaatggtttaggacttttatcatcattattattatcattatatatttcaacatcaatcctagctttttgtctggtattgtctttttcaccaagttgcacaaacacaaatcatctagccgactccattttggtattttttgactcattaatatcacaaaatagtaatgataatgaggcacaaatatatgga

SEQ ID NO: 61737 - DNA, 1309 bp, Cannabis sativa
  modified_base (27)..(37): a, c, t, g, unknown or other
  modified_base (175)..(177): a, c, t, g, unknown or other
aattgtcgttagatagacacttttaannnnnnnnnnnatatatatatatttatataattggtgagaatctttattaaaatgggtggggaccaaagctactatcatgcattaatattagagtaatttacagtataaatatttaagtttaatttttaattgtaaataaatacttaannntaatttttaattgtaaataaatacttaagtttaatttttatcagtaataatatttaagttatatttttaaaactctgcaaatacttggccgttaaacgttaagttatcatccacatattattttttattagtatatttaaactattttttttaaaagaaatttaatgacttgaaccaatcagaaattatcatgtgagaatttacttaatacttaatatctaggtaccttctacaattataatttaagtattattactactaaaaataaaaattaaatatttttttacaactgaaaattaaatttaaatatttataccctaaattacttttaatattaatactttagatatatatagggactttaatttcattaatgattatataataataaaacacatttatgttttcaatcaatctttcatagtagattctcttagccttaattattattttttattgtgtttaattattctattcctttttatataataggtcatatggatgaacttttattctatgttagatctatatattggaacccactcatgactcatgtgatgttatagattatgggacccactcatcaaattatgattcatgatttcacaagtaaattttagtttgatttagacattgttaattcatcttaattaaattttgctttctatttttggaaattaaatatggtataaaaaactaattattaaagttatagggacacccctctaatagggtattttggtagaccccctctatgtttagacatctaataaaattttttagtctaacttttttcatgatcatttatgtaatagttatttagaattacttataaattttcaaaaaattttaagtaatttacaatattaaaaataaaattaatatattttgttacacgaacaactctttttttttatacgcttagtaagtaactatttaaacattatttttgacattgtaaactattcaaaatttaagctttttaatacatcatattttcgagctaatttattcgtacttacatgttatgtttttgcgcttgtcgtgtcgtgttatgtctaaacctatatttttttcgtgttgtgccgtattgtgtctaagcatatattttttttatgtcatgtcgtgttcg

SEQ ID NO: 61738 - DNA, 4068 bp, Cannabis sativa
gaacttacaccttaatgagtgcaattactcaccctgaaaaaatgatcaatcctcattttttttttcaaaataatttcttaagtgatcactttttatactaagtttcccttacaattttctttttcctttacaaaatttaaaaattccacactttaaactattattctttggagaaatgctaaagagaaactgtctaacaccttttacggtatcatattattattgatgtaattaagcatcgagtctcatataatttaatataataatttttataaaatataattaagaaaccaccttttaattaagcaccactaattgaaaactcaaagaaatttatgccaaaacttcttaaaaataataaaaattaaattgacacccacattttgttttgcttatatgtttttttgctgataatatgtttgttaaaattgtcaataaaattaattttcagtttgaaaactcgacccttaatctaaaatcgtgttaaatgcatgaggtttttctttgagaaaaaaataatagtaaaaaaagaaaatgttgtaccttattttaacatgtgaaataatccaagtcaccaaccaccatctttatctaccttcataaatggccacaaaaaagtctccactttctgtataattaattaattaattaaaatgccagactcaaagtgttaaccaaatacaatacatcatcttgatgcaaatattggacattattaaaaataaaaatgaaaaaaaaaaatataataataattacttaaaaataaaatagtagataaacttgagagaaaagcttctttctttatttatttatttatttttttttaactttttggcttaggtatgagaagagatgttaaagtaaaagttggtttgatttgtgtttttggctttaagttacagataaaataaatagtaattacattatataaaccataattagtagaaaaatccaacacaagataactaattaaattaaccaactacagtgcaataacgacttggcaaaaccaactaaccaatcccaaagatgctttttttttctttctttttctttcattttattatttttatttgggttttcaatgaaattgacaccccattaaattacttcatttttttattattggctagtttaacaagttatacagcaattaaaacatgatttatttatttctttctttagtttcatttcacattctaacatattgcatatatgtatacattgatatctcataatatattaataatcttaattatatttttagttctccaatctcataaaactcattacaaatacttaatagagagtggaatctcttcattataacaataataataaagtgcgacaactaccactattacaaagtcatatatataaattaattaattttttattgtctttcaaatattttaaacttttaaaaatttattctgaactaagaaaattattagacttgaagttttgttaaattctcttcaattttactaacttgacaattgtttatttactaaattttactctttaaatttttatgtactaaatcacacctttaaattttaattttaatatgtataaaattgtattccctaaattttcatccacatcaactttactcaattagtaaaatgggacagaaatatcttccaatactgtaaaactattttaaattttttaaaaatatactgataatcttaaataaatacaaattaaatacaagtgaaaaaattaaaactaaatagtaaaacagataaaaaacataacactattttaaaaagtatactataaaattactctataattttttagaaattaatatagcttaaattccttatttatacggataaggtcaattaccactttttttttaagaattaaagaaaatggttggaaagggggatgcaattgcttctaattctaccatagttgaatatgaaatatcattggcttaattaaatcctttttatcattattttttttttttaaaaaaaaaagacataactatttgtgtttaaataatcccaatcacatattaaacctttttattcttttggttgttgtaacttgtaaaataatcatacgcgtcaagctgaagcacaaagctcagctgactattcccatatgtcggttctctttttaaaccccataacttccgtatccaacaagcaatccaacacaaaaaaaaaaacacaagaccattgctattaggtatcagtagtacttagttttttctcaacatgtcgtgttgcgattgattagtgatactccttaaaaattattatattaaattatatgggactcggtaaatatttagttagactaatagcgatattaacacataaaaaagtaatagactttgctccttttgcatttctcaaaaaataacttagaactttcatcaaacacctagtaatatctagcagcagccattaaccaacacaaaagcactcaagggtattttcgtaatttcacgtttaatttgtcctccccctcctggcttgcttgcttgctttgctgtgaagagggtcacgtgcctgacacgctagctaactcaaaaaacagaacacgctccactgacacgtggcggtaattttaaaacggtgtgacctgttacagtcggtaatcaccacgcgacacaccaaaatttccagtttccgaactcatatataataacttggcctttccaatttcgcgcattaattaaaaaatcgtgcgatatattatttcccgttagattcacaagcgaacccaaccagagaaaaaaaaaaaaaaaaaaacccaaaagaaagaacacagaaaaaaactaaagaaaaccctaatatttggttttctcctcgtttgaatctcagaaaccctaattttgattctttgcgagtttggagatgatcgtgaggcaaaagatggtggtgcaggcggagatcatatgccctcagagcagcagtatcccggtgctcgataagtaccatcttcgtgttcctgcgcaagaactcgttgaattgtcttcttcgcctccgccaccggcttccgaaatcgtcaccttggaatcggtacgtctttgttttgtttttttgttgttctctccatctctctagattctgttatttttttttttttttggtttggatgtgttttgttttggtgagattttgttgttcagagttcgcagattttttttttttttttggaaaaattcagtttggtgttgcttagaattagatttcagtgttgaggtttgattttctttaggcggtgatgatggtttactattcgttaacgggaataaaaaaaaaagttttcgtttacttttgtattatagttcgatttattggtgggattttaattgttatgagctgtacacgctttccgtgtttaatttgcgattggatcctttatctatgatttttacgatcagattgaggaaattggtcttaaatggtgctaggtttatgttaaggatactttgtaggtttttgattttttttgatctattgtttgattttgaatttttttcttaatgtatagttccttttgttggtgtttctatacatggatggaagtcgtggatgatttttccatgtttgataattttttgtaatagattagagggtcttgagagggggggaaagtgttcttcaataataaataggagctcttccataccaaaattcgattccctttctatactattgtagttttgtttatttgtttataaatatgtagacgaattctgattactttgggctgtttcattaggttgctaattgttcggaaactattcaaggtgatattgttgagacttcttctatagtcaagtttgttccaaacattcgttcaggtagtcatgctgacattggaccaagagattccatggatgatgaacacatctgcattgatgatctatctggccaccttggatctcaatttcgttgtccaatgccaagtgctttttatgctgtgtttgatgggcatgggggtcccgaagcagctgcatacatcaagaggaatgctatgaggttattttttgaagattccgagttgccacaaacgacagatatcgatgaagttttc

SEQ ID NO: 61739 - DNA, 799 bp, Cannabis sativa
aggtgtgcaatattcctgacgacgtatcaggcgtaggtacgggtgtcagtgacagattgaaactgttgtaggatttcttcctaatgactcgggcgtaggtatgggcgtcagtgatagaatagaaccttgtagggtttcctcattgtcaggttatggcatagaatgaaactgttgtaaagtttcttcctggcgacatattgggcgtaggtacgtgcatcagtgaaagaatggaaccgtgtagggttcccctattgccaggttatggcacagatcgaagccattgttgggtttcttcctagtgacgtattgggcgtaggtacgggcgttagtgacatatgataagtaccaggcataggtacgagctcgtctgattagatgatgagatatattagtgccaattgtggcatggactcacctgattaggtggtgcaatgatattatatatgatgttgcattatgacacgggcttgcctgattaggcaatgtaaatatatgagcatatctaattctatgcatatggctggttatattacttactgttgaatattaggtttaatcattatatgataatgaaatgtatcgttagctatttaatgtacccttctttattacttttctggccgagtctatgtgactcacgggtgctctgtggtgcaggtaaggacaagaaaaaagttaaaacatccatgagatgacattttctagcaatgtacatattgaccccaccgacttgtgtgccgagttgccattaagttcaaggtcctatttttactattttggaaaatacaggatctatttt

SEQ ID NO: 61740 - DNA, 863 bp, Cannabis sativa
cacttaatctcatttacatctaattaagagatggtaatagtcatggggtactgtagggtgttgaatttcaaagtgtgagatcttaaatactataaatagagatcttggttcatcctttgaaaaatactcttctcttctatctttcaaacacaaaactagagagttgtaaggcgttaattctcaaaagtatttccacaaagtcttaagtgttttatagagagggaaataattttcttagacaaagaggtaaaaaccttgttcaagcttttattgatctccatctccaattcaagtgtttgttcttctatctctttttattttgttctattctctagttttattctcttcttctcctctagacacatatattatattatattctactatataatattatatatatactatatgcactttttacatatactatacatttttgttaaactaaaattaaaaataataaaactgaaatgaattacctatagaaaattctggctgagtcggggacaatgtcgctttctttaagacgtttcacggctctgttcgaagtgtgtacgacagtctagcaatcacggcgtctccaggataaaacagtctctacatacgtacgatatgttctgcaccgaactatatcgctctattacactctaaattttgctttaagaaaaatcgtagggtttgatgttgaaaaggatgtggtctttcgttgttttatatatagggaactcgatccaagaataaatggtaagaaaataataatattatcgtcgaggaggagttggatcatggcagtaaaaagtggatcattgactgatcgcattttactataacgttaaaattaattaataaataagtaaaaaata

SEQ ID NO: 61741 - DNA, 1093 bp, Cannabis sativa
  modified_base (135)..(154): a, c, t, g, unknown or other
  modified_base (202)..(214): a, c, t, g, unknown or other
tatgagtcagattcggaatttttattaggtgggaacttaattgttataaaaaaaaaaaattatgtctactctacaaaaaatcttacttttagtcacaataaaacttgtggttaaaagtgaaaaaattgtgactannnnnnnnnnnnnnnnnnnntgttgtgactaaaaggtccgtggcaaaaagtattagtcacaaaaattnnnnnnnnnnnnnactaaatatatttttaatcacaatgcttgttgtgaacaagtaacatttagtaacaaaaaaattatattgtgactaaaaaattgccactaaaagtgacagttttttataacgctactttatttaatttatttaattatattgtgtccatcactgtttatgagaaatatgctaaaggatgccttagtgtcaaagtgtcattatgttatatattgatgcaaattaatatattgagtctcacatatttttatttaataatatgttcatttttgttaataattatcagcttccaggaaagacaagacaccattagaagaccagtataaaagaagcttgaaattaatgcatgtagagccaactatcgaagactatatatgtgtataagttgaataaaaaatctaaattattattatattatgttatacataatttttgaaataattaacggtgaactaggatagagacatgtgtaatattaaataaacattgtagaatgtatttataaaatatcgttaactaatcacaagacgctacttataagtagtgctaggcaccaaaattagtagaatgcacactatactaaacgatatttggtagaccgtataaatgtcgtattattttaaataacaaatgacattatgttaggataaaatattgtattgtataaattattacgaccataaattttaatacagtatgagctacgttatattatttaatatgtaacaaattattcgtattggcttttattataatgtttacaaaagatctgggtcaactctggccccaaccctagccccagacccgaatccagacccataccttgatcatagacccggaccccaaccctagaccctaaccccgaaccctaaccccagacct

SEQ ID NO: 61742 - DNA, 881 bp, Cannabis sativa
tgtcaaaattaaactaaataataacataatttagaggtattatgacaaaacttattattgcatttgttcgtattataaattatagaactcggggtcttatttatactattttaaaaaatacaaggtctattttatcatttaacaaaacagagggttcagtatcatttattttatcaaaaaaataaataaataacacctaaggttgttgtgtagttattgctattattattatctttccttcttttttttttttgagggttgtgtaattagtgagttatttttctttagcaaattatgatttttgccttctcaattttgatattaggcagttaaaatttctcttcgaactattgagaatgaaattgttagatttaagaacttacgtccaattttgttcaattttattaatgtaacaattgtacatgtactaaattgtgcctttaaactttgatatctactaaatcgggtccccaaattttaacatatattaaattatgcccctcaaactttgacatgtactaatttattcctttcaaattttaacatgtaccaaatcgtgctcctcgaacttttataacttttatatctaccaaatagtgcccccaaactttgatatataccaaatcatgttccctaaactttcatctatgccagacttttgttagtaaaattagacaaatgttcttgaatccaacaatcttaatagttcaggaaaaaattttaacaattttaacagtctaaaaaattcataacacatgatttggtacttgttatagttcaaaggtgaaaattctaattagcttttttattttgtcagaataaatagtgtcacagtgactagtttcatgagacttttatttctttataatttattcatatca

SEQ ID NO: 61743 - DNA, 836 bp, Cannabis sativa
caaagcccctaactaatttcagcttatgatagcagctttgataatatttgagaggatcatttacctgaaagagaggaattcaaaagaaatatgataactcattgcttctgcaactcaaacaatataaacaacaatctccaaaatttaaatgtgaacaaatcacaacctctagattgttaagaataatatataaatatatataaatttaaaaaagaaatttcttagacttacagagagattagtggagagaaaacaatagggaaagagagagacttacagaggtaggggagatcgagaccacgagagcgtgagcagaagagcttacgcgggcagagcaaaaatctgagagagggagaaagagggttcatcttcggagctgatggaggcacgacatagcaaaacattgagagagggacggagatgattcaaaatcgtctagggttcacactagcagagagagtcgacgaatgatttgctcagtctaagaaatttggggtgagaaatttttggtcagtgaacataagaggatttgcatcgtttggtccactcgcaacttctttaccatcagtttgaaaatgaaagagaaaatgtttgtgatgctttcaaaatgacgctaatcttgtatatttttttttccaagtttttccttttaccgtccgttgtataattagtgaacgatatggaatcgacacaaataatctattatttgtgccattttaaaaatgacaattctatttaatatggcactattcacgtcggtcaacgcgatgaacagtcgcattgaccgacgtgaatagtaaattttgtagtagtggttagtaaatctagatcctggt

SEQ ID NO: 61744 - DNA, 1433 bp, Cannabis sativa
aacaatagccataaggcccttaacaatatgttttaaagattctagtcttgtgcaaagtttatcaaaacaaataattatgatggcttacaatacataaaaaacacaataagaggaacaacaaccattagctgcaggtggaaacttaccacttcatagccacccaatctagtaatagctctccataatctacaatacatgaaattaaagaaagccaatttagaggaagatgaccaaacctaaatacaaataatctaattcgaatgggtgagtaaggaacgtgcttacttaagataattgaggggttccccataaaattttggagttttgaattctaaggcattctcttcttttagagaatctttgataggaagtagtgctccacttagagtgatccaagactcttattggggtacaaattgtatttttacacacaaagttaatatatatatatatatatatattgtaacttctctgcattcataatttaatatcaaaaaaagacaattagccaaaaaatcacaaattcatttatattaaatttatattatatatatttacagaatatgattagttcttacctgtgaactgtgttgttggttacgattgggaaaaaagagggttgatgctgctagatgctcgtagagggcttttattgttcgcaacagactactacttgcggctcaacaaaaaaatccttgtagcatcagctctaacctttgaggagaggagagaagagaagggaggaggatggtccaccaatgtgcgactcagagagagagatagagagaatcgttaacgattgggtagcaagtcgagttcgaaaggaagaaaggggatgggaggtcaacaatggagaataagagaggggagtaaaggtcaagaatggagagggcgagaggggagcgcaggtcgacgatggaggatcgacaatttcgtgcatcgtcagagatctttcttcttccaaatattgaagacaaatgtgaatagtagtaggattaattttgggaatttagggatttagaagtggttcgcgtcggtttgtaactttcaaaatttttttctctgtcagttattaaagctcacatagctttcattcgactacaatgaacagacgagaatatgatttccatttttcatttttgttgttttcattagtctgttgtatttgtagcgtcgttttagtaaacaacggaaataaatatgctttaacgtcattttgtaattgacactcatactttttggacactatttacgtcggttaatgccatgaacagtagcgttgaccgacgtgaatagtaatttttgtagtagtgcaattctgagatagctaggttctagtttagttgtattatttatgctcttcaatctattcgttgaagtcgaccaatggatcttctcatgagatatagattaaggacatggttgttcaattg

SEQ ID NO: 61745 - DNA, 939 bp, Cannabis sativa
tatataaggagtcctctacaccaagtggagctaagagatcttacaagaacctctatataaggagtcctctacaccaaatacaagaggagattgagaatctaagagagagtgactctcaaaaaagaaagaacagatgtaaggaagaaaaaaaaaagagtgaaaagaaagagatatttgttaaaactgtaaaacaaagaaagtcaagatctttacctaattgtcttggagagattactaaatcgtattgtgattagaatcgtctcaaatcgttgtaatcgaaggttaatcatagtggatttggctcgatcttctctaaggcacctcactgaggaagtaacccaatttttaagaattccgtaaatatttgtatttgttcttctcttctctcatcttctctccattaacttcatttgattttgtacatgttttttggtactgatttgtgtttaaatctttatcattttatttgattttgctgggtcttcgaaggatttgtttaactttaaattgaccatattagataaattggtagagtaaaagcttggtagagtaaaatcaaaactttcaagaaagtaaatgtatctaaattacgtggtctattttttttgataaagaaaggtcatattgttgaccttgtgtattgacgtgtgtgagttgtgtatagttattttaatcatcaatttcctccagatagaaatccaagtatatttttttgatgaaagaaagatagaaaaagttggtcttactatgatccccaaaaataatagttagacatgatacaagtacaaatttaaatatttggctcagttgcaaggactactcattacagaatcataggcataaattacaggaacatggatcctttatatatctgtatatccatatattttagtactaagtaaccacagtattcagttttgtgagccgcattttacgact

SEQ ID NO: 61746 - DNA, 1892 bp, Cannabis sativa
  modified_base (135)..(143): a, c, t, g, unknown or other
  modified_base (1237)..(1251): a, c, t, g, unknown or other
ttaacaaattcatatgttctgaacttaaaaagaattcatacattatatgcatataatcatgaaataatcatgtgaactatacaacataaaaaaaatgttgtttcttatctttattaagtaaatctgattatattnnnnnnnnntttatttatggcacaaaacccaacactggtatcatcctttataggtgtagaagatgatggaacacttttggagtgaaataaaatagtgtctccatttcattgctactttggctttgagattacatttatatagtcatgttatagaaagatacactttcttattttaaatatcatagtgtagtctacccctagtcacttaagaatagccaacaaatgtacaaacattaattagtagttcaagctttcttaaggacataagcagggtattcttagatttaataatagtgtatactaagtacatgaccattatatcattataagattgtcttgggacctagtcttagatgggatgatattttaaaatttcgtttgttgtctctaagtcatttctctagaaggactttggtagctactagtaactaatcatagacctaatcatttcatcaatatgcgactctagaattctaaagaggtaagtttgattagaattcaaatttcattttaattatctttgaactacaaatcaaatatttctccacccctatcagttcgcaagatctttaacgattttattaactattttatagtatttgctagaaattcatgaaattttcaaacatttcaaatttatggcataaggtaaatatctatgataatcgtctaagaatcaaacaaattactcctaactacccctgacttatacatccctatgtaaccaagctcctaataagtagatcttgaaatttacggagtaaatttcctacttattaattcctcctcactccaatatagatttgaaattgcactccttattacatagaatattctatacaccaagtatagatatgctataatttatcaattatttcaatcacaacaataattgatcatatatagatggtctacatcgagtagggacaaaattactattttattcttcaatttattttatccttaaaacacttagctatttgtaaataatagttcaataaactaatataattaccaaaatgaacgttcaaccatttaacactgttatccaagctcaaagaaaactatcatttcacttctaataaacatagaagctatagatnnnnnnnnnnnnnnntaacactcccactcaattgcactatcgagttcctaaaatgtaagtataggctagttccatgggtaagctggtaacgaacaagtcaaagaactcgtccaatacaattaagctagagctcaatcatctcaagattgagatcaaatgatctatgatcaactatgtgatactgacttagaaaatatatacgtatataatggtaagtttataatatcttttctactgttaatattatccaatctaatgtataaccgatcatccaatcctaatttactttactaatgctttggaaaagacctttcactcagctaagtgtaagtaaaccttatcgctgattatcacgttagtctaaatctagtacactgatgaatatataattcgaagcatataatcacaactacattctattgtgatgacatcaatataattgtgaataagtatatattcaaaatttaatagaacttatatattaaacatataatcacgtgtaaaatatgtgaacaaagaatatgactaggtcatgatatgatttccgatctttattgaaagtaaataagattataataaaattgtattttatttaagacatgaaaaaccgtgtttttgcaaatgtcagttgtatataagaaaatataaaaactgta

SEQ ID NO: 61747 - DNA, 1510 bp, Cannabis sativa
aaacactatacatggcttcccataaaccatggccgaccactgccattttccggccccaattggtggcaatgatctcttgttagggtttcagacgttgaaatgaggttttgggatcccaggacttccaaaatatgacttaccatcaaaaaacaagtcaaaacacaccccaaagggtccaagaacaagcatggctgagagctgtcatttggtcatgtcagtgctcgcaactggaacaaaacaccacaaactatccttaagtaattaaaatgggcataactctctcaatttttatccaaatgacctggttcaacttgcagttgaaatatattttcaagacggatctaagtgtagctcatgatcatagcttaattttgtagttatcgggtccaaaattggctcactaggcagactagtacattttttaatcgggaattgagtagtgtagttaagtgtgggatgttggagaacaatgctacaacccatgtggcattatgtgtgagtagtgtcatcccaaaatacatcccacactaaagcctatataatgagagtaaaaggctgaagtagggggagatctacttatgggggacttacttgacggctgccaagaataccatatcctttccttcaccttttttttgagtcttccatattttgtcgacaccaaatctccttgatccaaacaccattgatctacacagtgcaagaacaaagaccatattctcttttcttcctttttattggtttattgttcacctaactttgatcagatttatgaatattgagtctcccatgagtcttgtattcataggtctcgattgagatttcacctaaaaattatttgttgtattattgtctacacactcttgagaatataattctagtgtgtcaaatctaattaataaaagcaaaagtaaacgtagcctcattacaatcgcgatatggcggtgaactattataaattcctggtgtccattttatttaatgcaattttatttagtcgaattaatttatcacaatcctccttattttgacgatcttcatagatcagttgaagaaaaattacgtcaacaaatgatttataattcctaacaacttttttatttttagccaaaaattttgttgtgagcaaaagtaaaatttgtaaaaaaaattgtagtgtatatacatatctacttatcaaattgatgagctctactttatttttttaaaatacattactataacattatttttttttttacttctaatttttacattatactatacatcaacttttctatttttcttttatatataacatttaaatactatatttttgttcaatttaaattaaataaaaataaaatgagcaataagaaaagataaaaaatagagaaattaatacaataatagtttgaaggatgaatagtaataactaaatgaacatagcatttaaaacttttgtaaaatagctcatctattggagctctctttattactttttagctaaatttttaaactttagctattt

SEQ ID NO: 61748 - DNA, 852 bp, Cannabis sativa
tggcctcagtggtcaacaaagtgaaattttgagcagcttctggcaattggagaattttttgtgccctctccttgagtcttaatgtgaaaggaggacggcagtacgaaggaatcttctggaaccgattgtggacagtatccatgccctgcacaaagtagtactcgtccaaaaaatgccctattttgctgacatcagagtccacagtacccttcatcaatttctcgtccaattgggagaagtagaagtaccccgatctgctctgcttaggaattaacttcaggtcgaagagccagttggtgttgtgcggagacggctcaccccatccttgagaagcatagagaatgaacagggcaaataagtatttgatgccttttggtatgaattgggtcgggcagatatggtagtagtctgcaatcctcttgaagtatggaagcaagggtagcattgcaccctgctttgtatgggcacccgaccaggcacagtatccctatgatggactagttacctggtgatttggagaagggaaaatatactcgacaccgcccaagtatccatccttctgcaaactcctcatcttagctgggtactatagatggaggagacacccaccgagcccctaaggcaccttaccttctttgaggaactgcctcgacatattccttagtgacgtagtcatcacccttaaccaagacgtcaccgacctcggacactggttccctgcttcattataaccaccaaagcccaatggctgagcaactctctcctcctcgacttcagagcgactgtcaggacagacctcgccctcgtcctccatctcttagacttcaacaaccccttcactatcctcctcct

SEQ ID NO: 61749 - DNA, 824 bp, Cannabis sativa
actctttttcccctacagaataaggaatttttttccaccaattatcaagtatgattttgaggttcactcttataatgtattttattgtaggaagttattttatttatttattattttaataaatttgtgttttttttttttttttgacaataataaatttgtgtttgttattcttttgaagttcttttttaataaataaattgttagactagagatctctaagatgaaaaaaaaaaatacaattcttaaatatatgcctgcttgtataatattttcttttttcatatattttttaatataaacatttaaatctaaaaaaacatgttattaattttttttagaaatttaaaaatagattattttatacacccaaaaataacaaaaaaattatatttttatggatctacaattatttttacatttttactaattttaattttcatttttaaatacagagcgttattttcacaatatttcaataggaaaacaacatgaataatgtttccttcaagaaaagaaaaaaacgaaaaaatctgtaaaaaaaaaaataaaattcataaaatgttaatatatatatatgtaaaaatttgatctttaagtgtattgtgtaaattttcaaataaaaatgtgtttataacttttatttttacgttttagtttttatttaagtgaaaatagtgaaaaaaaatgtgatagaaaatgagagagaaagtaatgagataaatgaaatgacttttgataaaagaaagtatacaaaatagaatgtgattaaaaaaattatttaaatgaattttcaaagaaatttattttattttcaaaatttt

SEQ ID NO: 61750 - DNA, 786 bp, Cannabis sativa
aaacctgttaggaagcacacgaacaattttccgaagcaagacagattcatctaatttttctaccaagggaaaaagctcattagaaatatcaaatagtctttgataaaattctaataaaagtttcagtatctgacattctcaattcatcaaatctagtttgtaacatggtaaaacgtgatctttttacatcagcaataccctcaaattgagtttgaaggatttcccacacgtcctttgtagattcacaagatgaaattaattttaaaaagccttcaacgacaccattaaaaatagcatgtaaagccttattgttataatcagataatttttcatcttcattagtttaattgagttcacgttttaccttagtattacctctatcgtcattttcagtaggttacgactagcctgtaagtatagctctccaagccttctcatcttgtgacttaatgaatgttctcatcctaaccttccaatatggataatttgaatcattcaatagaggtggtcgagtaatggagcttccttctgtaaacaaagacatctcacacaaaataaattaaatggaataatctcaagatctcactaagattttagtgacccgctctgataccaattaaaattctgtattttaatattcccagttttattatttaattaaatacttaattaaatgcagaataattaatgaagctagttctgaaacagtttttctgtagctacagaagacaactctgtaactatagaagaaactagaaaaacaaacagtgcagaaaagtaaacaca

SEQ ID NO: 61751 - DNA, 1009 bp, Cannabis sativa
attttcattgtattatttcgggttgtattttttgtcagtttattcggtttggtttgggcgatttattcgggttaggcggtttgtaaattttattgaacacccctagttaagtttgagttatttatgttgattcttactgttttagtagaaattgtagagaaagatcaaagtttgagcttaaagatctttaatgatggattttaattatggggtttttcttgcaatttctaattgtattatgtttatggatgtttaataaggtattctagagagtttggtgtgatttggaaaagttttgagctagtattgaagttttttgggttttctacagagaaacggtcaaccggtttcccaggcaaaaccgagaaaaatagtttaccattttggaaatctgatttaccacttttagcagttttgggaccccaatttttcatgtttatttaatatttagagtattgccacgctatttattgataggaaaagttctagttttaagtttaagtcatcaaaaagtgatttagcgtatcacttatcatttttatgtatgttgtgacttaagggcttgtaaattgtcgagcagcagttttcacttaggttgaccggcacacctaaattcagaattaaggtaggattagtattataattgtatatgtacttacatgtttagcgtgcatgtttatgaatgcctgctagataacatatcagtaatagcagtattagtgtatatagagttgcactgaataccaacggatatatattttaacaaaaataacaaagatatttaataatatttaagtggttttttttttaaaaaaaagatatatgaaaaaatatacatatagattaaacattagaaatgttataaccaagaaattttacgtcgtgaataaaaaatataataataattatttaagtaataataaatagtataaaaagatcattttgtaaaaataaaaatatttacctacatagtattatatgtggaaaatttaattttttatgctcacat

SEQ ID NO: 61752 - DNA, 1846 bp, Cannabis sativa
  modified_base (876)..(881): a, c, t, g, unknown or other
  modified_base (1393)..(1420): a, c, t, g, unknown or other
gcaaccttttattcaatcgaaaagagaatctgacgttgtcctatttaggcgagagtcaaggtcattcttatttcatgagcttatagcattgcttcatactttgtaagccttactcttagcagtcactattagggtggacgctactaagaataaaagacttacaataatacttatcttttgagattttacgatattaaattgctaatgtacgaacatctattagggatgaatctcactaaaacaagaactgtgtagaaccaacaatggagatcgaatatctctttgattgaagctcatttttttaaaatgttgtaatttttaattaatcacttattttaatctatatattttagtggtgaaaattacttaatttaagttggtctaaaattaattttcaactttagtttaatttttaaaaataaaatttgaaaatctaaatatgtataaaatatatacataattttgaaattatataaagtataataaaataaatattccttaaaatatctaacttaagttgttctaaaataactaaattttcaacttaaataattttcaaaatttaattaaataccaaattaagtatcttagtaatcacattaatttgaaaaaatattcctatttaagttgatctaaagttaacaattttttaacttaaaaatatttttaaaaagtatcttaatcactaattttttagaaaaatttacttatttattaattttaaaaaaaaaaatattctaattttaagttgatctaaaatcaatttaaaaaattgattttcaacttaaatatatttctaaggaaatttcaaataattaagtatctagaaaaatctaataagttataacttctttatttaattaaatacaaaaaaannnnnnaatacatatagtttatcttgaatacatttcattctactaagtatgtttttcttaaattaatttcaaaataatttgatgaaaataatttcatatattttgaaaattaattatgttgctaatcaattttattaggttaaactagtgcaattaacctattcaattgttccactaaggcaaatgagccttcacaattgggattattcatgtgaggaagggttgggttcagtatgttgtacccactactaatggccacctaactctcacacaagacccaaaaggagaggaatttaactttaattaaataactgttattcattgaataagccaatactaattggacctaaataaaaactatcaaatgggatatttttattttagcaacttagtccattttaattatcaaaattaaatgggctccctatatgcatctaggctcaaagcaaatatataggcacatgtacatactgatttgaatggatcctatcatgttactaggtttatacacagatgannnnnnnnnnnnnnnnnnnnnnnnnnnnaattatttatttgatctattgataattggactatgattaaaatcagatcatttgatctgttaacaagttaaccataacaatttagatcaaacaataataggttttataaaataagtttgaataataaacaatatataaaacacacacatgcaacaaattggatagttggatataaaatttatttaatttaaattaattaattaattaaattaatttcgaaaaatctacaacaacacaaacctacaacaacctaaacctagaaatcatgcttgaaacctaacttgaaactttaagaaatcaactagagaagagcttgggagcttacctaggatttgagtcacaaagattatgctaaaatattctgaattgaggctgaagaaaccctgctagctactggttcttggagaaattgagagagagagagag

SEQ ID NO: 61753 - DNA, 1164 bp, Cannabis sativa
aatttgtaaggaaatcgaatccctgatctctaagttttggtggggctcttctgcagagtctcacaaggttcattggaagaattggtctagtgttttccaatctaaatttgttgggggtttggggttccggtgtttaactcattttaatcaggctatgctggccaagcaagcttggagaatttttcaataccctgattcgttgttatgtagagttctcaaagctcggtatttccctcattcttttattcttgaggcagttgtggtcataggccttctttttcttggagaagtattttgtggggatgtgacctgcttaaacagggtcttatttggaaggtgggtaatgggttaagtattcgcacaattggggatcattggtttcctggctgtcgttttaagtcctattccacttctgctcctcctactcaatctctttctttttttctttccccttctggggattgggataggggaaagttgattgacttttttgatgactctcttgtggaagacatcttgcaggtccccatttctggccaccattgcaatgatactctgatctggggcccggattagtcagggctttttacagtaaaaactgcttaccatctagctcttcagtcttgggatatgcctacctcctcctcttttgcttctaataaatctttttggaccaaaatttgggcctccacagcacctcctaaaattaaacacctcatttggcgtgctctttctcactctcttcctgtagcctcttctctgttttttagacacattattacaaaccctctttgcccggtttgccagttgcattcagagattgttgaacatgctatccttgggtgtaatcatgctagaaaagcttggaaacattccaaattttttaccttctatactaatcataaggatagtaattttagcttatttttagccagtgctttagatgcctataataaatttgatttggctctattattttgttttatttggtcaatctggagtcagagaaataatttattccataagaaggtagggctctcctcatatcacctttttgattatgctgctaactatttacatgagtatattgatgctaatgctaagcagatggtattgtcttcccctgcactgcgtcagaatcggcgagaggtccagcttcctgct

SEQ ID NO: 61754 - DNA, 1160 bp, Cannabis sativa
ttgttgaagacataaaataactataatttgttttattttgttgctagttatgtgaagaaaaaaaatattttttttcataataaccaatccaaaataacccatccaatccgcatttttgcggattggattggatttgagctattgtacggattggattggatctaaaaaatgaaatccgcacttagtgcggatcagatgcactataagcaaaatagtgtggattggatttgatgaacacccctattaggaattataattatagaggttccaccccaattatgtactaataacttactcacatttctctgtatttacttgttagaatatcaagatcacaagaattagagtcaagtgactttctcaatatttctcaaaattacagataataattttgacggtataatagttctcttaaaagtatgaatttagcccttcaaaatagtgagatgagccactatttataaaattacaagcgaataaaatgatattaatttgcttaaatgtaatttacgcaaattagatgtaatttttaaaaattaattaaatattcaaacttttatttcaaaaggggtggaaccgtggaagtctaaattttgtaaaaagaaataaaattttattgtaaatattatagttaaatggtttaaatgttaaaaatgttataatgaatacttaaatgtaaacataaattatttataaatattaattgctaaaaagggtcatgttaaatatttaaactaaaattaattattttaggaaaattgttaattatgattaatttaattctaaaaaataaatttttacctattggtaacctataattataagtaaaaaaaaaaatgaaaccatcatggttacaataaaaatgtaaccactaagtagtcacccacacacacatatatatatatatatatatcaatcacacctaaagtttttcattaggggtgagcaaaaaatccaagaaattgaccaaaccgagtacaccaaccgtccgaatatcgaaaaagccaacaccgaaaaaactgcattaggttaaaactgccttaacacggtcgattttagtgttgatggcaaaccgaccgaacatatatattctatattatacatatataatataattatttttgtacatatttaatatacaattttattaaactagtttt

SEQ ID NO: 61755 - DNA, 1299 bp, Cannabis sativa
atttgtgcacaacaactacctgcgactatatattcagcttcagttatggatagggctaccgagttttgcttattactaaactgttgtacctaaaattttcctgtacttcagagagtgacacatgtcaaccaagagaataagaaccaccagatataataacaattatatcatttaatgcaaaatggaataactcattaaatatagaattaatggagtatattcataactcgctaactgtatagtcttaggaaagataaggatacacaagctatcaattcctgtattgacgagagaccatcttatctcagaacgtacaatcccgaggagactacggacaatgtatagcgagacatatacctcgctacatataaggaaatattgacgagacgaatcagctgttgaaacacttagcatatattctacattataataactaagtgtagcaacttggaaatatgtaggacgtgattgtccagtttgcgaggtcttatggtcaaagagaagttcttaagtttgctcagtacactggagctcatgccattactagaagacatataattgaactaaattattatttgtcatctatatgcaaagcgagatgcctcaacccacgtcagtattagccaccttgaagataggaatgataagtggttgtacggttatcaattgttatctacacgtgtttaaatgaaacatgatcaaagctcacgtttcatgaaacgattatgtaattagaatttaaatgtaaataaccgccaacctataatcttataaatagggatagattctactgaaaaagggacgaaaaatctttgagagaaaagagttactaataatgtattaaatatccagaaatatcttgaataagatagactcgtggagtatgcaaatttaactgcaaaactacataaaatacttgatgtcattattattattataatacttatcaattttcttatatatatctatgtttaatttattacgaaaaaggctcattattcgttaacaaaaatctgcattaactctttggtgctttcattgagagtctacgtgataaaactcggaaaaaatccctcctaacgaacaagaaatttgtccatggctaatgataatcaaaatgataatagtcatcttgaagagacatcgtcatcctgggaaagtaccaatgggttcacagaggccacccacttcagcaacaacacgttcaagaagaagccaaggtagtcatgatcaaaacctagaatgagggaatgaggaaaccaatactaatattggttatgtacccagaactgaggatgc

SEQ ID NO: 61756 - DNA, 1602 bp, Cannabis sativa
tttcgatatagaacgagagtacctgtatggtttagatagcttatatgatttctgtgtttaatgcctgttgcgtgttaaatttatcacgagagtagaaagtttttatgtgattgagatttatgtatctgagaagactataaattaccttagtaaacctgctatagtttagaaattgataatatggagataatcatattaagccataatcaatagaaacaattgaagtcaaagccctaatttttactaactgttattttccttattagtttaattattcttgcactgtttttattttctagtttgaatcatttcttaattttttattcaaccaaatagaagtaacagtttaattttaaagtacttaactacaatccttgtgggatcaacctcactcttggtgagtttactacttgtcacgatatgtacacttgcgtgtgcaaaatatcacaacaaatagatatataattatgatttgttttaattatatatataatttttgttcttcctcacctaagtatagaccatgctttaatacttctatctattcttttcttaattctttaattttttaactttctattacttttttttttttaaaaaaaaaaactccaattaagctaataataataaaaataaaaatatctaactaaaagaaattatatcaacaaacacaatttttttcttcaaaattcatacgtatatatcttctaagttttatatttttaaaatatatataataacttaataataaataggagaattacttcctatactattttttaactttttttttttaatttacagttttggttgctatgtaatgatttttttatttaattagagatcactaatcaattaaaattttttaaaaaacaatatatatttgtacgtatataataactaataaataaatatatatatatatgtattaaaaaaattaatctacatataatttttttttcagagtcagatatagttaatattaccaatataatttatcaaaagaaattagaaactaatatgccaaaaactttagaattctaaacttattatgtttatcaccctcttttctctcacataataaaagtaagtacttttcgattattgttttatttattttatgtacaaagtaaatttattagaaagaatatcaatgatgattataagtgagatagggtaataatatcaactttaatttaaatacagtggtgactactacaaataagatacggtgatgatagttgttttaaaattatatgaagaattttttttatagatttattgtttttttctggtttagatctctattttgtgtaagaaatatttaatttctatattttttttttaactataatgtatattttaaaaaaaaaattgtgtgattttttatttatataagaagttgtatgatattttttttttttaatttttcataattttctatatagatttttaaatttttttaataagtatatatatattttaaaaaaatatacctaaaaataaatttaaaattatttaattttattgttcaaataatatttatataattatttaattgcatcaccccaacatgacctacttaccaaaaaaaaaaaaaaa

SEQ ID NO: 61757 - DNA, 1419 bp, Cannabis sativa
acaatgccaattccgatgaatttctcagagtttgctgtcggtactgaaaaagtcaccagaatagctgtcggtttcacaaaaatcgccggagttgctgccaatgctagaaaggtcgtcagaattggcattgttgacaaaaaaattaccggaaaaattttttctagcgactatgccaatttcgatgattttttcgaagtttggtgtcagtgtcagaaaagtcgccgaagtagctgccagtgtcagaaaaatcgtcagaattggcattgtcaccgaaaaaaatcaccaagaaaagtaatttcttctttaagaaactagtttcttggtgatttttttagtgattttttctgcgacaatgctaattcaaacaatttttttggcctcggtagcaactccgatgactttttcggcactgacagctactccagtgatttttttttggcaccgacagcaaactccgacaaattttccggcatcaataaactatctaaacaaataaaaaaattaaatatggaatttaaaaacttaattaacatatatatgacatatcaaatactataaaaagacctaaaaacaaaaatataccatataaattagtcaaacttaaatgtgtcataactctacactaatacttcttacctaaatatgatttgaatacatgtctacttttttattgtaaaattatgagtgtgctcattaattattcaccaaatgagatagtgcattaataatttcattgtgtgaggaaaagaaaaatgtcattgttgttattgatctccccttatcttgcaatttcaccagctgagatagtgcattagtaatttaatattagaaggaatgccaagctttattttcagaaaaatacaagcaaaagaaaaggaagcagagatagagagatttgaaaacagtcaagtctacaaattatctttaagaataattcagatttatatataattcttaaaagttaaagttaatacgagaccaattaatacttcatatgtgtctcacctcaatttaaaaaatataattaaatagatgtaccctcttactaattaaattgagtactacacctaagtctaaagtaacagtaatattacacatccttaaaacaacaaggtaaatactacacatcaataatattcaaaaccaaaatatcatttatgtgggaaataggagactatcatagcacacttgaattattgctaactaattctttatagattaatgttgtcacattaaacatgcgattataatcaatgtgtttagccaaaaaaaaaaaaaaacatttagaatattaaaataagtacaaaacacaattttatttacgccaaattcattacataagaatttattaattttaagttggatccattcaaaattgaaaaaccgtgtttttgcaaatgtcagttgtatataagaaaa

SEQ ID NO: 61758 - DNA, 1107 bp, Cannabis sativa
taaatgaagcattcataaccttcacgcactatcttgtcaggatagaaattatgttgcacctcgagttttagggaagtgtgcattcactacttacctcctagtcctcgaaactcaaattagaaagaccgtcgcttgatgaagacggactagcacagagacgaggttaatcctcatacagaagttggagaagatcctggtaaatacgatgttctccttcccaaagctcaccagggttcatctacaaaaggtaggacacaagatgagtatttggctgggatatcgaacaaaaataaataaagtatactgactaggaccgaccaaaggattaaaaggggaaattttgcatgatttaggtttataacccataatttcaagacttcatattaagggttaatcttcactaaaccccgaatgggcaagtgaaatcgattatcgttaaattaaagtcagaatgccattacaatcaaaatttcatattccaaaacctagattctctccggttttcctaaaacaagttcaagactattgaattttctacaaaggaaatctagaaaaccatagattcaaatattaaagaataaaaagatgaagaacttactcactgttcgaagctttgggattgcttggatgatgctgatcgacactttctggaaattctttgaagaatttaaggaaaagatgtttttgctctgaaatcgtcgagaaagaaatgctaaaaatagtttattaagactttttgcgctatttataagcaaattagtgaagaagtgtaatcgttttgaaatttaaatgcctcgatttcccccaatagtaaacgttgggaaatcaagtaatcaagtacctgaagaagagcaaccgtcaaaagcatgcaaatctcaggaagatttcgaggtacgaatcattcagcatttatgagccgaatatcaaagagacctttggtcaaaatcacatcggatcaccaacaggcgcatcgaacacgtgccacccattcaaacacgaattcaaattgagtgaagtcaacgcgcgacttcagaagtcccgtgcagacttgggggcaaatgttatcgcatttttttcactctgacgtggcggcatgtactagtgaca

SEQ ID NO: 61759 - DNA, 791 bp, Cannabis sativa
agttcctcgagatgatgaagtgaaagatgagagaggaggagttcgattttgattgtaaaaccgactggtgcgattcggataattttgataggcaatattgacttcagagaattgatccaactcggttgtagcaagattcacactcaactcagcttctaaatcttgatctgtcttctcgattcgagactcagaagctaatagtagagcttcgatttcagcaactgaatactcttcgattcgagtattagttgaaatgataaaagtgtcatattctggaggtaagcccttgaaaatggtagagatgtgatctcttgcactcagaacctcccctactgaagcaagaagatcaacatgttgtttgatttttaacaagtattcattcaaggacatggatccttttcgtattttttgcaatttcgttctgaattccaggatctttgaagacacttgcagagtgaaatgcttttcgagtgcatgccagatttgtcttgctgtgttgcatcccaccatgcgagtgaggaggctttctgtcattgaggataacagccaagaaactaagagttgatcttgaacctcccaatcaagaaaatctggattgaaggtattcgaagcttgatctgcatcacttaagaatcgaggtggaggagctcgatcttgaatgaatttttgtaaccgatttcctcgaattgctgctagtacctgttgtttccacagaagaaaattgtgatcatttagtctaatagacatgttatggctgaaatatacatgattgtgatcatcagtgttgtttc

SEQ ID NO: 61760 - DNA, 1829 bp, Cannabis sativa
  modified_base (1171)..(1171): a, c, t, g, unknown or other
tgaaaacagcagaagacaacagcttgccctttatttttatggcttgcatcaataaaagggtgggaagcatgtagactcattgtggtggttgatggtacattcctcaaagcagcttatggaggaacattgttgtatgcatgcacacaagatgcagcaggtcatatttttccgctagcgttatgtgtcgccgattctaagaatgaccaatcttggaaatggtttttcaaaaaattaaaagaagtgtatggagtccgagaaaattagtgtctaatttcagataggaaagagagccatatcaaagcatcaagagaaatatatccagaaattacacacagatactgcgggtatcacttattgagcaacctcaaaacaaccttcaaacaacaggctgccaagtacaacctgccattctttggagcaataaagcctatatagaaaagcaattcgaattccacatagctgaactagatggattggacaaacgcatatgaccgtacttgaaaaaagtcagttatgaaaaatggtcaagaattcacagcaacaacaagaggtattcagccatgatctcaaacgtagcaaaatcactgaacgccacaaatttatcaggggagctaccaattacaacattgctagaatgcttgagagcattggtgcaacaatagacacataataataagacaaaagcacaaaacacatttactaagctggcgtcacctggagaagacatactgctaaaaaaactacacgtactcattgaatctggaggtgagatctacatttcaaatttaaaatttcttaaacataaacatctaggaattttgttaggtttttctggtattgttgtaatgttgttccaatgttgttctgtaaatacaataaatgcttattttttaaacaaaaaaaataaacaggttaaatcaacaatagattatttgtttgaggtaacaagaatgaaagaattgtggacagtagacctcaaagaaagaacatgcacatgcaatatgttccaaatagatgaaatgccctacggacatgtcatggctgtgctgaaggagatgaacatggactcatacaactactgttcagattactacacaaagaaaatttggctagtaacttatgcaggaacagtgtaccccaataggacaccaaagtgagtaggatgtaccanaagatgtgaaagacattatagtcttgcctccacatgaaatggttaaatctggaagaccaaaaaaattgaggaggcaagatggatgggaaaagaatcaacataacaagtgcaacaaatgtggggagttgtggcataacaagagaacatgtagcagaaggcatagaaaggaggagtgaatacaaataaccatagaacaacaatggaaaaacatgagaaaactgaacatacattttagcatgggatattgaagaatataaattttatacagaactaaagtttctatttttattaaaaaaaatcgatgttaatggtaatttttcatattttacaaaaggtttaaaagtaattgaatactacattgaatatatacatatatatgataattttattgatatagtttgcttttgattaaataatgcagatattttttttaagattataacaaaacaataatgttatgaaaccctgataaataaagtaaaacaactgtgaaaaaataataaaacaatagtaaaataacaacaacaaaaattcaaaataacataaatatataaattaaatactaaacagttcaacataaaacatgttttacataacaaagtttaaaaaacaggaaaataaaaattgcatattatccaaagaaagcttaaaacataaa

SEQ ID NO: 61761 - DNA, 632 bp, Cannabis sativa
aaaataaaataaataaataaatcagaagaaagattaatcagcataaagaaaagtgaaaatgagaaaaaaaaaatgtgccatttgagtttgacaataacaacaaaaaaatatagcatatatttatttacatatgtagtacatcattaccgttcaatgtatcatttaaatgattgactgtatatttattaattatttataattaagtatataattaaattttttccttaaaagtaaactaatagttccttttatatttttttaataaaaaaaagtaaccaattaattaaacaaaattcaatatgtcaactaattttatattactaaaaattatttgtaatttatatataaaagttattgtatggcatatattctttataaacttattttatagaattatttcaataaatattatacaatgagtatatatatattaaaaaattacgcttattttactaatgtaattttttttgtattttattgtatcttattaaattttaaatatattaaaaggtaacataaaagttgcaataaaaataacaaacaaaaaagtaacataatgatcaacaatatataagttaatgaaaataaaattataatttttaaagttaaccaactagaataagtaacaaaaa

SEQ ID NO: 61762 - DNA, 1349 bp, Cannabis sativa
gtacatgttaaagttcaggggcaaaaatcctaattaaccttttcataaatactctataattttttttaaaaaaaatatataaaatttttattaatttatcaaatcagttgtatctcaataagaatatcacttcaattgaacactcaatttaaaaaaataaaaataataagactatgagcaaccacatggtttaataaaataacaaaaaaaaaaacattatttaaagtttacaatagtcttttataataaactctatagtttgtaatagataaccgaagatttatttacaagagtgttaatgtgaggatgtagggattcttttcttaaatgagagaaaattgattttgaatatattgaggaatatgtattaaaagattaataacatattttgataataataataataacaataataaaaaagcacacaagtaaagtaatggtgagaaaagggtaaaaagaagacacggtggttaacttggtttgcctttcttagcatttacttacacaagacaaaatagtaataccagcctacactacactgcattgatttgaaatatattcgtacgtggatagagttttctcttttttataatctttttctttgtcattacctttactgcatcacaaactcaatcaacacaattttgtttagatgaaaattgatggttcaactttcaaggcacagcttaaataaataaatgttaatattggaaaaacaatgtcccaaagcattgtcttcttcattatttttatttgttgttcaaacttagacagctgctcccacaatattactagattatattcgtttccagtcttatatgtacactaaggagttaatccatatgagattccaaattcaacccataccactttgagtaaaatacctacaaaaaaggcaaaagagggaaaacagacatcataagtacaaaattcttcttctgagatattgatgaataaattaaggagacaatggattacattgtacacttgacattacaaaaacatgtaaaaaaaaagggggttcaaacagggagtgtttcttgaatttgggcatcaaagcgactgtgagttagaacttccctcgctcgtgcactcctatactgaagacgctggtggagtgtctctgacatctggttgaaaaattcggcatcccaccgatggattaacaagggatcctccgcgtagcatatgtatatagatgtaaccgcactttccacaaccaccattgccagtccaacctgaaaattacaccttcaacttcaatcccgttcgccatgccatataagtaaactcttaactgggtataccatgctttaataaaataaaagggtgttttcatttttacactt

SEQ ID NO: 61763 - DNA, 778 bp, Cannabis sativa
gtgaaaaaatgccatagaagagtggcaaacctataaatgctatatttttgtaacttttttacaaaatcccatatttcatgtaattttcacttatagatacctaaggtataacattagagtgatttaatatttgttttagtttaaatattattattattattattattggacgtcaataagcatcactacttagaaatgatattatattttttaaaagttattactttaaagttaataatatgacattaaaacaacaactattttttaacatttctagttaaataatacattataaattgctagatatgtgtttttaattaattgcaccaataagaattggttggattgagggcacgtatgtgatactactattgcttatcttttctcatcgattttactatgtatataaaaagattttctttctctttttaaaggttgcccatttcagtaggaaagctcaacttccaaaacatttcttattttaatgatgaacacatataggaccattattaacaatttatcgttttgagagggaatagtatagtaagtcctttcttgatgaattattggtggaatcttttctatcttctatctttgagggtaaaagaaaaccctaagtaacaaaatgatgatagttctgaaaccattaccaaaaaagtgtgaaaaacaattagtatatgaacgtacatgatgggaagtttcgagataaatttccattcattcagaatatatataatgtctccaaatcgctaccaatattatatatcccagtgacata

SEQ ID NO: 61764 - DNA, 992 bp, Cannabis sativa
caacgcaatactaacttttgccagcacaaaaatgtgctggcaaaagtgatatttcttgtaatctgtatattataattataacatgcaagattttgaataatttatgttcatgaaaataagattcaaaacaatcaactccaagtccacgcgtgttagttttgaaatttgttttcattgttgaagtaatttttttgtaagctaatcgaagaaaatcgtaaaaaaagctattcaataatgatttattttcaattaaaatatttggaggaagcgaaacaaacatcgacagttaacttaggactagaagatggagatttccagtatttcaaacatattgtctgaaaacataagtagtgttggataggtgttattccttcaaatttgttgtactgctggttgattctaaccctttaactattgtgtctacttttgctatgagacattcttttttaatgatctaggatcattgttagaggatgtaacaagtatgttattcagttttttaggagtgtggccctgatccatgtatattggtcggccaatgtggctacacatagaatagcttgggaaacccttcggatagataaacaacttgtttggctaaatatctacctattattttattctttgagatgtatagctctttagcctgcatgacactatttagttattaatgatattggttattactttgaaaaaaaattaaaataactatttatggttatcaaataaactggtttacaagttgttcgcttaaagtaaagacatataaattttataatattagtggacatgaaaaataaccctagtgtggatattatgtctagcagcaaagagatatgaaagattttttatgtctaactttaatggccacatcaaagagtttttgtagtagtctaatgaactggcggttcagattactattttatgtatgtttgagtttgagtgtaagcaaaacttacctctgaaccaggtcaaatacatatatattataa

SEQ ID NO: 61765 - DNA, 1699 bp, Cannabis sativa
acgtagatttttgttaaccaaattaatagcctttttgcaataaattcactacagaaataaataagtaataaatgataaaataacaccaggtatttgatgtggttcgtagttaaaatctacatactccacgagtccttcttattagagatattttctggataccaaatacaatagcaatatttgaataacattcttgtttctctcaaatttggcatcctttttcccatgaattttgcccctattttaggtacatagtctggcagttgttctttttaggattggttcattcataactgttcataaaacgtgggcaatccccacgtttcattcgcacgagggataatatctaataactacccacccgttctttatttttatcatctagatcgttattgctgacttggaaggttgtgtctcgtcagacatgagttctccttcttgtccagcttaataggaaaaaacactaagtgttggaagataatttatctcgttaattctctttattggtatttaattgcgaggtgatctttgcgctatgtgtaacacgaggcggttgagtgttgttacttttaatctgctcgagcgagtgagtatcctctccttgtatatttatctgagtttatcccgaagcacacatatgtctcgtcaatataagtttaataattattatttttgtctcgcgtaagactacactggtaatgagtttgaacattttctattaaacttatatttaattgtaacgagttatttaattacatttaatgatataacatcattattatattctttgagttgattcgcattccttctgtcggacacatgtcaggatctagtacatagccgaatttcaggtataacaaattcctatatgtatctaagccctatagcaaatatatatgctcacaaaagtaaataatttggatgagccctatcatgttactaggtttaacacagatgaaagaaaattataaaattacatattatttatttgatctattgacaattgaactatagctaatttaaatcattagatctttcaacaagttattcatagcaatttaaattaaataaataatatgtttatcaaagtaacaagacatagaaagtggctaagatattttttatttttaatatataaaatattattaaaaaatatcaaaatttgaatttaaattaggtagttagaaaatatttaaaaaatattaaatctaacaaaatctaaaatatctcaatttaaatttaagtacccaaataatttttaaaaatctagcttatttaaataaacttaaatgaattaaataactaataatataatataatattttaatttgaaaaattacgatatttctaatattatatttcaaatgttataatttaatacaaaaataaataaacttaaaaataggatatttatggttaggatattatcatttaaaaaatttatagtatcccctaattttttgaaatttaggttgttaaaccttaaatatctttctaaaaaagtatcaactaattattcaaaatttcatgttatttaaataaaatataaattaataaaataaatttctaataagataaaatactaaataaatagtatttatctaatcttataatttaaattaataaaatatattaaaaataataaattcttgaaaaactgatatttatggttagtaatttaaaaatatctagattatct

SEQ ID NO: 61766 - DNA, 520 bp, Cannabis sativa
tacataaagttcaaaagacataatttggtagatataaaagtagcaaaatttagtacatgaataatcactgaaatagtaaaattaataggataaaagtccttaaatctaacaatctcaatagtctaaagagaattttaaacgaccataaaagtttataagacatgatttgttatatatcaaaatttaagaagcaaaaattttaattaaccatacatatattatatatttttcttcttcttcctaaattttatagtttgttcttataaataaaatagtacgattatattaaattgaatgaacacccatatatataaatataattttaccatataacattttggaataatatgtataaaccacacaacttcctaagatctataatctgaatgtattaattaaaagattttttttaattcttttttgaaacattacttgtgaaaaataataatcaatgcagagtaaatgactaattgaaattaccttaataatatccaattacatacttttctttattggcaaa

SEQ ID NO: 61767 - DNA, 987 bp, Cannabis sativa
cataaaccaagaatttcagttatatagacacactttatatagaatagatatagaaacttgcgctacctgtatggtggaggtgcatacaaattattaaataaagattttgctatgtattacttttaccattaatcactaaaataagacatgtcatatggattatatatattaaactactttagatgggacttttttttattgagacaaataattgatgaaatataatgtactagttcatcttggtctttctttttctttttgagaagattttggtcttagtgttaatgaaacattttatgtgttgagttaggttgttgaaggaaaagagctattaaaccctggaacggacaaagagaagaagaaactaaaaggggtaataatcaagttcacttgatgcatgccatcttctattattgatcatatgtgaccactgcactacagcaaatatgatctttgctggttggaataattccaagatgaaaatgccttcttatttacaaagaaaacactgaggatatagatatacactagtaaaacctctatctaagaatttattaggacaaagaaaatcaatatacatcaatataaaagaatgttttagggatttgatatggcatctaaacttcttatgatctctaatacttatattccactttttctaatcttttctttatttttcttttattattatattatcatcatcattatatatatatatatatagaaaagttatgtcaatgttgttgtaagaaagttttgtactagggacttataaagttagaaagaggaagccaattccagaaacggcgactcccagcccaagctatggccaatattctaagtccaatcatgcaactcttgttcccagtgagtctattcagtacaatactctgtacatacgtacataagatcgatatacatatatatatggagagagtaatagagaattgaaattaccttatggccctcgtcgaggagaacagggga

SEQ ID NO: 61768 - DNA, 2249 bp, Cannabis sativa
aaaaaaatttcaaaaaaaaaaaatcatgtggtcattgtctatattgagcaacatttcacataaaattgatcttgaaaattgaacaatagtacatatatggcaagaccactctcccatgagcacccccattggagatgctacgagctttccaattataatttgctttggatttctagaatttttaatttcctgctaattaatgtgtgggctacgcatgccaagtggacatcactctaaattaaggtgggttaggctcatgactagaacccaccaaatttaatgcatttagttataccaagaaaaaataaatatattcgcaataaaactatttaaattaaacgatttgtcatacttaaacccataaatagattttttgacagtaaaattagccaaaccttactttttttatgctatttggccttctattcaaaaaatttagttaagtggcacagtggacatactacagtgtacttaatgtacacgtggcaaattttagtggtccacataatattaattattaaaatattataaaaaaatatgtttaaaaaatattctatttccttttttctttttttcttttttgttttcttatttcttttcttttgtgtttcttcttctggacaaaaataccagatgttgtgataaattcaacatgcaagtatacgtatcgtttcaacaaataatactcaaataagtaagaacgttcctacgaggactgtagttaagtactaatcaattaaattcttgtttctatttagcagaatcgataataaagttgaataattaaataattaaaaagtaggaaaataacaataaaaagtgtaattaactatggatgaatatttaagaatatgaatctcgttagttcttagttcaatttctcaattgttaatgttaattattaagtatctcccttttgaagatgacagattatcaaatcaaccctaacttttctcagatcattaaggtcataaatcatatattatctacttgcatctctaaagtaaattaacatacaacttgtattaaattcagaatctaaaaatcacataagctatgtaaatactctcgttttacatcaaaacttatgtttttcctattagaagcattcctaatatttcacttcttcatatttcatattaggatcataaatcacatttaagatgaccagtctaaaatgtgtaattgaaataaataagaacaaatcacacaatataaggaagaaaaattaataatcacattaactaaattgaagaaacatcatctaacattcatcatattccctaaattgggatttagttcataaaactcaagttctcatccataataaaaattaaaacagaaattaacataaagacataaaagggagaagaaagaactagttggtgatcttgctccggatcaccacaattgctttctttgcctcattcttcagttctaaggtttaatttctgagtgttttgcttctaaaacacaaaacccttatatagaaaataatgcaaatatctcgaatggcaaaattacaaaagtgcccaaaaatctcatctttaacccatagttgcgactacctaaagcctagtcgcgaccatatgctaatctcgaaaaacaagctttttgcctaaactccatagttgctagtatagtcgtgatcacataattcgtggcaaccatgaaaaacctagtcgcgactagtttattttctacttcaacctctctcagtaaaatgtgcacaaccttcaaatgccaactccaaatgagctaattctaggtgcgttggaaagctaaaaaagatatctaaaacttttgtgttttgactttttccaaaatatgaacataacatagtagtaaaatttaggcttaaatttttttcaactttattttcttacaaaattttttctactttatagatcgttgtttttcaaaatttgatcaatttgtacaatccaagtgtcaaaacctgaaatcaaagaaaacaagcataattctattccaaaaataataacaaagaataaaaataactacaaaaaatgacccaaaaattaagctaaaaataacctaacaccagaaccttcttcttcaccttttttcctctctaaatccacaccttcttttttaaacccacacggaagggaccacatccagtcccctttagcccacacaaaccccccttttgccgctattaggaactgagctcgctagagtcaaggaccgaatagaccaccttaggtcctttttagcccacacgaacc

SEQ ID NO: 61769 - DNA, 743 bp, Cannabis sativa
gcgtaaatacataagttttactctttattgcagataaatatctaagtttaatttttacggtaataatacctaagttatatttctagaacttttcaagttacctgaccattaagtgtcaagttattatccacgtgttatgtttttattggtatatttaaattattttttaaataaaaaataaaatttaatgatttagattaacttaacacttaattgtcaggtaccaaagaaagttccaaaattttagcttatgtattattaccgtaaaaaattaaacttaaatatttatctgcaatcgaaagttaaacttagatatttataccgcaaattattcatttattttaatatgagttacttgattatacgcttatttaaatatttgttgatgtatacatattaatttatattttattataaattattgtacttattagattttttttaagaatcagaaagtcgtattgctcaaaaactgatattataaagaaaacaaatataagaaagacataaaatataatctttagaaaataattttttttgataaaattttagaaaataaattttaaaaagtattaattctcaacaagcttattaaaataaatattttttgaaagcagcatactaacaaaatatctttaagagaatataaaaaaattactaattaaatgtcataaaaagtaaaatataataaccattaaagttagttttttagaaaaatgaaaaataaagaagaagaagaagaa

SEQ ID NO: 61770 - DNA, 774 bp, Cannabis sativa
ctctctcctattcataccttttttttttccttagaactctcttatagttatggatacattatgtgactttttaattatctaaaataaaataaattatacacttctctttctatcttctctcaaaagtatttattttctcttaactttaaaagtaaattctgaccgcattactaattatttggacttaaagtgttggaagcatatattatttttgttggcaccatcacaaataaccataactaagagtaacatttcagtttcatctataacaaataaataactaaaatttaaatttcaacaaaatttagtatagtactaattttatgagttactataaatatcttattattttatatttaaaagttactcgatagtgtctaagtaagtctattttatcgagtaattttgataaattaaaaaaaaaacttataagaaaaataaataatattatattgattctatttataatactcccataaattttattcacacaaatattgtgtgccaagtcaacatatatatcagattccaaaataatctatactcaaaataaatataaaaactagaaaaattccttatcaattttttttttcaagctttaaaaaaccaatcttttggttgctttttttttttaaccaataaaattaatttttattaaatcaaatcagctaccaaaatagcttccaaaccagctgggacataaccctcgtgggaaacacaatcaggaatagaaccagaagaacgagctaaaaatagcatgtaaagccttattat

SEQ ID NO: 61771 - DNA, 929 bp, Cannabis sativa
attcttatatagaggtatattttattaatacgggacttaaaaaatatataactaattacaatatggaggttattcttatttattactagcccaaattgggacttcactttttttataacaaattagaggttattcctgaatagagtattcttaaatagaggttttactgtatatatataaaagaaaagcataaaaagagtctaagtgtcatcttataatttttttttattttttaacacatttttttttaaaacaaaccacatatacaaattaaaagtctaacattgtttagaaatattttaaatgttatctgtgtagattataaataatattcttactacattatttttttggtttaaaaagtattatttatttatgggtgattgattaaatatcttacccaatatatttttatttttcatctaataaatatttatatatttttataggtagttatttatcttttcataattttttttaataataattttttttttgtctaaaaaatattataggtgattgattaatatcttacctaattagttttttatttttattttttatctaataaatatttaaatatttttataagtagatatttatttatttttttaaagcaatgaccaatatcatttataataataatgccatacaggctaaatggctatacatctcaaagaataaaataatagacagtcatctagcgaaacaagttatttatctatccgaagatcatgcacagctaatccatgtgcatccacattttgaaggaaaaatcctatccaacatcattaaaattgccagaagatatgcttgaattactaaaaatctccatcttccattcctaaattaacagtcgatacttgtttcacttcctccaaatgttctatttgaaaataagatgttccaactgcataaaatacaaagaa

SEQ ID NO: 61772 - DNA, 1055 bp, Cannabis sativa
agcggttgacgcccataataagcgtcatgcaagacaacttgaaagttgtttttgaagatgccctcaagcttggcatgtaatgagtttgaaccaaaaaatacaccaataacaaaagactttggatgatgagcttggggagaagcctttggtagctcgtagaggatgtaatttagtgaaagtggcattaatggaacataaggatccattgattggcggttcataatataatagcattggcaaactcaaatcaacaactacaagtgattcaccctccaaagaaacctctttcccactttgctcatgacaatccacaaccttcactatgaattgatctttaataacttcttcacctaggatgggtgttgcttcagtcaccaaatcaaaattatcacttattgagtaagcatctaatgtacccaatatttcagccacttcaaaagattctttctctgaaattttaggctcaatctcttctatgtattcaactaatgtcacttcttcattatccaaaaaactctcataacttttgttatttgaaatattgtggttaaaacactctgaattatgcacctttagattatcacatagagatcctaccatgtcgttaagtggttaatttcttctaaaagtgattgtatattctcctcttcttcaattggttggggtgaatttggacaataaggagggtattggtgactccaactctgaagtgatggatcccaatgccaatcgtaatcaaaatctgccatgtcatttaacaaacttattacatcatggcctctccttaataaaggctctccagtaacctctgctccataatccacccaactttttgtttcatcatcaagtccattatagaagaacaaagtaaaacacccacttgagaaattaggatagcctctctccccgagctccttaaatctcccccaagcagaatagaatggtccatcgtgttgttagacaaaattcacaaggtataacattgagatttacattggaggtcaaacacattcagtaaaacatcagtaaacttaaataaaaaaaactaaattaga

SEQ ID NO: 61773 - DNA, 1562 bp, Cannabis sativa
tggaggcttgaagcggggacgttacattcttaagtaatagtggcgcttaaaaaaaattgagctaatattgataagaggtggtacgaataagaaaatttgcgtgaaaaattcttatatgtaattcacgttgttgcattttaatctttacatgtacattttttcgtggcaaaaattcttatgtagtttatctttagcgacaaaaatctcaaccgttacacacatgatacaacattaattcttgagttgataaaataaaaggaacacataatgattttgttggtaaagatgaattacataaaatttagactgcaaaaaaaatttacataaaaatttaagtgtaacaaaatgaacattatttatagcaatttttgcaactcaaaaaattacataaaagttcaagtacaacaaagtgaattgtataagtatttttgcaacaaatattccaataataatgcaacattttatggtagtgttgggaactactgacaatctttagcatttctcaaaagactattagaacagctccaatgcataattcatattgatgctcaatatgtcttcaacgagactgcatatattacactatatttggcgtgttgctaccgtgtttggcatatatgttgtggcactctagcaacgggcctggaactttttttaatgattattaaaaagattaacaatttaatatatttgttgtaaataaaatattaatactataaattattttcatatcataatttaagtaaaaaattattaattttttgtattttttttaatattacacaatgcaaactttacaaatttaaacacattaacatcacattgttaattaatcaatagacatactcaatattacagaatagaacattataaacttaaaacacaattaatagtacataataaaagcattataaatttaaatatatattaaaaattaatatatatataataataataaagaataatatattttaatgtaatttttaatattgtagttggagtaaaaaatgttttggatactaaatttagtctgcagattggaaatgctcttaaaaaagatgcatctacttatacttatatattaatgatttttttttttttggaatatataaaatatatatattgattaatgatttttaattcccttattttttttgttgattcatgcaatagcattcatttgtataaaagttcaagtaaaataaataaataactaagacaagtgggagaaaatttgaacaagtaataaacataatagtcaaatattaattatattatatatatattgtcatcttaatattaaataattgcaattattctacaagaaatgtctatttgtataattaatatatatttttctacaagaaataaaaatgatatgtagtgacagtactatatgctttgtgacttgttttgattgtgatcatgttagttgatttcttgcttgtttggtaataaacatgaaaatatataaatatatagggatatgattttgtcccattatacttttacggattgtaattcgtgatgtacggcagccgtcagatgagggagttatttga

SEQ ID NO: 61774 - DNA, 4100 bp, Cannabis sativa
aattaattttataatttttttactcctaagttagtaatttaaatatatatattaaaataaacagtcaaaataaatagttgaataaatatgctactttcatcaaataatgagctttatttttataagacattcgatctccattattagtcttacatggttattattctaatgggacttcaaggcgcttgtcatcctcctaatggatggtcactattggataatttaacactgtaagatctcaaaagataagtactttatagattctttttctagtagacttatcccttaagatgagtgcttagaaaaaagtttatgagtatgaaacaatggtagaagctcataaaataggaatgaccttgactctcgcctaaatgaaacaacgttagattctagttttgatcgactgaaaggttgcttaaatagtgtctcttttagaagagctcattactaattaactagtaatatctttaactctcgcctaagcgggatactgcatatcatttagttaaaaactttagaaaatttaaaatatgtttaggtttaatatttttctcatatcttccatacttgattatgtatttacgattttatatgtgaataaaaatcataatgaacatcgctttaatttttgttattgattatgtagtattaatttcaaatctttattgttagtctaacttagcatggatggtcatccattaaacaaataaatagtgttagatcttgcatgataagtatttagtagatacgaaatctaattgactcatccctaaatatgacaacttagattagtatttatgatactgaaacaatgaagtagtttataaaataagaataactttgactctcagaacatcgttagattcttatattaattgaaattgttctttagatttcctctatagctttttcttaggaaattgctataatagtacatcactggacaagaatgattataatcatctgcttatgatgttgctctattttcttctaagaaaatgagtagcgtggatgacttattcaagatattctatccatgaaatgatgactatcctctttttttgtctttcaataattgaatctccttcctaaagttctacttaaaattgattgaacatatacttgacttatagttctaaaatcgatattaagcattttggaagctgaacttagagtttaataatgtcttagtggcggtccaaactagaatagtaatgaatttgtagagtacatacacactgaatttaactttcacaagtttagatatccaattcatggatcaaactaagtgttgatatatgaacatgagtttgatgttttgagaccgaatatccattaatattaaagaaactctttgttgtaactagaactaggaatcatatacatcaaagaatggtaatagctatcgattatctatggtactctatcttgtcatagtagttttgacaagattattctttggaaagagatatttgtgttacataaccacttggatggtatgtcaggtgtccttggacatagggatgtacaagctaggggtggttatgagtaatttttcaatttcttagacgattactatagatatttaacttatgctagaaatttgaaatgtttcaaaaatttcataaatttctagcaaagacagttaagaaagtcattaaaagatcttgcgaatcgataggagtggagaaatatttgacatgcaattcaaagatcatttaaatgaacattaaattgtaattgaacttacctcctcacaattttaaagtcgaatacttatgaaatacttagatttatgattagtaactagcatttaacaaagtccttctaaaaatatatctttgagataccaaacaatatattaaatgtcgtcccatctaagtctgatcatatctttaagaatagctagaactgctaactgagattcgcatgttttttttggctattctaaagtgacttggggtggactacagtacgatcagactagagagtgtttgttttcacaaatactgttgttatagatgttgactacatagatgtaatcttaaaaccaaagtagcaaagaagtgagatactattcgattatatccaaaattgttccttcatcttatactatataagatagttctacagcctctattgtattgatacaactaaagaggtctatatcactgaagttcctaggtatattatcattataccgaatcattgtgggagggtttctaaaaacccaccctagtatgacttggatgacactagtgatgacgaaccaatgttagtttaaactatcattggatagtccagaaaaggaactaagactcgaagcctagagaactatggtttagccattcacatggagcaacatagagtttttagaatacaagactaagatgggaaaccatgctcagtctattaaatggacttaaggaaatttacttacattcttgcaaacaacttacattagtaagatgctagagcaattttcaaatggctaactctagtagcggtcacttgacttccaaacatgaagtttatttatctaaggggttgtttccaactgctctagaaaagataactgtccagaaaaggattccctaagcatcaattgtaagaggtcttatgcatactcttgtatgcaattagaccagacatatgctgttgagtgggagctgagtaagtattagtttaatccatacatgaacattggaagataatcaaacacatcctaaaatataagaagaggaaatatatgttagtcagtgtgggtggtgtattaaaacccttaggctacagtaccaaataagttttctagactgatataaatgctagaaagtctacttaagaaatggtaattactctggggtggagcagtggattctagagaagtgtaaaagcctatctagaatccctaactctaccagtaaggatgaataataaggatgccctaaaggcaattaaagaattattcaaactcaataaagtttgatacaaactttggcattatttacaaacatagaataattgctagtgtgactcggtgttgacacaaatacaattaccaaatagtaaagaatcatgtaccctaagaagagtaaatcatatagatggataatttacaaaatcatgtactttgtgactaaggaaaatctaatggtggggtaggttgatgctgaatacaacctatcaaatcctattgcataatttatgccaaatactatatatgatcaaagacatcaagtatatgtgattatactgaaatgcactttagtattatattagtgcatgtgagagtatgttgggattttatgccctaaataaaacccaattcaacatatttactttcaatgaagatcaaaaatcatagcacgacctagtcataagctttgttcacatattttacacatgattatcaatcccaaacatatagttattcaagattacagtgatgtcatcacaatagaaagtaaatgtgattatatgcttcaaattatttagtcccacgatttatcaatgcattagatttacactgacgtgattatcaacaatggggtttacttacacttggataagttaaatgtctttgttaggacattagtaaagtaaataacatcagatgtgttggctatacatcgaactggatcgatatttatagcagaagagatatcgtaaacttaccgtaatatcttttctaggtaaatctctaatagttgatcttagatcaatgatcttaatcctgagatggttatgttctaacttaatgtgttattcttattctttgatttgttcattcgaaacctacctgtaggtttggctcaatacttacatcttcagagtagggtagtacaactgagtgggagtactagtcatagatatggtatccatagcttctttaagtagataaaagtgaaatggtagtttctttagagcttggctaaatgcgtttaaatgattgaggtctcattctggtaatcataataattttccaaaatattatttacatgtagttatgtattttaaggataaaatacattgaaaggtaaaacggtaatttagtccctattcaatgtagaccatctacagaggatcattgattatttaga

SEQ ID NO: 61775 - DNA, 695 bp, Cannabis sativa
  modified_base (548)..(554): a, c, t, g, unknown or other
  modified_base (581)..(589): a, c, t, g, unknown or other
gggtttaagcttgtattaactaaatgaatgtactcattgcttcttgctcacttggctgtagcttctttctgctctattttttggaggaaaattttgtgatactaatttatggatggcataaatgtgtctgggtttttagtattacttcaggtgatatttatgtttgtatttagttgagatgtaatgctatttctgacaaatatagtattcaagatgaagaggaatattttaataatgttatatttatttatttaattttttttggacaaaatgctttatttagtttaatctgtcacaaatgtagtgtaaattagtttaacaagtcaaaagaaatattcaatttccattttaagtgcatatattataacacttgcgtttttcattttgatagaacatatgttctttatgtgcatctctatgaatactatgttttgattttttagggtgtttggttgttgtgaatattttactaggatctagatttattaacaagtatgtatgttgaattaacactctaaatatgaatatctctaaaacaatgaaataannnnnnnagggtttaagaaaatcttacattgatnnnnnnnnnatataatgactcattccgttcaagatttgtagcccttaatttctttttgtagtagagcattatcaagatttgaacctggatctctttctctcctttgggtttggtt

SEQ ID NO: 61776 - DNA, 3525 bp, Cannabis sativa
acattgttactctctcaagaacatcgaatggattctcaccataaagaacttgactctgttaatcttgctactaatcgtaattttcgtggcaaaggaaatgtttcctctaacactgcagcttatgatcaaaaacctcgtggtgattactctactccttattctggccgtggcaatcgtggtccttggaatccatatgctgtcatgccaagatccaatcctcctggtttttctggttcttctaatggccgtggtttttccccaattcctccatctaattcgactacaactcctggatctggttctaaaccagtatgccaactttgctccagaacaggtcatattgcctctcgttgttaccagagattcaattttgattttccaggtgttggtgctgctaacataggccagccctcagccaatatagccactgctgatacagttcttgatgaggcttggtatcccgattcaggtgccacttcccattgtacaccagatccaagtaacttcactcagcaagaaccttattgtggctccaatcaagtgcacatgggtgatggtgctggcataccaattcagaatgttggtaagacactttttcatacaccatttacttccaaaactctggttcttgataaaatgctgcatgtccctcaacttaccaaaaatcttataagtgtttccaagtttgccttagacaataatgccttttttgagttttatcctaaccattgttttgtcaaggatcaggtttccaagcaaactctaatggaaggcaaacttcataatggtctctatgtcattcaacctaatcaacttcagctcacaacctgtccatcttttgtgcatcccccagtcacatacactgctagtcatcataatgatcagcaacaatctgtcaatgtctgtaactctttttctttgtggcataagaggcttgctcatccctctagtcgtgttgtcaaatctataatggtcaattgtaatgtccctgttaataataaagaacacattgagttttgtgaagcttgttgcaaaggaaaaattcataaatttcctttctctcactctactactgtctattctaagcctttagaactcatacacactgatatttggggtccatccccaaccttatcctctaatggctatagatattacatttcttttattgatgcttactcacgatatacttggacatttctattaaaagccaagtctgaagctattcagactttccaaaactttcgaactcaggttgaaaaagagtttaatcactctattatcacagtccaatctgatggagggggggagtatcaagcctttgagtcttatctcttggctaatggcatcaaacacaaagtctcttgtccaacaactcatgagcagaatggagttgctgaacgtaagcataggcaccttattgaatcggctctcactcttctagctcaagcttctatgcctctgagctattgggatgaagctgtgagaacttctacctatctaataaataggcttccttctcctgtcattcaaaatcaaactcccctgttcttattgtttcatcagcaacccgactattccaccttaaaaatttttgggtgtgcttgttacccaaacactaggccttacaataaaaacaaattagaatttcgtagtgttcaatgtacctttcttggttatagtcttaagcacaaatgatacaaatgtcttgctagtaatggcataatttacatctctcgagatgtaatattcaatgaacactcatttcccttctctcacacttcttctcctactgccagcaattcagatcagtcatgtactaatcttcccactgcttctattcccaccttgtcctatgtacaacatgttccagccatctcatcttccaccagtcagttacctacaccagaaacttcccattcacacacacagccctcaccttcatccacttcctctgtcccatctcagtcactcccaaacccacaatcctcctctcaattgcctactacatcaccaagtgaacctgttcaaaccaatgtccatcccccagcacttgtcaaccaacatccaatggtaactcgagcaaaagtaggaacttacacaccaaagacattattggtttcccaaactccattatcattggcagcagctcttaaagatccaaactggcatggtgctatggacaatgaaatgcatgctttaagaaccaaaggcacttggattcttgttcctctaccccctggtaagcgtgcaattggctgcaagtgggtacatcgtatcaaggaaaactcttatggttctgttgataagtataagtcacagctcgtggctaaaggtttcctgcagcaatatgggtttgattttaaagaaacctttagccctgtagtcaaacctacaaccattagaaccatattaaccattgcagtcactaaaggttggagtattcgacagctcgatgtcaacaatgcgtttcttaatggtgatctcacagaggaggtatttatgactcaacctcctggttatgttgacaaagaacatcctcatatggtctgcaaattacagaaggcactatatggtttaagacaggccccccgtgcctggtttgacaagctcaaatctgccctttcacatcttggctttctttgttccaaagcagatcagtctctgttcttcaagattacatcttctcacacgatatttgtactcgtatacgtagatgatattcttgttactggctgttctaaagtacatatatcagctttaatatctcagctccattcctcctttgccttgaaagatttagggcctattgattacttccttggggttgagattcatcactgcactacaggtttacatctcagtcaacaaaaatacatcattgatcttctttgtcgagccaagatggaaaatgctaatctacttcctattcctatggttggtggagataaactaagtgcctatgatggagatttatttcctgatcctcatctctatagaagtttagtcggtgcactgcagtatgccacgattaccagaccagaaatatcctttgctgtcaacaaagtttctcagtatatgcaccaacctcgtgaacctcattggaaagtagtcaagagaatccttcgttatctcaaaggaactcttgattatagtcttcatatttggccttgctccaaccttgttctcacgggtttctgtgatgctgattgggcgtctgatcccgatgatcgtcgttccacaacggggttctgcatttacttaggatccaatctcatttcgtggagttcaaagaaacaaaagactgtttctcgatccagcactgaggctgagtatcgcagcctggctcatacaactgccaaagtcatttggcttcaatctttactggctgagattggattttcacagctgccaactcctacaatttggtgtgacaatcagagtactgtgctcttatctgccaatctcgttcttcattctcgcacaaaacatattgaactggatctttactttgtgcgagaacgt

SEQ ID NO: 61777 - DNA, 666 bp, Cannabis sativa
tgtccggcgagattcatggagactagtactgttcggaagttccaatctatttgctgacctgtctctctcattttcctccttgctctcaacagttgctaatccttctttcctggtttcttggactgttcttgatctttcttgaacttccaatagggccttgaactgttgctgaatcgtttcttgaagcgattcttgaagctgttgctgaatctgtaaagccaatcccttaagcgaatcatggagagaatccttgagtccagaaacttctgactttagggcctcaatatcctcttcggacaccatggtagcatcacttttctctactggtttcttaggcattgtgtctgcagtcaccgcaccaaattgatagaactttcttgagactagaaggtttctatctataatttcacacaccagaaaattaatccctcaaaaagaatgattactttattgatattagtggccaatagtacacctagctttcgagaggctagtctctccaattcaaccattcgagagggttgtctctcccaattgagtcaaaaactcatctaaattcccaactgtcctaagttagattctcagcctcctatttataggatttggcccaaacaacaaattacaacccctacccctccttagtacagcagccactaaaacaaataa

SEQ ID NO: 61778 - DNA, 1806 bp, Cannabis sativa
gtacttttagtgtcttaggaaatgaccattataacatggtttccactttggcaatgtcttctaaaacaccttgtgccaagatgatatgccccatgtactctactcggtcctgcccaaacaagtattttttttcttgttggcattttgttatcccgatttttgcccacctgacgtggcatgtccacgtggccaagaacaatactacatggccactcagggaactgtcccatacaagaagcccccttctattgaaagggagatgagcaagagggacatttgtaagttctaccattttcacaatgactttcgccatgacactaatgagtgtcagaatttgaagagggagattgaattcctcataaggaagaacaatccccacttgcattgttatgtgtataataaccaatctgaggcacaagctacctagaatggaaaccctatgccacctttagtggcgggtcacttaggggtcattatttacagaccccacattacaagcgagactagcaaggctagggaacgcctatgctctgacattctctcacgagccacaaagtgatatcctagctatcaaagaaaggggctccaagtaaccaaagctcaaagagcccactatctctttaacagaaggagatgctgctcaagttattttcctgcacaattacccttggttattactgtacaaatcgggaatataacagttgcatggtgcgtggtggacaatggagcctcctccaatattatttttagaataatatatgaaaagatagggctctagctaactgatatggcaccatgcacacaagtaatttatggcttcttggccaaggcattgtgcccatagggtacatttgattgcccctaattgttaaagagaatccaaaaacaagaacgttgatggcacagtttgttgtaataaacgtgcctttagactttaacgccgtgattggttgtccagccctgtatgacctaaaggcagtaacacccatctaccacatatgcctaaagttcccaacaaggcatgggataggatgtttaaggggagaccaacaatttgtccgtcattgttacaacttaaccttgaacaaagcaaataaagagaagatgcccgctaagagatctaatcaagagcccacgaaagggcaatgatttccaacccaaagcagggacgctgacatagatcctcgctttggggatcctacaaaatgctttggacttgtagaagaactagaggaagtgaaggatgatcccacttttacagctagaagactgaaggttgggaatggtttagtgacataaataaaataagtattgaaaaaatttctaagggtgaaccttaaccacttcacatggtcacatggagacatggtcggaatagacccctttgtgatgacccatgctctcaatgttgatcaaaacttccacactatacaacagaaaaaggaggttactggataaagagtgcacccaagtgctcaaatatgaagtcaaaaggctaagggcccataattttatcatcaaagcattctatccactttgggtatcaaaccctgtgttggtgcccgaaccaaacaaaaagttgagggtatgcatagacttcaccaacctgaacaaagcatgtccaaatgactgattttttctttgaaagatcgaccagctagtagatgctacaactgtccatgaaatccaatgcttcatggatgcttactttggttacaaccaaatcaagatgcacccacctgatcaagagcacataagcttcatcatagacttaggcctatcctggtacaaagtcatgcccttcgg

SEQ ID NO: 61779 - DNA, 881 bp, Cannabis sativa
aggttttctctttgggtgagtttttaattggtattaacgacaccaatattgttcttattccaaaaaaaaaaataagaatcccgtgaagatgggagatctaaggccaatttctttgtgtaatgtggtgtacaagattgtttctaaggttatggccaaccgatttaaagttgtgctgccacaagtaatctctgacacaaaaagtacttttatacctggtcggttgattttcgataataacatgttgtcgtttaaaattatgcactatttgaagcgtacggtttttaggaaggagagggttgtggtattaaaacttgatatgagtaaaacgtatgatagggtggagtagaattatctcaggtttatgcttcaaaaacttggttttttggaacattgggtgtaactggtttcatgttgtttttctaccgtgaggtatcaggttgttcgtggtagtcatagtatggggactattgttccttctcgagggattaggtaaggagaccctttgtctccttatctatttttgatttgtgctgaaggctttttgacattacttcgttagtatgagcggaatcaattaataaaggggtgttgtgtggctaggagtactctgttaatttctcgtatgttattttctaatgatagttatctttttgtccaagctaacacaagaggggctccaagagtgataggaattctacatagttttgaaaggatgtcaagacaaaagattaatttggcaaaatctcactactacaagaatggtttttcttgacatttttaaacagtcatttaaagtgttcctgtaacagggtatagccgacagttttaaaccgtcgagaatgtaaaaaaaaaagagaaaaaaatctatattttctcccatt

SEQ ID NO: 61780 - DNA, 802 bp, Cannabis sativa
tttttttctttctttctttttgggtacgggatttcatactcaagagaaaattagatggttgccatttgagtcacaaattaaattgccattgacataaaaattagatagtgttagtgttaatatcgttagttacataaatcatcatactaaaattaacaaaccattcaaaataataataatagtaaaaaaaaaaatttctaaaatttctattatttagaaacttttgtcacacaaaaatattcagtaaaaattcagcaaaagaaataaaccaaaattaattcatttagatttattatatatatttgtgatatttatggtgaaattcttttaatatttgtaattgttacatataattttaataaaaaaacataatgataaaaatatcttatcttattattttattgcagtcgtattattttttgattgttaattatattatcatttaagctcattaagtgtcacctcaaaaaaaaaacaagtgacgacatatttttttagcttatttaatacgtaattcaataatatttctgagttgacatttaataaataaaaaagtacgactgcaactgttgccctgattttgcttaaaatacgtggactaaccagatggtgacacgtagatggaaagggtttaacatttgaataaatcagctaagtctccttaagcgcaggattactctaggcatgcctcccggagaaggcatgtgagtctcatgtgctctcggagagcaaggctacaacaaaggcatctccgggaaggtgtcaggtctcatctgaacagtcatctcgcatttaatgccgc

SEQ ID NO: 61781 - DNA, 2214 bp, Cannabis sativa
ctctatcctatacaatgttttggccgaaaaaaaatgccctgagacttgggtcattatgccacgtatagtatataatttaaatgcttaaaataccataatctaattctcaaataaataactatgtttgacttgaaagtaagataatagtacccacattcttatcattttggagactaacataaatcttatatagttcgtaaaaataatactctattcatgaagctaacttattttatgcaatcactatttccacatcgagatttctaagctagaataataataaccaaatattttggttattacaatcaaccacatactctcttgagcgaccattgctgctgctgctctatattctgcttttgtggttgataatgacatttttggttgtcttttactacaccaagataggactccagatcccagcttgaatacatatccagtagtgatcatcgggtatcatgatctccaacataatctgcgttgcagtatccaacaattttaacctcgttacttcttataaaagagaccatagttaatggtatctttgacgtacctcaacattcatcgagccacttccaaatgaggcttctttggatgttgcatatatcggctcactactccgactacataagaaatatctagttgggtcaatgtaaggtagattatactccccactagtttttgatacattgctccatctcgcaagtccttctcagcatgagcacatagctttagcttccataggtcgtgagatggacttccactcgagcattccaaacctttgcaataactctttagtatatttttgttgactaaaaaataaaccttccccagtctggtggacttctaatccacggaagtgttttaattctttaagctccttcatttgaaagcaaactgacaagttgtcctttgtttgacaaatttttgctttatcatcgtcagtaataataaggtcatcgacatatgcaagagcaactacaatctttgcttcttttatttgatgaataagtttgaatccgcatgtgccattacataaccgctctccactacgaactcaacaatcttgttgtaccatgctctcaaagcttgcttcaaaccatagagtgcttttttcagtttaaaaaaatagtcttgatgagctctatcctcaatttctcttgcttgcatcatgtatatctctcaatccaattctccatgtagaaaggctttcttcacacccatctgccatagcctccagtctttactagctgcaagtactagtagaacctgtactgttgtaatcttagctactgggctaaatgtctcagcatgatctagcccatattgttgagagagtcctcaagctaactgagccttatatctctcgatttgatccatcaggaagagttgttaccttgtatacccatatgaaagaaatgggttttacgtccttaggctttggcaccggctcctaagtttgatttttctctaaagcaactatttcttctttcatagcttcaagccacttggagtttggtatgcctcctcatatgactatggctcattaaacttctcttctttagctacaacaacattggcgtaattgggatttggcctccgtgcttttattaatcttcaaatttctggttggccatcatttggattatcttctactctctaatgcactcatgtatgccagggactctacgttgtatattcgttgtcttcttcactctgttcttcttcatccgtttctatagttgaaggtaactcaacaatctgctcccccattttcttctacaaattctattccatttcattggtaccttttgcggtgaccaccatgatgaagctttgttgaataccacatttcttgagatataacactttctagttgtagggtcacaacatttctgccatttccattggctatcgtatcccacaaagatacaccgtatttccttcttgttgaattttctacgtaggtggattggcacgaatacatagcacacacatccaaatactcaaaagtggcttactgcaggtttattatagccccacaatttctcaaagggtgaaatgaaccctaacttttcttgaggaagtctattgatggcatgagcagctgtcttcatgccttctaccaaaaatttccttggaacattcttcgtgtgtagcatgcttcgacatgtccttacaaggtggcatttcttcctctctgctactccatct

SEQ ID NO: 61782 - DNA, 673 bp, Cannabis sativa
ataaattaaaaatatcaaattctaccaaagcacaacactatatatatgactttgaaactaacaattaagtatataatttcatattattatatatgtaatcctttattttatatataataaaaagtaaaaagtaaaagataaaaaaataaaagccaaaatcggattagtcgggttattcggtgtaattgggcgggttggacctattttcaacccgcccaattaacagattgggcggtttgtaattttttcaagttatttcggtttgtaaattttaccggttttttcggttcggtttgggcggtttacaaattttttttgtacagccctactcggcaccaccaaggcctgatgaagatggtacactgggctgagggtctgaagcagtggcctgaaaaaatatatcctaaaaaaatacggtaagcatacggtaatatcacaaatcaattacatagatatcgataatgtaacaaataagatacatagtcatcgacgtcatgtcgacatgacatcgataaaatataaattaacaaaaaagctatcgacaaaatatcgacatgatgtcgacattctgtcaataatatcaaagaacaaaataaaaatacaatcaagttatcgacaaaataacaacattatgtcgataatatcacacaacaaaataaaaatacaatcaagt

SEQ ID NO: 61783 - DNA, 4527 bp, Cannabis sativa
ttataaaaaataaaataaaaaagtattagacattaataaaatttgtagataccgatacaaaatgtactaaaataatattttggaataatacttttggaaggatgtactttacagttattattattattattattattattattattttgtatgaatagaactaatattgaaaatgaaaattaattaaatctaaactttgaggtgggatccaaaatgtactcttcatacaatcacacatgcacatactaggtttctaaatgtataatttttccatatgatctttaattaatcatcatattatgactaatttgatatataagctttaattatatcaaacactactgctagctagcttgactgaaaatagatatattattaattcataatggcaacaaaaaataattaaaacaaataaaagtgagaaaagatagaacaattaagaagtactagttctcttcatgattattcttacatcttttctatccccaaaaatgccttgagtttctacagaattggtaaacttgccaattctatgaggacaaatagcattactcatcctacaaatacacaaggagattgaaattcattatcagaaagttgtaattctggtctccacaagtagtgatgatcaatgttataagcttgctcatcttgaaatggttccagtaaaagcagctgatgatgatcatgatcatcacgatgatgatgagaagaagaagaagaattagtactagtacttgtagtattgcttgaaatattctcagccacatgattaacatctatgaccgttggatcattattgtaatcttcatcattttgttgcagaagtactggataatgatccccttgatgaaaccaattatgaccaccgtctttaccagcggaaagagcatcaaattcttcttcaccaccaagtttatcatgatcatactcatcatgatattgatgatgatgatcttcttgatcaatattggaatattgaccagtgagttcttgaacaattgttctgaactctgaagcgtttttagcttcaaccatcaaaggactcgaaatatactttatttttatgggatttttcttagctatttttttgttgttggaactaataatactattactactactacatctctgcctctttactagaagcactgatgatgagttttccattttttttatatattgatattatgctttactatgtatgtagtttagctagtcacacatatatatataatgcctccatcattttcatgatagtatattacgatgagatctttttattaataattaattgtgtgattgtgaatatttttattgattaggcttatgtatattgattaattaatcaggaggttacttacaggaaaccaagatcaaggaaatgacaaaacttttgaaaattcaaggtattattggactattgaaaatcactgatactgatatttcattatgtggggtccggtgttgtggaaactcatattctaaaatgtctgcaaacttttattgatttttttattattattattatgaacctcatattattatgtccttgaaaaataatgttatgtacctcatatttatatatatatctccttatctttatctatggtgacaacgtcatatatatagtgatactatttatttattttaagaataaatatgaattttccacttttgaaatttttttaaaaaaaaaaaatctttgaacaataaaaataaatacaaattttttatctttagttgcatttcattttattttcgttgaagataatttattaatatcacgatataattattgtgtgtaagcaaagtccaattttgaacaaaagcagaataagtctctacttaaggactcaacataggggctccaaaattattttttccttataaaaaatataaacactttattttgtttttcaaaaacactacatatttctctcatgatgaccaaataatattattttatcttaaaactcacaaatatttaggatcgacccaaagtataattgcttatttaattaatttactctacttagaaccagttaaaatggtcttaaaaattcaaatattgattctaaaattatgaatacaaagtcttaaatattaagaatatttgtggcaaaattatctaaattatgcgatttgtgaaattaaccacacaatttgattttttagtggtaaaacccttcaaacctccattccattttggtttttacactttcatccaaaaaattctgttaaaagccaattggactcttgacatggacataagcatacacacggaaaatttttagtggtccacacaaaaataattatttaaatattataaaaaagaaaaataaaaataaatcatatttctcttttatttgttttactttctcctttcatattattttatttaattttcctattttgttttttttttatttttcctaaaacacatacacacatgagaaccgacctttacaccaatccgcgacaagcagtcccaagcatagcaccctgcggccctaaccaagaccaacggagaccccagaaccccgaccaacaaaaacctccattcgattttcctcaaaaatctaaaactcatctcaaaactttcgaaactagatatttcttaaatcgaatgtctcatgaaaatctaattcaaaaaacaagtcatgttaactggtcccctcctctcggagccaacattgtacgacgagctaaaccccagatcctctctccctctctcacgtttccccctctctcactcacggattctaagatcccaaaaaccctaaatctcgagaactcaatcgacggagcactctcacgaaccccctcatcatcgatttcgcttagatttgctcatgtggttcgtcgtctagggttcgtcatgatgttcgttgacttgggcttgtcacctaaggctcatggtttggggtgtttggtctcgcagaagaagaagaaagaggagcgacatctaatgggtgaaaagaaaaagaaaaagaaagcaaaaaaataaaaagaaaagaaaggaaaagaaaaataaaataaaatgtatttatttaattaacattttattttataaatttaaaatgattttttataatatttaaacagttaaaattatatggaccactaaaatttggacatgtgtacacttggcacttagcataatttttttagatggaagtgtaaaaaccaaaacgaaatagaggtttggagaattttaccaccaaaaaattaatttgtgtgcttaagtgtcacaaattgtatagcttaagtatttttaccgccaatattcctaagttttattatagagtactatctatgcaattattttttcctcaactcataaattacaataatttagtcctaaatcaatcttatatggagaagtgatttgcagaatgttagaatctgggattgtatggtaaggtgcatggagttccatctcaaaattaattgacaatgataggagtaactcatgcatcttatacgtggtgtattctttcctattagtaatgactctctaacatcctctctcaagatggtagctatttgcaaaattttatggctcactatccccgaatcacaagtgattctttttggctcgtcttttcggaccgattcttgaatttagatcatatacatgttagagttttatttggctctggtaccaagttagaattcaaaatagtatggtagggtgcatggagttctatctcaaaactaattggcaatgagagaagaaactcatgcatcttatatatggtgttatatttccacacattaatagcacgtgactctctaatagaaattaaaatacaactgaatgagcgaattcgtaattattatatagtcagagtagatttttttatttatttttcttaaaaaaaaagtaatttgaaaggcacaaccttataaatttataattcaaaaggtaaaaatcagggtcggccggaatgtaagtgcttatttaattattttactctacttagaaccaagtaaaattgtcataaaaatttaaatattgattataaaattacgattacaaagtcttaaattttaaggatattggtgacaaaactacttaaactatgcgatttgtgacacttaatctcataaatcaattttttagtggtaaaaccctccaaacctccattctgcttttctttttacacttccatcgaaaatatttttttaagtgcaaactgaactgctcacatggacttcagcatgcacatgaaaaaaatttagtggtccacacaaaattaattatttatatattataaaaattaataataaatcatactattcttttctttgttttactttctgatccttttatattattttattttattttcttaccttttgtttttatttttcacacacacgagaaccaaccttaacaccaatctgcgacaagtcccaagctcagcaccctctgttaggttatttttagtattaattttagattaagtttaatatatttttcatttagttctactcttgtttggagcaattttacgcttt

SEQ ID NO: 61784 - DNA, 1665 bp, Cannabis sativa
cgtcccaaatcggtgatgactaaagttttagaggttgaggtccatctatacaggacgagaaaaagtctgattgatgtcttcaagttgtgctggtggttgggtacaggataaattagaggttaggaatattctcaataaatatgggttcaaatctctcttcgcttttagtacccaaactagtcgtggggttccgattaggtttcatgctaggaacggaacatctttgctcccttataaagatggatctgtaatttacgttgatgacgatctcaatgtatcttcttcatatatagatacatatatatatatagatagataacaatttaggttgggagaaattgctatgtgtgttaaatatcagagcaattttggaaattagattttgatagttaatttgttctggactgacctaaccatcgtttaaccctagttgacttatttttattttaaaaaaattttgaaatcgggtcagactaggcctaatccaaaataaaatgtgttaggccgggccgagccagactggggtaggagcccgataaaaacccaaatcatgcgagtcgaaccgccgttccaacctgcgaaaataacccaaattgccatccctatacacgtaaatatgaatttggtacaaatttaccaataaaaatttggataagttgaggaatatctcttttttgtatccattaatcagtcaaccttgtaattaactgcctactatgtgattataaataaaggcaagttagatcaaaaaagggcactaaaaaaccatcagaaatctaataagattgactcgtggaccatgcaaaattttaactgcaaaactaagtaaaaaatcctttgcgtaagttgcctaatatacccttaccctgctcttataagtagtacatgatttaacattaacttaagaaatataatgagaacatcatctgtaaaagtaagttaatattaaagaatataaaaataaaaataaaaattaaaacaatataataaaatatggatacaatacaatttcctaaaaatttcctatcaatgattgaaaatatatgggagaaagcgcataccaacatgttcttaaatttttttatttctttcaaaaatccctttttctttttcccttaaaaaaatcctttacacaacaaacagaaaaagaaattacaactcataggttcccctcttagaaaagaaaagaaaagaaaataataaaaaaattacaactcataagctgcaattgtttatcgataaacatccactattgttttgtttattcatgttttaaatgttgaaagtggaaatgggtgacgggtcctgttttgtttactcaaatcaaatgttgggagaaacaaatattcaatacgaggcagagtattattcttatgatgggcacacccgttttcaggggttatacggaagaacatctctctaagacagaccctttttagtctatgccgcttttgctcatcctcccttcctactgtaagcttattttatcttcaatttctctggttcaaagtagaattcattttcagttttctcgtatttctaatcaaacaaaatatttctgaattgaaaagccaagaactcttcttgactggatcttgacttgacgacgatccagtcaacaattgcgttctacgtcttgccgaatgaaaatctctgctatcaatc

SEQ ID NO: 61785 - DNA, 770 bp, Cannabis sativa
tgttgccaaaaaggaagaaaacttacgggttaaatgggtgcacacagtttacatcaaagatacaaactggtggtgctactcaatacccatacacgggagctggtattggagaagattggtagcactaaaaaactagcttagctctcttgtggacactcaccaatttgaggcaggtacatacaatattgcagctgactactctttattttgtcctgtccaggagaaattgagatggagtgaactggtttggggtagattcaatctaccaaaccatagtgtcattctttcgattacaatgcatgtaaaattgagaactaaggacaggttacacatgtttggcattatagataatgttgattgtgtattctgcagcaatcaagaagagtcaaaggagcacttattctttggctgcttctggacattgcagtgtttttctggtctagcaaattggctagaatggaggcactggaataagaatttatcctgcctaaccaggtggatgcaaagagttcaaatgagcaaattcaagaggaaagtaatggcatcagctcttgccagccttgtctatcacatttggagaagctgaaatgagatgatatggcaaaagaaaatacccaatgcagactaggtggttaaacaaatcaaagacaatgttaaacaaagaatccttcttgtatggccgaagaaaataagtaagaaaaatgaagtgtgattcaacttattgtaaatttgtatagatttcaaggttttacctaacatgctttggtgct

SEQ ID NO: 61786 - DNA, 690 bp, Cannabis sativa
tattctttttagtggtggaggttggggctatatgaatgaggcagtaattaatttgtttagtagcataaaaaccatgaaaaaacttcatcttcaacaatgcaaaaaagagtctttattaggttattatatctgtggccttcatcaacataggtaagaatatctacactctcatactctacaataatttagagtgcttttcttcacatctctatatagattatttattattaaactcatggtatgttcaacttttacattattgactattatttttaaactcatctttctttcttttcacaagtctaatctttatcttttggcatataaaataatatatgttgttttctcttcaaaatattcaaatttaatacccttttccataaaaaagatacttcatttataagtatatcattttatataaggttggctaaaccactctaaatgtataaatgtataagagcatctttaatggtactcttaattatttttggctaaaatagagaattatttttataattgttgctccaatcaatcattaaatttgtcaactataaattaatttcaaaaaaagaatataagaaaataaaaaaaattacaaatatacggtcggagtttttaatatttttatggggttttagattttatttacataaaaaacggttttaagtgtatttttatgttatatttttg

SEQ ID NO: 61787 - DNA, 522 bp, Cannabis sativa
caaaatgaattttgatagaaaaaaatagaagataaaagagtttggcaatcatggacaataacaccaaaaactgaactaagaggaatcttgcttcgaatagcttggacagaaatcagactatcagactctaactcaacagtgtgccagttttgacttttaatccagcttaaggcttccttaattctaataatttctgcaacttcgggtgtaaaagttccaggattaatacagccagctttgccatcaataagaatgcccgagttgttccttgccaccatgccataattcctgcccactattattaatgggacattgtagactcccatcaaaataggatgagttttagggtttggttggagcattttgtgggaaaaattatactatatataggtttttagtgtgccattggagatggccttagtgacgcgtagtgaatggacattgaataattttagagtcactcaacatgggtcactgatcttgtttttatattactccaaaagtctattttgtaatagtgtc

SEQ ID NO: 61788 - DNA, 842 bp, Cannabis sativa
ataatttcataaataatcataattaactgataatttccaaattaactatgcgggctttacagagagagagagttcagacttagagttcagtcttagtgatttagagcttagggttttagggtttagttaaggccctttatataggaaagcttcaatccttttattaggtaaaataagtagatattgcatattaaattagtaaaatacaaatgactaaaatgccccttaaaatagatattttctctctattttcgtaggctattaaggcccaattcccagtctagcttggtgattacgcatgaagttgttcaccaaagtcttcctaggccaatgcctggctggctatgcatttgcaggatgtaggctagccgacctatgctggccatagggctggccacggatgatcggccagcctccttgaggtggttggtccgtcatttgtcatcctgtttgagtgccaggacccctcattggtttaagtgctgagtagatgactttgccttcttgttggtgagttgtactaccacatgatgctaatattagctacgtagaaatgccacatttggtgggaaaaaattgggataacatttccccccaaatccctgtacgaacgtctgtgcagataaggactttccagcttagttagaattgatgtagtcttaattgagtagatattgctgcatttttagtctttgaattaactgcttttgattgtttgatctcatttgctgtagtaagttaattgcattgtatttctacatgctttttagttgaatattgcgtggcaagtgaagcagtggttgttgggttttatgccctaaacaaaactccatttcaatgta

SEQ ID NO: 61789 - DNA, 1253 bp, Cannabis sativa
cctagtacacgacactacaagagaaaatgtaagctttgtaggccgagattgatggaagggtcaggacccgacgtcctcctcgagcactaagcacgcgttcagacaaccctcaggtaacaaccattaggggacaaactaataataatcgtgctcgcaaggaacattgaaatgaacaggagggattccacttgaaccaacttacacataggtaacaagtcattcgaaacactgatcgcaaaatacaataggaagaggatgccaagtagtgtaaccctcgaagtcgagcccagctgcaaattgaagtaaacgatgttgaatcccattcctcttcctctcatagttgttctccaagtgcttataccaggtctggatctgtggaaatgcaacgagggggaaggtatcatgtccacaggggtgatcttcatgacctgtaaggtatcatgaacactaaggttgaataggtagaactactactttagagtagtgttctgtaaggtgattatttagtatttgcaaaggtgctctctattctagtatcttggtaggtgaacgagctccatgctcttgttgtaccttcccagcttgtaggctccctttctagttatctctataacttaattaggggtcttcacagttaggtcctaacactcttgctgctgaatctttagtgttcaggaacactctttggagcagtaggtttcctatgaataatttcctgctttgacttgtttgttgaagtgccttgctaccttttactggtaggcctccatctttaggttggtttgatctcttctttcttctaccttgtcaagggatttcgccagcagggtgttatttattttatggtcataggttgtcctcttgtgagacagtgaaactagctctatgggaaacattgcctcgtagccataagctagagcaaatggagtttggccaatgatcgtcttcttggtagtcttatgcgaccataggacctctaggagaaactcaagcttgttgctttttgcttccttaaggcacttcttcagggtgtccttaagggttttgttgacagcttttacttgctcattttcttgaggatgggccacgacagagaagctttttatgttgccatgcctgttgtagaaatcggtgaacatgtcactgtcaaattatttcttattgtctgacacaatcttctacggaagtccgaatcgacatatgatgttcttgacaacaaagtcaaggactttcttggaggttattgttgctag

SEQ ID NO: 61790 - DNA, 701 bp, Cannabis sativa
tgaatctgttaagtgcagccattcttcctgtcagggcttatacttccttaggctttgtcggtgtcttaaccaaaatattgactattattctatagtacatagttttagtactctcgttgtggagatagtggattgcttagaatttttctcattaaatagtattttactaagttctaagaaattatgtcattttttagaattttatagatcattatgggccttaggtgtattccattttgaatgagactttaaacaaatattatttgtttgaaccgcattatatggcatgataattaagtggtcaaggtgaataatgacttgctacataaataccaatcgtggacaaatatttattttaaaatatagtaatgtattagttatatattcaagtaatggacacttgaataatatatgggaattaagttacatgaacaaatatatgatatgatttgtagtatagtaggaattaaatagaaggcgtgatatgttcattttgatgtataggatagaatgatattatttaagataaatatatagaggtagttattgtaggaggtatcaagtttgaacttagtttaatattttgacagatgcaagaagaataattagacttattaagattaagcatatagagcagaacatgcattcaaagtttagaattttaagtcttaagtttaagtgaacaccacgtggtagcagta

SEQ ID NO: 61791 - DNA, 2703 bp, Cannabis sativa
  modified_base (2649)..(2659): a, c, t, g, unknown or other
tttagtttcttcttggcgacgtatgaagcgtaggtacgggcgtcagtgacatatgataaataccgaatgtagatacgggctcgtctgattagacaatataatatattgttgcaaggttgtggcacgggctcacctgattaggtgatgcaattatgtaccgggcgtaggtaagggctcgtctgattaggcgatacaatatattggtgccaggttgtggcacgggctcacctgattaggtgatgcaattctatgatatatgggtgtaggtttttggcacaggctcacctgattaggtgatgcagttatgcaataagatggttactatatgaggtaacatatatataatttatatgattaaatgaatatgaattctattatttgtataatagttttgtattaccaaatatctgtatactgatgtttattcatggcggatgcagtagtgatttggatttcatcttatgaacaatgtgtgatggtttgattctgattgtgtgtatatgacaatattcgaataataaactatacgattattattattacttttcttgctgagtccttgtgactcacgggtgttatatggtgcaggtaaaggcaaggaaaagttagatcaaccataaggtgatagtcttctccaacaatgtatatagttcttttgtaaactttttataatgtctgtttatgttgttgtaatgtctgtttttagtgttttattttaatcaagttgttaatattatcacggtttttaataattaattaatctattagtattaaactagtttataaaatcacacacgtggcatccctatagattagggcattacaacttggtttcagagttgtaacgccctaatgttaagacacgctacagtgatttttcaattacagttctatctttgctaatcaaagaactttcttgaaaattgtgtcaaattaaaacttttattttaattatgaaactttataaactttacataattatttacaaaattcgggatcccgtttctaaactctttacaaaatattccaaaatacatagttggttaaagattatgattatgaaatcttttaccattctgggaaggccaatgtagtggctgatgccttgagcaggaagggttccgggcaggtaactcgtatgattaagatttcacctcagttagcagaggacatggttagatcaagcatcgagtttgttgtaggcaaacttcataacttaacgctgcaatctaatctgttagaacgaactaaagttgctcagttagctgatccaaaattggtgaagatcagagaggaggtttcaactggtcaagctcgagattttacaatgttagataatgggctattgttgtttaagaccagggtttgtgttccaagtagtgcagaacttagaaacgaaattctcgaagaagctcacaccactccatactcattgcatcccggcactagcaagatgtaccaagaccttaaaccctacttctggtggagcagaatgaagaagaatgtggtagaatttgtatcccggtgcctaacttgtcaacagatcaaggctgaacatcagagaccggcaggtttgttgcagccttagacacttcttgaatggaagtgggaggatatcaccacagactttgtggttggattacctagaaccacctgtatgtacgattcaatttgggttgtggtagatcgattcatcaagtcttcatattttctaccggcaaaaacaacctttacagtggatcgatatgcagaattatacgtcaaggacttagtgagattacatggtattccaaagtctatatttcagatagagatctgaagtttacttctaaattctggcagagtcttcagcgggctatgggtaccaaattgaaattcagtacagctttccatccttagactgatggacagtccgaaaaggacaattcagatgctgaaagatatgttgcgagcctgtgtaatggatttcgagggctcttggagtaaatatctaccactgatagagttctcgtataataccagttatcaaagtacaatagggatggctccctatgaattgttatatgacagaaagtgtagatctcccattcactgggatgaaatgggagagaggaaatacttaggtccggaattagtgtaataaactaatgaaaccatagaaaagattaaggccaaaatgcttgcctctcagagtagacaaaagagttatgcagatccgaaatgtagaaatgtagagtttcaggtaggagatcgagtgttttctacgggtgtctcatggataaacgtttcgggaaaagaggaaaattataccctaggtttataggacctttcgagattctcgaaaaggttggacaagtgacatattgtttagctttgcctctagcttttttagcatttcacaacgtatttcatgttttcatgttacggaagtacgtttcagatagtactaagttatgaaaatcttgagttgtaaccagacttatcatacgaagaacagccagtttagatcctagatagaaaagataaggttcttcggaacaagatcatagctctagtcaaggtactttggagaaacaacaaggtgaaggaagccacctgggagttagagtccgacatgaggctccgtatccagagttgttcaggttagannnnnnnnnnnaaatccttttaaggggggataatgttgtgttttatgccctaaat

SEQ ID NO: 61792 - DNA, 793 bp, Cannabis sativa
gtccaaattcgactggattttgaccagtgttgaggctctctcaaatctctagtcgagagttaggaactttggattggctcgggggtgtgtatctttagttttttttttttttccataatagtagtcttttataccctatatcctttgtgatgttggctttatgccgttttgtgaggtttgtcgctattagtcatttttttttaaagattttactcctttataatcaatgtacattttattgtgtattcagcttatttttcttgtgagatttgtgcaactttatttttattttattttttggactttgtccctatttaacccaaataaaattcaaaatatatataaaaaaaaacaaaaaattcaataattattcccaaagatgctaccttgatactattggcatcatatctagcaatgctcttaaaaaattaccctcataataaaaattgtatggactatataataggaacagtgtatttcaatatacccccataatcactaatgagagagtgagctagctgtcaaaaaatataccgttattgaaaagacgaaaataccctcgtccaacctccacgtcaacggttagtcaaagtgccaagtaggcattatgattactattaagaatagaaaacaagagaagaaaggacaaagaaacttaacacacttctccaaaaaaagaaaaaaatcaattaaaaataaaaattaattaaataaaaataaaaaataaaataaagtatctgaaaaacaaactatataaatagagactcccgctttttatgcctattcacaatct

SEQ ID NO: 61793 - DNA, 966 bp, Cannabis sativa
ttaataatataatatatctgtatatagttttttacaaattcaattaggattaggattaattaagttattatatatatcaaagttcaacaaaaaattattatgtgttttacttaaaatgatcggcattgaagacttgataatcatattgaccataatgttgttagtttggtggtgttgctacaaaatattgtacgattgggatgacgaagaagaaatcctcatagtagatgttggtgccaaacaaagtagtattattcaaatgtttaaaaattgtttcattggtgaagaaaattacgaagagaatccaataataataagagatggacttgaggaagaagagtgtgcaatttgtttagaaaacttattggataatgaattgaaaacgagcaaaaaggttgttgagtccacaccgtgcatgcatgtgtttcacttgcattgtatcactaagtggactcgaatcaataaaacatgtcctatttgtcggcttaaaatacatcaattgcatgtcatcacttctagggcttctcaaaaatttattgatcagcgtgatattgtagagaataaagtttaaataaataagtttatgttatttattagtcaatgtgtttttaactttttatctagttttgtaataaatattcttttgttttagaaagtatatttttttggttatgtattttttttggtagaatttattttcttatgtattgtctcatctaatttcgaatccacattgtcttgtaaaaatctggtttgaagataattatataaaatactcctatacaaataaatgaaaatttaaaatagcatatttgtccaaaactaataaagaattatttatttatttttgagtacatattttaaatgtttgagacggcaagacttttattttttcaattttagaaactaactatgttttcaattatataaaatcatatagtgttaagcactatgtattagtaacta

SEQ ID NO: 61794 - DNA, 1011 bp, Cannabis sativa
tactgatgatatctttgaatttcggcctaatcttatggagtaagtttgcatgtaatactcaaaattgtctcctattagtttagcaaatcctacctccttctcgttattactaccatttgttgcatccattgaatttgaagcactacttcccatcattaatccaaacggtataaaaaaattaaaattagaactagaattacaagaaaaaaaaatgataagtaatgatcaaatattgtatactttactttaatcttatagtaagtagtagtaggagatattgctgagtactaacattttaatttctattggagtgtgattgaaatttatcaaacataataaaataacataaatatgtatgtttctcctataaaaaaattattttgagactcttatttaaaaaatttggtacttatcaaaatcagtaaaaaaatgtgtattttattttataaaaaaaaaaaaaaattaagttactagattaggtgagttctaaacacagatttatgtccaaaatctgacttgctcatgtaaataatttgtaagatttatattatacttataaatctacaataaaattttgataattgaatcaatactatgagcatgattaaaatttattaaaaaaaaattgaggaatttcgacaaaaaatgattttaaaaggaacattttaatttctataagaagagtgctaattacaattttttattacaatctcttaattaatattaagacccaaaattatatatggaaatatttttttcatagtattattcgttatagtttatagtaccgaaaatagagtttttgaatcccaattaaccatgcgtaatacttcaagcctaaattattcaaaaaaatttaaaaatttacaataatgatgttctaagtataataaatatttccttcaaaaaaaaagtataataaatattgttatggaaaaaaaaatattgtaatatatatatttttatacacaaaaattaactataaagttgtaatgaaaaattgactgtaac

SEQ ID NO: 61795 - DNA, 682 bp, Cannabis sativa
  modified_base (52)..(54): a, c, t, g, unknown or other
tgtaaaatataaaatatttgacctccttatatttaaaaataagataaaatannnaaattttaaaaataagataaccaattaagtaaaaaaaaaaaagatcgattttatccattttcaagttcaaaatctactaaaattaattaaaaaattaattaatttcaaactgataattagatttgagatttaaaaaataaaaacctaaatacaaaattacccaaaaaatcgaaattaattccttgaaaaatcatgaaaaaaataaaaaatcgaaaaaatttaaacttataattggatttgcataccatccgagcgtgtgggatgggcatgctgaccgaggaatcacgacgtaagaggctacatgcaacctctccccatgcgcaaggctcaattttcagacaaaaattgcccaaatgggtgaggatcctcggacagatccctgtccaaaactgcgtgcactcgagaaacaagggtgttccgcgcgcgtaaggggtgatgtcaaccctgattttttcgatttttaaaaattcataactaattcaaataaaatccaaatcaagttctgtaaaaaaaaaaataaactgtttaattttttccatactatccaagaaaaataattctagaacgaaattctaattattttatgtaaaatttttataaacatcaatcaatcatcaataaacacata

SEQ ID NO: 61796 - DNA, 939 bp, Cannabis sativa
tatatatatatataaaaaaaacaggttgatgctaatatgaaattcagattttggtacataatgaaagctcccaagggtgcagttatttttattattaagtaaataaaattagattttacgaaaaaaaaaatagagcgctgttctccttttttggctgggttttatcagttggtcggtttcttttcttatataatttggaggcaataatatatattatgaatccctcaaacatgcatgttggatatttatatataactccgtcaattgtgttagtgactctattaaaatagctatcaaacatacaattttgggcattaaacaaatgaaattgatgtatttatgtttgtgatttttgtgttttggggctgcccagtttgtttgtgctacctattcttgtttgaataaaatatttttcctttgctcaagaaaataaataaataaaattagatatataataggagaattattttatatattatttttattttttttaaatttacagtttgagttgctctggtagtttctatatgtgagttgttttacgaattttggttgcaatttagattactccgttaattactataggcatttttgtgtgaaattcgtaaaaaataccaaaaaaaaaaaaaactgttttaaagtataaaaataaaaaactccttatataataatcattaaatattgaaattttaatgcattaaacgtaccaaactagataaattttgtaaacaaaaactaccaattaaccaaaacaaaaaatacaaaatatatatttcaataaaacacataataacaaaaaggtatttattataagaaaattgagtatatataaaaaaggttaattaagatttttgccctctgaactttgacatgtaccaaattatgttccctgaacttttaagttcgttaaaaatactcattgaactattgagattgttg

SEQ ID NO: 61797 - DNA, 2507 bp, Cannabis sativa
cccccccccaaaaaaaaaaaatgcaaactaaaacatgcatcagtgattgatatgaagacaacacgtgccaagaaacagaattagtaactcatacgtaatgctaacattgcacaaaatagaattgcactcaattaataagctcaacaaaagaaatgcacacaaacacaaaagacaaaggaaaactccatgatatatcaatacatctctatttgttttagtattcgaaataattttttaattaaattttttctcatagtcatgtaaattattgttatttaagacatcctacaaaattttaagaaatttgaaaaagtttaatacatcaaaaattatgttcaagcaatgtgttgcacgcgtgactattttattttatacgcgtgtaaagtagtctgtttgaatattattttttacattgtaaattattatgaatttctcaaaattttgtaggatatcttaaatagctataacgtacatgaatacgagaaaaaattagacaaattattttttgaataccgaaacaagtagagagtgcaccagtacatctcttttaaatggattcgttatagaatcacctaaagacaaataatgtcattaaagatatcaaatgaaagagtcaacaataaatgccacctgcctcaatcataatttatcataattttttatgtaagtaggtggaaaggaagagtcactaacaaacattaattctttattatatctataaagagataaagagatatattaaaaaaaacagaaactgaatgaacatgattcgattctaatgtttgcaaatccatacatgataaaacttatataaaaatattgtaacataacaaaaagaaaaggtggtttcagactttgaggtgatatatagaatgtgtaataccttgttttaggtgttaagatgattttgtgccataaggccaacggctgagaggatgtcaagagacacaaggcaaacattttcagcataatcatccttcacttcatattcaatggtggacttaattaaggaacaaccttcatctttctcgatgatctcgagtcgaactcgataaagtgtgaagcccaactcaaggaatcctccttccaccacttccacttccttcactcgctgctcgttgtctatcttcgtgaacttctccttgaaactcttgaacttcgccgcacctgatgattaggaatatttggttgttttgtaaaaatagtctttatgaatttttgtttaatcaagaagaaaatttcatcaatcgaaccaacaaagtacatcttcaagcacttcttcaaacaagagaagcctcaaaacctcaccatcaattaattacatgtcaatctatgtaataaatctatctttattttggttcttttcctatcctgtccttaagcatatacaatctatacttaacattttttttttattttgttcattagtttttatgaatttttttattaacaaaataatcttgtatggtcggagaaacaactgatgaaaattaatttatgatgatgagtagagtacataccagggacaaaatctaggtggagaattgttccaacaccgccgtcgccttcaactacttgaattttttcaataacagatttgagttgttcctcgatgagctttactagacgaagagtaccatagagctcccaaacttggctggctggtgccttgatttctagctcatgggaaagttgaccactcaccatgtttgtgttcttttagtttgattatattgtaaatggggtttttgttggatagaatagattgtttggatatatatggtgagatttagtattataagtagaatattcatataagaagacaaactaggttttttggaatagcttcctagaaactttcgtgcctttaattttgttgtcaatacaattttaatttattgtttttagactttttgctctaatatactatattaggaaactttgattggtttgtgattgaaaaattatgttttttaaaaatgtgatttggaaacaaaaatttgaattttatatgtaaaaattattttaaaaaatctgattggttgtagtgtgaattaatgtttttgagttttaaaatattgaatttttgattggttgagaatcttaaaatacaaaagtaagaaaatatttagaaaatttttagattcaatgatttgaaaacatagaaaacataaaaaaaatgtttttattttttagcctaaaattcaaagtcattttttaaatttagttttcaaaaactcccaaccaatcaagaattctcctttcgaccgtcactttttaagttttcagttctaaaccaatcaagcccttagattattttcttggagggatctttggtgttaagtgtactgatacaaaaggtggttaggttggttaggagtcaacagttttcaactaattcttcttgattagttagtgttctgttattcactttgtacattgtatataaatacaaagtttcctctgttaaatgaatacaacagatttggttctctctctctctctct

SEQ ID NO: 61798 - DNA, 1384 bp, Cannabis sativa
ttatctttacgcaaataagcacactaatcatcaattttgaaatacaaattatagaggtgtttggtaaaatacagctagagctttgttttcgtaattaaagatttattattgaattatggtgggatctactttcctttaacatatttatattttagaaagatcttttgatagatatttcaatatctatgtcgacatatgagttattatagagctgtgtttggtaaaatacattcttcctttcttatacaatagttttcatttagtaatttttttacaaaataatattttagagacactcacaaaccctttaatatgtgttggaaattctcacattgtggattctgaacaagaaaaaccattttgctaaaaaaaacaattttacaaagagatactataaaagagagcactttcaccaatcacttaaaattaaatagcaatataagttagaaggttgtgggtgttgtaggaaggaagtagggttaagataaatacaagcaaagagccaaattaaaggtcccatttccctcgtgcatttcacactagaaagtagaaaaacaaaacaaaggcaccaaagccaaagataggtcccccaaccatagcttatatattacaatacaacacttcttcccatttaattggcttctctattactaggcttgttcatatcaaaccccacatacaacaacattgccacattattcatcattaccatttttttttaatttatttaaatgttacaataaatgtatgtacatttatagctctgaacatactaatactaatgatcaccaatttgattcacaattctctactatgacacaatttactaggaatatttataaaaaaaaaaggatcgaacctctcggtaataagagagataaaaacaaagagagaaatgagaaaaaaaggagaggtggtggcttgaactcaaaacctttatgctattaattaattgtaaaatatcattacgctacattaagaaaagaagaagataaaaacaacatacaatataacatcacttatacatgtatatgtatatatatttacaaatatgcaaatttgtaatctctaccatcattttaccacatgggtagtggtcctttttattttctttttatgtggttctgccctcttcttcttgaactaccaaataaaccattatttttatttggttctaatgaacattatatacaaaatatatgttgttgttggtataacatgaaagatttttgtttgttgtgtattgttcttacatttcgaaatgagtgcggcatattgcaacaattgttgtttaggcattggttggtgatgttaaggtgggtcctaaatggcttcactttaatagggtagttttctagtcaaatttaggacaaaatgctttttt

SEQ ID NO: 61799 - DNA, 2422 bp, Cannabis sativa
  modified_base (136)..(136): a, c, t, g, unknown or other
  modified_base (975)..(992): a, c, t, g, unknown or other
tttgtaagttttttttaaaaaatgccatatttagtgtaattaagtatttatgccatatatgtcaaaacttatcttcattttcccatatttttgtaaatagcccaaactaaaatataagaggttttttttttttttntttttttttcttttttaaaaaaatgaatgtgtatcattaaaatatataaatagagcatacaaaaaagatggatcaaacccatccaaacaagtttcaatacaccctgaatgcctgcataactaatctataagaaaatatgaaatagggatatatacttcaagaaagctggatagtaaacttgaaatattaaaaatgaaaaattaataaaacaacataatgctttgagaaaacattcaatgctaaatcgacaaagacttcaaaagaaaatggatcgagaccaaccgatgtatccacaaattctgctcaagacaatttggcccctataaaccactcctcgaagtccagcattaagcaaagtgaaacatgatgcacaacctaaacagcacacacacacaaaaaaaatgaatagaggtaatatgaatatatcctttttctaaataaaaataataataaataaataaaattaaaatgtaaaatatataataatcaaaataagaaaaaaccttagctgtgagagatttcatggcccttcaaaagttttttaaaagtctccacacaattataaactcacaaaaatataatataataaaatacaacgttacatgaacaaaacttaataatataacacaacaaaatattaaaatagtatagaaaaacacaattcacacaatgtagagaatttctaatcaaatagacataaaaaagattgaaaaatacacgccaaaaactcaaaaatatatttaactcacataaattaggaataaaacgttaaaatatataataataagtttgatcaacgaaaattaccctaaacgaaaaaagtaataataataataatnnnnnnnnnnnnnnnnnnaataataataataataaaattgtatcaatctattttgtttttgcttttggagaattgaatattatctataaatttattagatcattgctattaggtatcagtaatattgtccaatattttttataggtgacgctttacgattgtttagcgatattccctaaaaattatttttttaattatatgtgacccgatgctaaattacatcaataactaggggttagagcatctccaatagtaaaactttataggatgcttggtgaggtagatatattatgtgacaaaatattaagatgttatactattggagagaaaaggatgtcattctagaaatttatatggatgctatgttattcatttttttttaataaaaaattgaagttaaaaagttattataactaaaaattagaatatatattaaataataatatgtaatatcataattatagtattattaaagaatgctatatattggagtgtttttagaagtaagagggcaaaaataacatggaagagagataaaataaaataggagttttttgttttttacatttcaaaacagttctttttcttttgcatttttatggaattctacatagaaatccctattgcaactagcgctgcaacctaatttgtaacaaaaaatcgtatagaaacccctattgcaattagcgatgcaaccactctagaaacccaaatcgtaaatttgagaaaagaaaaaagttaaaaaaatatagtatatgggataaaactcaataaaatattatatttttaaataatatgtaaatttttaacatctttaaaatatactaccattgaaatgagaatatactagacaccaataatacattttaacaatactcataaatttagtacaacacgtgaatatagtaccataataaatgaataagtacgttaatatagtaccataataaatgaataagtacgttaatatagtaccataataaatgaataagaccattattgtacgggacttctcagattttttcctatcctaaaagttgtggtagctatttattattcagaaaaagctagcttatgttggtaatttttcttttagcaaaaaaaaaaaaataaaataataataataataataaatatataaaataaaaaattagagaattggatattatctttaagagatgtattaaaggaaaccaagcatgttggtacattttaatattgaatctcattgtgaagatgcagtcatgaaagagaagcaatcaagagaaagagagaaagagaagaggaattggaaaataaaatctgttattattgattgaaacagaatagttcaatacatagcttttatataacaatcataaccaactagttatggacctaactaatcaattacagaattaactaactctttcgacagttggttttccttgacagcccccttcaaactc

SEQ ID NO: 61800 - DNA, 6825 bp, Cannabis sativa
  modified_base (2364)..(2373): a, c, t, g, unknown or other
  modified_base (2521)..(2522): a, c, t, g, unknown or other
  modified_base (6765)..(6771): a, c, t, g, unknown or other
ataaacatttatatatatattcttctctttttttcgtgagtgacgaaaaatactatattaatcattatttcttcgttttatgtcgcattatatgtgatatatatcaacatataattatattctatactactagctagagtgtgctcttagctgaatcaattcaaaagatgtataacatatataaacattacattcagattttaaatgttgaatgttattatatattatatgtggaaatgtcttcgtcattaattagttctattgtctagcaaatctttaatttgctgatcttattaattattatcgtcttcatttgcttgccttagcgctttttttttaaaaaaaaaattggtaataagatcttgttttgtgttgcattttatttgcttgccttagcattagcctaaataccattttaattattggcacgattaccattttggtaatttattttatttgttctaaatgaaatataaaaaataatatgtatgtgtcaaaaaaataatatgataaataataatttgtctctgaatccttaattataacttgttttatttggtgtatagtttcggaagatatagcttttcgatttaattagaatttcacttatttttgcctaattctccggctttaatatataagttcgttctttctaatagagctaaagtgagtgttttgaatttatagtcttagatgatttgtgtttattactagctgttgtacacactactacacaaatgatatttcttgacgttttttaaatagtcgtttaaaatattttcgtcagtttttataactgtcgcctatacgaccatcgttaatgtagacttctcgacggtttaaaaccgttgcctataacaggcctaggatataggcgacggttgtaaaccgtgccctatactatatgcgacggttttaaactgtcgcctatagtatagggcacggtttaaattcgtcgcatataccctaattaagcctgttatagacgacagttttaaactgtcgaaaatgaaaaaaaaaatacagatttttttaccattaatagaacatagaagaatagaagcaatttaatataatagaaactaaaaattatcattcattaatgaaattaaaaactcatgtctcgggttttgaaataacttttaacttaaaaaaattactcgaaactagacattataatcaaaagcatagtaaatagtaagagtttaaggtgaagaaaaagaactgtgatgtaacactcgaagtcgcaatagatctctatcttcttcttgctctctctctctgagtttctctttcaatttcatagttcaaaagtaccaaaattcgtaccctagaagtcctatttataatccttaaaaatatctcacttaaaaaaaagattaaaattcgaatgtttcccaaaaatcacctccttgtcgcggccacgacttcttgccaaatttttttttatcatgtgattagtattttggccataacttcttcaataaaactcagaattggacgattcaagatgttctaaaaatttgagaacgagatctacaactttcatattgagcttgaagtccaattctacattcaaggtcgtaaaaatttgtaattaagttctactttgcaaaattgagctcgctgacttctactatttttaccaaaatgtgctaaaatctctccaaaagactctaaatgcatgactagtctttaaaatagcctaaaaattacaatcacactaataaataatttaaaaaatcaatttaagaatattaatacataaattagccatattaagaagacaagtatggactcatcaatgattcttacaacttctattttgggagcttaatagcatgagtggctagaaatatgttataaaataatagaatctaagctttcctaacatatcgaatattagttagtgttaattcggggagtgctatcagttggatccaaatctataataagttataaattatctgttcacattgaattaatgatatgtaagaaatgaaaagataattagaagggtaaaacgataattttgaccaactctaattttgaactattaattggagggcgaactacttatatttatgagtgcgtataagttgatctaatctaataacaacggaccgatccaattacaaccgaccatcaaatgttagatatctaattgtgatcggatcagattgaatgttattctttaatatctaatcagatcggatcggatattggatgggtgttcaaaaatccaatacatccaacatccaatcgaactaaataatattttcatttagtttgagtgagtaactacaaaaaatagctactttcagtgataaccttttagtcataacataaattttttgtgattannnnnnnnnnttagtcacaacaaaatattacttgggattaaaatatagcatttagttacaagttgtcactaatttagttttagtcacaacaatattgtgactaaaaacacatttagtcgcaataaattgtaacacattttagtcacaacaaattgtannttttgtgactaatacctttagccccgcaccttttagtcacaacctaagaatggtattttataattagtcacaacttttttatgtttagtcacaaattttgttgtgactaaaagtgagactttttttgtagtgtatgttgttatacgtaaaaaaaaatatatgtatatatgaaaattaatattaaaattttacttttttttgggattgaatagatccaattcaatccaatagatattggatctaaaacactagatggatctgatccaatctaataaatactaggtctaaaatattaaataaaccaaaattaaacaaatagatgtacatgaaatatatctaatggatagaatcgatctaatctaatatccattgggtgttgaatcaattggatgactgaaattaattagattggatcagatggtaaaatctatcatccaatatataattggacagaatttgaataggcctgaaattggatgtgatccaatgaatacccctacttatattgattatatcaattaactaatagtaagatttctataaatataatactatattgtcaaaaaatacaattctatatttatagggagtaataatagaattaataaaatcagattatttatttgacgagatcgataataattaagtatttattggagcttagaaatatatgttcttggtccccaagtcagctctatacaacactgtatatgggattgttttatttgatgagtaaatttgagtaagaattatttattatgagaaatctgaaaggcaaaatagtaatttatgaaaattattattttgaataattataaaatttataaattgtgtaattatatatagtatttaactatttagttttatttgataaaaccatattaattagttaaatataatattattcttagataatattaaagagagaaaatatataattttagtaaaataataattaattttaatccttgtaaaataagaaattaataagaattaatcaagtattatttattatcaaaataaataataaattttatttgtggtaaaattgagaaatcaattttgcaccttaaaatatatatggcccacatgtgtagaactagcccacacgtgtagggtgacatataaaggcccatgataatttagtttaattattatattatttaaataaaaataattaaattaattaattatattttaattattgaattaaatatattatttggataatctatttgattaaaagataatattaaaataaaaggatataattgatttttgttaattagttatatgatatttatgtttgaatttgaatataattaaatattactttttattttaaatgattaaataaaaggtttgtttataactttatatatatatgtgatatatatcaatataactaacaatgtaagtttatttcaaaaaaaaaactaacaatgtaagaaaataagtgaattgagtgatatactttcagagaaaaaataggattgaaaaataaaattggttttatactctctatctcttcatctcacacactcaatcttactttctctctcttcatctcacacgatcactctttccctctcttcatctcacactcaacacacacaacagtgtgttgtgagatttgtgttctttccttaatcacagttgctcgatcatgagttgagaatatactgtgattataaatttatactcatccaattgaatctaatagtccactctatttctaagtattgagactgatttagaagattgtggtgtgaactctttaacaagtttttagattggatgttcgatagtaatacgaaaagatagcgaggatttcctgataggttacaagaggtattgtttctcttttcattagtctagattaatctatatattatgttgagatccttggtattatagttcatattagattaaattattttttaatcgaatatgcttccacttttctaactctgatatacactataaaaattaacacataatacctagctatttgtggttgcccaaaatcattggaaggaaaaagttagtgatcctatgttatctttaagacaagatacaataatgtgtccaaagttgagaggcgaagcttttgttaaaaacagggaaggagatttcattaaaaatagtggcacaagctctttctaactatcccatgaatgtgttcttgcttccactaaaaatatgtaaggatatgaaaacgatgatgtgtagtggcgttcttgatcttcaaaaagagagaggtatttattggatgagttgagagaggatgtgtcaactaaaaacaaaggttggattgggttttagtaatttgtaagatttcaatgttgctcttttgggaaacaatgatgaaatttattgttgaaacatgatattttagtgagcatagtttataaagtcaagtactacccaaatagctcttttctaaaaatgttgttcttggggactttccaaggtttatttggagtaatatttttgaatcttaagatcttataaaaaagggtttatgttcgaattgggtgttaaaattagatctccctgaatcacttgttttacagttttacagaaaagataaaatacaaataaaaggctcgtgactttactcattcaccagacacaacgacacaacaactaaacctaactgaatttctattttgtaacagaaattatgttacttctctaccactgaaacttaacctgtaaaagggggggcagatttttaccaatctcttagtcgagagaaccagaagtgtgaagacccagattatgagagaggagctctcgtgttgaatgtttcagtgtgtacatgcaaagaaaagaaagagagagttagtgagaatcaaagaaaaatacacagaaaagagagaagagagaagagagaaagaactgatataccagtcgatttgtgactcgaatttctcacctgatgtaatattctccatttatagtgcagatctgagatcgttcttcaaggcgagctcaaaagaggacgtacccctggatttagggcgaacctctataaaccttgtgtttgtttttcttagttctctttactgtttaatgtgtgatcttttgtgtgtatgtgtttgggataaatttttggggaaggttattggaaagatcgatctggtttgatcgagaaggggatctgggttctagggttccttcgaagagaagcagagggagagagagagagagtttggtttcaaactctccaaggttctaagggcaattctgagctagggttagctcaattgtctttgttttgtttctgggagaacgacaaattgttttggtctaaacaatttgccgtgcatgagggaacgacttgttatttcttatcgttggaataatttgtttttttttaaattcttggtcaattttaaccctgacattttgtagtgacattgagttggtgtaggggcattcttgaaaatcaagaaaatcctacattgggctaggcaattctgtacatgtgcttcaagacccatggctagcaaatatggatgatcattttctccatactattagtaactcattgattggtaaagtggtctcaaattgtatagttctaagccaaaatcagcaggatattgagttaattgatgatatcttcattaagcgggatgcaaatttaattttgagtattcctttaactgatagggtggatgattcttggtactggtggaaggaaaaatcggggcaatattttgtgaaaagtgcttatcatttactggacaaaggcaaagaaaataggcatactagtgacaactcaggcttttggaataaactttggaacctgacagttcctcccaaagtcaagaactcgctatggcgcgcctccacaggttgtttaccaactaattgatctcaattgaaatctaaatatattgatgtaaattatctctactctctatgtaatactaaaagagaatcaatctcgtatgtacgttgattacctattccttttcacaggcttgaaggaaaagattgggaatcggtgtttcagcagtggtacaagagactttttgtgacttgttacacattgaaatactcgatttggtggctcggaatgaaggctagttacaatggttacttgggctttgtggaaaagtaggaatgaactggtttggaataaaaaacagagatgtaggttgtggtgtttgcaaaaattgtccttaatcaatggaaaaatgctcaagactgttaattccatttttggcannnnnnnttgacaaaaatattttattattctttgtatatttcggctggcatatattgatat

SEQ ID NO: 61801 - DNA, 739 bp, Cannabis sativa
aaaattttaaaaaattttaaaacatttaatacgttgaaatacacacgtatttttttattttaaatgaatgtgaaatagattatttaagcatcgcttttttattataaataattttaaattcttcaaaattttaaataataacttaaataactataatatatgattaagaataattaaattattaaatttaaggggagcaccaccatagaagctcctatagtttttatttctttgttttcataattatatatataaaaataataaataaatagaaaatagtgaaaacttgatcgtagctgattttggatatggcttatcgaacaaataaacccaaaagaaatgtacacattataatttaaatgataaaaagagaaatgctaaagagtttttatagtgtctagtacaatattgttattagtgtaatttaatattgagtcacacttattttaatttaataaaaaattatagaaaattactagctaattataaaacatatgttatagaggtattagatactttggtgtcccatatcaatgctctcataaaaaagagtagagcattgttattgaatacttgtagtgcctaacacgttttatgggtgatgtcttacgattggttagtaatatttcttaaaagttatttttttttaagttaaatgaaatctaatactaaattacactaataaaaatatgatattgagaaaagtattaggcatcaataatatattttagcatttctc

SEQ ID NO: 61802 - DNA, 925 bp, Cannabis sativa
actctaatgtggaccaatctttggttgctgctgttaatcgatttctgtccacggaggaccatgggcctgggtcttctgtctcagctcccctgggcaatgtgagtgatgctagattgttgggaatggatcaggtcaccttttcctctgataatcagtctcattcagctgctatgaatcctgaaactcgtgcccactttggtgaaaacccaattggggtcctttgtgatatgcctgctatgactactcatcaagttgctgctacggttcatgaaaataccactcatgaggcaagctttgaaaatactctacctagactctctgagaaggctaagggtaaagctgtagctggtgtcaaaagaactgcttttcttcctcaaactgttgtggttggggactccttgcgaaacatcctcaaacgtgctcgtgccggtcctactattgctgaagtctcatctgctatcaatgcttcttttgaacaggcgggtgttgcggagcaaccccgcccagaaaaatgattctcacgtgttggaatgctcgcgggttggggagtccccgagcattccgtaacctctccctttttgtaaaaaagactttacctaactttctttttataatggagtctaaatgtcttgttggttgtggggcaaacttttgtaatagattaccttttgaccatgtctttgaagtccctaagaagggtttaagggggggtcttttgttattttggaagtctgatgttctggtaaatattttgaactactctcctaatcatattgactgcattgtaactattaatgataatatatcaactcatgtttcttgtttttatggttctccttacgtgcatgataaaattcacacttggactcttttacatcgcctttatgataatgctcctaatctgccttggcttatttttggcgat

SEQ ID NO: 61803 - DNA, 564 bp, Cannabis sativa
tgaacaacccacaccccaaccctcatcttttacatgccttttcaaataaactctatagtgtgaaaatgtctcctggtaagagcattaattcacacttaatcacgatgaatctgaagttctaaaaagtaaatatgttgggaattgatttatcaaaagagcaatgggttcaattcattcttaacagccttccacctgagtataatggatttgttgtatcatacatgatcaacaattttaactcatccgacgtagacaagctcgatgcaaaattgcgtgcttatgaacagactttgcttgcaaggaggcctccctctagttttgtagacatgcacaaaaggagagctgtagtaattgagaatggtgcttctgacaatgataatacttcagttcaattttgagagctagaatcgaaattgaactaggaaatgaaacaattagagaataaatgagcagccatattcttctatgttcatattgtggagagaaaggacattcggaagaaagatgtcccagacttgtgaactattggaacaaaggtaacacttttgtttttaaatcatgtgt

SEQ ID NO: 61804 - DNA, 707 bp, Cannabis sativa
aaaactgttttgaagtataaaaataaacaaacccaattaaatttattattaattataattttagtttaattatataatacttttaatttaatttatgtgtagtaaatttaaatttaatttaattatactattttaaaaaaataataatttaattatgtaaccacatttaatataatataacataaatattcatgtataatttaaattttcataaataaccccccacgaagggcaagatgtttcttggtttacattcaaacgtgcggatattctaataattaacatggaaatcccatgttaaaaaaattcttccaaattttaatttttcttaattatattagtagataaaagtagcatggtaggcaaaacatgtccttcggttagacaatgagttattatggtttagagaggttccaccgccgattgtggcgatttattgcattattaatcatgtgtaattctgttccgcttctcaaatttctttattaatgataaatcattcaatattttttgatcaatatagcttcatcatcgtttgcccttccaatttggtctgcaatacatatttacaccatgtacatacgtgaaaaatcttttgccttagttttcataaacaaaataaaaaagaaaaaagaaggggttgattttaggaaacttgttaagaagattagacaacatttggtaatagaaaatgaaaaaaaaaaaaa

SEQ ID NO: 61805 - DNA, 718 bp, Cannabis sativa
ggcctttcttttgtatcatttttttcgtccccttttttatcttacctggcactatttataatcacatagtacgcagttaattacaaaattgactgtaatctttttacaataattatcccctgaaatcatgggatctgattacatatcacgctgagtaaacgcggtttttattttaaattccacatagctgtgaatatgatgcttttactgggccagaatgaatgagtattaaagatatatggtaggccttatcgtactgtaatgcctcgctgggaaggaagttgatttaaccttgatgacgagcgggagctcgtcatatgtcttcccgaggttgacaatgcttttactttaattctaacaactgcagtttgtggtgacgagatgatctttttcacgtgcatgccctcttatggcgaggtggatgtctcactatctctcactttattcacccatatgtttatacttagtttgtatatcgtacattacacgctaagtatctctgttgtcattatatctcctccatgtaacgaggttagtgcctcgtcttgtatagttgaagttacatggtttctcatcgaggcacagggcaacaattagcacatttttatctggcataagactgttcagtcaaccgagttgtaaacatactctgctaattgtacttttaacgagttattccatttcaagtgtaattatgattacgtgtttgagttcttta

SEQ ID NO: 61806 - DNA, 1413 bp, Cannabis sativa
aatttgaagtttgcgagtcttgaagttttcagtcattttaagaaagaatcacgataaaggtttatgaatatccagagttaattgaaatggataccgatacggcgatactagaatttttttaaggagttgttattatacattttatcaagttttgctctatcacacaatgctattaaaataggccgaataactgattatttgaagttaaactacatataatcattaacaaatcaaagctcttcttgaaaatggttgtattacttacattttctgtatagagaaattaatcatgtagttatcttttagctaattacgctttgactaacaaagaaatggaaaaaaaaaacatataatcatcgtacaatcttgtatagaaagttggaaggttatatctctattaagagcatgtacaaggatacaaactaagttaagtattacactatcatcaaattagggttaaaaaatatttttataccaattacaacactaaaaattacattaaaaaatatatttattattatattaattttttaataaaataaaaaaaattaaatcatattaattaataaaaattactacaattattatattcaactaataatttaaataaacttattttcttaaaccaaaaaattaatttttattaaatcaaatcagctaccaagataatttccaaatcaacagagacataactctcgcgggaaacacaaccaagaataaaactagaagaacgagctaaaaaattaaattattactaattagattaaagataataatataataaaatagataaaactcgataaattaaaatattatattataataacataaatattatattactaaaaattaaacattacattcatagaaattacattataataatttatagtattcacatttaaatttacacaaaaaaaatattataaagtgcttttataatacatccctctaaataaaagagtcagacgacaataagtttgaattttatttttggcgtattaaatttttctaaatttttctaaattttacaggaggtcttaaataaatataatgtacacgaccataaaaagactaaataaatctctcaaatgtcgaaacaggtagatgtatatcagtacgacactttcaaagaagtacactatttttcggcgtgttaatttttttttaattttattaaaattttacaggatgtcttaaataactataatatacataactatataaaaaatagactaaaaaaatctttcgggtgccaaaataaataagagtagattcgtacattacttttaaaaatatacatggtaaaattgtccagaaaatatttcttaatttaataagtacaatgatataaatatatataatataattaaattatatatattaaaaaaaaaaagatatgcagtgactaca

SEQ ID NO: 61807 - DNA, 1113 bp, Cannabis sativa
tttttcatctaattttctcatttacttattatgttagacttttcacatggcacttatacattgatttaaattatttgaaaaactttaaaattaaaaagttatttttaaaattttaaataataaaataaattatcaatgaaacttgtcagtatatatttatctatattactcgtgtgtgaataatatgtagtattcatattacatttaaaataaatgttagaaataaataataattttaatattacatttaaaataaatgttataaaataaataataattttaatatataataaataaataataaatgaaacttgtcagtatatattaaataataattttaataatttgatcaattattagtgtgatttatcaaataataataaaataaatcattttaaaatttaaaaatatatacttttttaaactttttttttaaacaaatatcttataactaattaatgaaataaaaataatactattagagttagttattattgttaattagtgattaattagatggtaaagttagttagtctttcttccttcctaactaactaagctccgttggctacatatatagactgccctgtattcattttttcaatcaatgagaaataacagatttcaattcttttcttctttctgtttctttctctcatatggtatcagaagtttctctgcccactgcttccatggctagacattccactcgatcgcaagatggtgctcctttatccttggtcaacacaccagcaactgatatcatgtccgatccacctgctgctgctcctaccatgaacaattcagctgttcctcgaagaaatatcaatgctagatctccatcgcagagcaattccaatccagaaaattaaatatagccaacatggggatgttgacaggttcaaagctcgcattattgccaaaggtttcaaccaaaggcaagacattgatttttcacaaacctatgcccctgttgcaagtttaatactttaaaaaatattcttggcccttgctgccatgtataattggcatattcaccaattagatataaacaataccttccttcatggggaccttcatgaagaagtttatactgttggaatatattttacc

SEQ ID NO: 61808 - DNA, 645 bp, Cannabis sativa
aaaaaaaaactcttttacacaatatgaaatgagatacaaaaggactcaatcaatcctagtagccaatatgagaatttatagtcaacatattattttttttattttaaaaaaatcacaattattttattttgtttatatattggaaaaaaaatcaaattgattaaattattataataaaattattttttactaaggatatatttatctttttatttcgaattgataaaaagaaacttttatttccatctcgtaaatttaattgttaataattttcattttatataaaatttatatttttagtttatactattttttattaaattcttccttctcatatcgttagagaatatacttataatgaagaatctaaaggaatttgaaagggctatgtatcacgcgtagtgctccatcggtctcacaccttctcttcgctgacgatagtctcttgttttgtcaagccacaaatcaatatgctttagccatcaaacaagctcttgacgtgtatcacaaagcctcaggacaagttctcaataatgataaatcggtgatgtctttctctcccaatacatctgttgctactcaaaacttttttgctcaaacacttcatatgcccatcacggattgtcatgagaggtatttggggtt

SEQ ID NO: 61809 - DNA, 2417 bp, Cannabis sativa
attagggtggacagtatgcaatggaaatcgattatggactttggtttgtggtgggtccaacttaaggacagggaactcaaacttcacgtggtttgcttatgcaaagttcgctggcaatggagaaacaagattgtgtttgaaggcaagagctgtaatatggattgcatatccaaggaaatcaaagatcgatagatggaaatggtgtcaaggtgggaggtgcaggtttcgcttgagcaaagtgtgcaggagtctgcccagcatgcaaaggtgaatgttgaaggtgtcacatgtttccaaactgatgcttcagtagtaaaaaactatgctggtttagcagtagtggaaaaatcgatcacggactttgaaagatgttaggttgccacggatttcgcctgtgtaactggtgttcttgaaggggagctccttgctatacgacttgctcttcgtaagggcaaagaaaggaagctgttgaagatcattgtgcaatctgactccctggctgtggtttaagccctttcaacgggtttttcgccttttgggtggggctcttaccctgccttcaatgcttatatcaaattgtgtaagaactttaagtctgtgtctttcattcacattccccgttccggtaatgtggtggctaatgcgttagcgggttggtctagatgtgctaaggtggtgtcgtcgggttgtctaagggatgtggccccctttgtggctactagtttcatgtaattttgttttccttcaataaagcacacttaattaccaaaaatagaaaaatcccaattaaactcaaattctcttcccccagcaaaaaataatcaatttctcttccatagtcaaactcaaattatagagccatttctcaccagaaagaaagaaataataataataataataataaatgagtatgctattttataaaaatagtgtattttgtttcccgggaaaatcaaaatccaaatcaacatggtgaccaagttccacattctcaaagctcacactcttcctctcttcactctcttaccccgaacactttccttttcaaaactcccaaacttctctgtatcttccatcagttttaccacccaaatccatgcccataaccaatcttcagaccctgagctctcttacggaccctcccttcgcaagggcaccctacccccaacacccatttcccaaacttccctcagaacctttactaaggaagatgatgatggtggggaatacaatgatgattatgcattcaacgaggaaagcttctcaagggttttcgatatcgcggcgattcgagtctcttccaaggattgtttcattctcgagaaccgacttcgaggccacctcttgaactggcctcgaatccgaaacattgccagagtcccgggcgacgactttgacgacgaggaggtgaagaagcttgtgggtaccccaagcaacgaagattctctagtttcgctggacaggcgtatgcatgggaaagccgagggcgatggcgagccgttgagcccagttctgcacagggaaaagcttgtgaagacatttgactctgttgggtttgtgaattttcgaaaccttgctaagatgacgaggccgagttcgaggaagaagaaaatggttgatgatgaagagaggagtggagggaagaataaggataaggtcggaaggaagggcttctctgttgtagaggttgttgaggatgggttaatggaaggacaggatttgaagggtttactgggagagggtttccattgcaggaaatggagagggccaacgagattattgctcttggacgagaggtattcgaagaaatgcgcagaagagttgcctgaagcaattaaggtttatgttccaatactctgattcttgtgagttcattattattttaaatatcatttcgcttttaaagtttatgtaatgtgtttaggaaatttggaatattggttaggctttccatatagatgtttcaagtttgaaattttaattttcttgttattttttgaatttgtaaaagtatacttgctctctgttagaacttagaagtagctcaatgctatctttgtatactactttggagcttctagtttttgtagcaacctaatgacttcagaatcgaacttaaattattattataaataaaaaatttacaaggttgatcttttattaaattattggtaaaagtattgctctgctatgtaaagaacaccaaaacttcctaagtcatttcattgacgtctttgttttcaatgtggggaaaatgtgacttgaattcaaagaaaaaagttatccttaaaatggttctgtaaaatggacatagtgataagcctgtggttaaatgcacttatgtgaggagaaagaatagagaaaaaggaaatgacgtatagtgaggtgatgattcatcaaagagagaaaatatagaa

SEQ ID NO: 61810 - DNA, 1085 bp, Cannabis sativa
tatataaaaaatatttaagtcaagctgaactttttttatgctaaagaaataaatatatatatttttattttttttcaacttatgaaacatgcaactcaacccatataatgtaaaaatgaattattttttttaattagataaaaaatttaaacataaaaacttaatttttcctcgtaccacctattcatgggtaatacccaatactcattaaaagtacatatgtatttttttatattttctttatataaaatatctatatgatttttttttattttaatttaaaattaaaagttaaaaatatgattaaatttttttatataaaatatttatataattttttttaattagatatatgtaatattattataaaattaataaagtatattttattaagtaattaataatatattctattagagttaacgtaaaaaattaaaaattaccgctaaactaaaaattctgttacataaccacattttatatagaataaatatgtagatatttaattcgaccttataagtattagtaagataattgtgttttttttcctggaactatatagtaagataattatttagttaacttttctattcagcttaccatgaagttctatgtgaactttcctcttttacaattaatcgtatgtacctaatgtaagtgaaaaaaattttgttatacccgaaatttggctgccattttagtagaggatacgtgtcaagataaagggaatatggatcgatgcaatcgcttttatggaataactcattaattacgtaagtatcagagtatatttgtaaccttctgactgtaaggtcttaggcgaggaatcaatatacaaactggtacttagtatattagcgagaaaccatatgtcactgaatgcgaagagcaaagcattgaggacagtacacataggaagacgaaagcgacacatattgattgcggaagcccttagtatataatgtacaatctaagtgtaacagtcgggtcgattcgagaccaagtaagcgaggtgctcgtctcgttatgggaagacttcctgtaactgttggatacattttgccaggatctagatttactaacaa

SEQ ID NO: 61811 - DNA, 3166 bp, Cannabis sativa
  modified_base (3086)..(3093): a, c, t, g, unknown or other
actaatcagattgtaaagagttttatttagggcataaatcccaacataagagcccatgtttgatctcgttgtcttctgtttggttcaccgtagaagccagttaagcaccatgtcgacatgccccttataaaaacttcaacatcaatatgatttggtgaaaaaccaagaagattagcttcttctgaaatattttccaaaacagagccaagcctcctttccttcctgaagcatcgactgaaaaaccgccttcaaacccaagtttgaccctcaaacgctccaccaagtcttttttacaaagtgtctcacataaaaacaagaatgtgggcttcttttgactacacatgtcttgtaggaactgaacagcccgtgggttcccaagcccacggcagttccaactaattgtactcatggtgattggtgggcctgagtaccagaacccaccaatttgttgttttttgaaatcccattagaacactcagtatcattaatgtcttggtccatcacctcagttatatcaacaggcccaccatttaaagttaggcccacccgtcgccttttctattctgaaatagataattctatatcagaggaaaacttgttattattttcatttaaaaagacagttggctcatttatgtcaagggttgactgcatggcaaaatttttttgattatgttggccacgtaaatcatgcctagattcatggtgaatatcttccatgattttctcacccattataggctggaaattagagtttgtattaactgtatcggaaacaacatgagtcgtcactggtatgctagggacatcggtcgaccttgccggagccatggagatgctgtaagaaaatttcttccttttggtggtgctttcatgaacaatccatacggttttataatggcttctagaggcgtatcatagagcttatcacaaaaagtctcatagtggcccataatgctgcagataaagcaaaaagttggaacacgttcatacttgaaattcgcccaaaaagcaactctatcgcgtttttgaaacttcattcttctctttagaggagtatttaaggggacggataccctaactctgagataatcacaccaaactccattaaagttattgggatccgatttgagaaacctgtcgatgtaatgaccagctttttgaacgacttgctatgtcttaaaccctgcttgtaaatcgtgaatctggacccacatatcaagggtatcaagttcggtagtctttaagttgtcccctatttgcagttacttgattataagttatttatggtcatacgtctatggactaccgtcgataacgcgtttgatgtctatttcgtgatagaactggaataagaatctgttttgctcgaggatcttgactgtgaaccccttcccaggcttccagagatctgcgatcatatttgggtcaagcctggtttaaaaaaaagttcttttatttttacacttcaaaataatttttttttgtatttttacagaatataacacagaaacccatatagcaactaacggaacaacctaaatcactactaaaatttgtatagaaacttacatagaaactaccggagaaacaactaaagtaactcaaatcataaatttaaaaaaaattaaaaaacaataatacatgacataattctctaaaaataagttaggttaaagtgaaccaactctaattcgaaaggcttattgtagcggggcatagagaaaatatttggggcgaaggagagaacattcgatgtgcggcaaatcgcacccaatcatgcctaaattatacattataatatataataaatttcaacaataggtgagatttaaatttaactcaaaaaattaaaaaagagcctattaacttgttattgtcttcatacatattattttcatgttttttttaatggaaatgtttttttttaatggaaatatgacaattttgtttaacttgaattagccaatacaatgtttaataactccgcatgagagttattattatgaaaaatgcgaactgttgagtaacaagcactacgcgcaaggaaatgcgcagccttgttagcagaacgcctaacaaactttaaagaaatactacccaattcagacaagagtttcttacaatcccaagcaactatcccaaaggcagaagacatttgtgtactactgttgatgccttgtacaaccaacaatgagtcagtttcaagtgacacattatgccaagacttaccctttatccaacttagggcctccttgatttcacaaatttcaacaattttaggagcaacatagcagatattgaacttggaaacagcttcaatgatccttccagcacagtccctggctatgaaactgaccccaaaagagttaatagttgcaaatatggctccatccacattaaccgtaatcgtatcattaactggtttagtccaatgctcaacatccaacccttgattattttgaacaaggattggttccattcagtttttctgagcatataaccattgattaaggtaagatcttgcctcaagaactttgactctacctttccataaaacatcatttcttgcactccatattttccaagcaaccattagagcttcagcagaaaaactgctggtgctactacatgtgacagcagcataccagtcacggaagtttgttgttgctgctggtgtgatgtcaattgtagatctattccagcacgaaattgcaaaagggcagaggacaaggacatggagaatagactcgtctgcagtattgcaaacagggcatgaattattgacataaacatgcttagtttggagttgtgtacgtgttggaaggcttcttgaaatagctctccaaccaaaatgtaaaacttttggtggaacttttatctaccagtatttcttccaaaaatctcaagccagaagagtgtcatggtcagattgatgcaagtgtctatatgcactcttaactgaatagtaacctgagctttcaaagttccaactccatcgatcattcaagtttgtatcgggaaggggaattcccaagataagtgcatgatccctgtcatcagggacggagggacttatgcctatnnnnnnnnttaagccctcactcaaatatatacattaaatttttcacatgtagatatgtacatatattaattcacttcactc

SEQ ID NO: 61812 - DNA, 676 bp, Cannabis sativa
gccgctatgtgtgacatgtggataaaatagatacgtcacccagagatgagttaaaggtcagattaaagaagcaacgagtatggttcatgtcgttagctcccaaaaaagagcaaaaggctcaccttccccttcgggagtcaggacataggaaggcacctccgggccaggaggactttacttgaacagtcacttcgcatttaatgtagcgtggagaaaatgtttgggaacgcccataagaggacgtgtaaacatcgtaagcctaatttagggcgattgcacgaaaatcaaaagggctagtgacggctccattatgaagaatcatatcaatcaaggaaggatgaaggctaatctcacctaacatctacgctgcctactacgtaggcaatgcatgccctattttgtatcttttgagaacttgtgcttatctatagttggctctcaaaatacccctagaaaaattaagaaggggatcgaaagaaaaagatagagaagacatagaaaaaagaaaacattctttgtaagaaacactctcattaatacaagagactcgtggattacaactcatttatgccaaaaccacgtaaaaatcatctgcattaattaccccaaagctctcattattatcttattaaattggttgccgaaaacctcagtcaatagattggatttgagctat

SEQ ID NO: 61813 - DNA, 1367 bp, Cannabis sativa
  modified_base (1037)..(1037): a, c, t, g, unknown or other
gggcggagcagatccttacatgatctggatcaggttggatcatagccggatcagatccgacccgacctattgactcaatatctttatccattcttttcttaattctctaattttttttacttttttattatttttttaaaaacctccaattaagctaataataataataataaaaaacaaaaaagtatctaactaaaataaattatatcaacataggtaatagtatttttttttttcaaatttacgcacgtatatattttctaaattttactttttaaaaaaatatatacataataccttaataataaataggaaaattacttcatatactatttttatttttttaaaatttacagtttgggttgctatggcagtttctctaatggttcctatatgggttgctatgtggattttggttgcgatttaagttgctccgttagttgctataggagtttctgtgtgtaatttcgtaaaaatatatataaaaaaactgttttgaagtataaaaataaaaaaaaaaaaaaaaaaactcgtgataaataatttaaataaaaaataaactatctattttataattaatagttaaaaaatacctaatcatacataataactaacaaaacaaagttaaattatctatttataatttttaaatttatgataattaattaataattacaaaaaataaaattctaaatatctattctattctctccttaattctctcatttttttaattttttttattctgctttatttaattagagatcactaatgaattaaaattaaaaaaaaaaacaattatatatttgtgtataaaactaataaataaatatatatatgtatttaaaaaattaatctacatataatttttttttcagagagagatatagttaatattaactaatttaatttattaaaaaaattattaactaatatgccaaaaatatcaaaattcaaaatttattatgtttatcatcttctgttccctcacataataaaagtaagtacttaccgatcattgtttaatttattttatntacaaagcaaacttattagaaagaatattaatgatgacatcaactttaaatacagtggtgactataaatgagatacggtgatgattgttgttttaaaattatatgatgaattttctataaatttattatttttttttctgttttagatctctattttgtgtaagaaatatttagtttctaattttcttcactataatgtatatttaaaaaaaaaaaaattgcctgattttttatttatataaaaaattgtatgataattttttaaaattttttttagagttttttaataaagatttattattctttttaaataaacatatatatattttt

SEQ ID NO: 61814 - DNA, 920 bp, Cannabis sativa
  modified_base (861)..(864): a, c, t, g, unknown or other
tttttaaaaaaaaaaaaaaagtcgggtcggatcatatctgatccgattatttgatctagcgagacggggcggggcagatccttacatattctggatcaggttggatcataaccggatcagatccgacccgacttattgactcaatatctttatctattcttttcttaattctctaattttttttttttttacttttttattatttttttaaaaacctccaattaagctaataataataataaaaaaaaacaaaaaagtatctaactaaaagaaattatatcaacacaggtaatagtattttttttttcaaatttacgcacgtatatattttctaagttttactttttaaaaaaaatatatacataataccttaataataaatagagaaattacttcatatactatttttatttttttaaaatatacagtttgggttgctatgacagtttctctaatggttcctatatgggttgctatgtggattttagttgcgatttagattgctccgttagttgctataaaaataaaaataaaaaataaaaaaaaactcgtgataaataatttaaataaaaaataaactatctattttataattaatagttaaaaaatacctaatcatacataataattagcaaaacaaagttaaactatctatttataatttttaaatttataataattaattaataattacaaaaaataaaatttctaaatatctattctattctctccttaattctctcatttttctaatttttttattctgctttatttaattagagatcactaatgaattaaaattaaaaaaaaacaactatatatttgtgtataataactaataaacaaatatatatatatatnnnnatatatatatatttaaaaaattaatctacatataatttttttttcagagagagata

SEQ ID NO: 61815 - DNA, 2331 bp, Cannabis sativa
ccaagacacaagtgtgtcaccaaggtatacacaataacctgctacacttcttcgatcatcaggacagcatgcccaatcagcatctgaatacccggttaaggccaatttttctgaatatttgatgtgcaacccatggtaaagtgttcctttcaaatacctgagaactcgtttcatggcactccaatgagttgttgtaggagcttgtaggaattggctcaacttgtttatggcaaaagacaagtcaggtcttgtgtgagtgaggtattgcaaacctccaatgacacttcgataggcagtcgggttgtccagtaactcaccatcagattttgacagcattttaccaactgtcataggtgttgagcacggcttgagatgctccattcctgtccttatcaatagctcctttatgtattttgcttgactcagatagattccagtatcatctcggtgcacttcgattcctagaaagaaactgagagaaccgagatcttttagtgcaaaatgatcattcaatttgacagtgaagttcttgagttcggagctgttgtttcctgtgacaatgatatcatcaacgtagatcaacaccaatattatgacctgtggtgttttgtaaaagaacaatgaggagtcggcccttgaattttgaaatttccacttcaagagagttgttttcaagctatcaaaccaggctctaggtgcctgcttcagcccgtagagtgatttggacaatttgcatacaaaatcgggcatttccttatcaacaaaaccttgtggctgttccatgaacacatcttcttcaagttggccatttagaaaggcattgttgatgtccaactgcctgatatcccatgattttgcaacaacaatggttagaaaaatccgaatggtagatgcttttacaacaggactaaaggtttccccaaaatcaatgcctggtctttggtggaagcctttggctacaagtctagccttgagtctctcaacggagccatcttgatttctcttaactctataaacccatttgtttccaattatattcatccatggcattctaggtacaagaatccatgttttgttcctttttaatgcaaccatttcaactcccattgcattgttcaagccttgatgtttgagtgcttcctccactgttgtaggttcttcactttcaagaggcaaagttgactgtctgaggtaagtttttggtttaaaaatgcctgccttcgacctggttatcatggtatgtgtgggagctaaaggagcaattttttcagtgtcgggttgctgcagaacaggttcttcaaattgatctgtagcaatttcagtagcaggttgtataatagggctgtgtatattagtggaggatgagtaagaaatgtctttaacctgactttcattgtgtgaagttgatgcagggtcaggtgcatctccaaggaaacttgcagcaggtcttgtatcagtttgattcattatgtggtgttcagcaatgtgatacacaggattaaaagatgcagaccatgaaggtacatgaacttgaacttgttgttcagcctggtatgtatttaagaagccatttttaaaaggaaaatcagattcgttaaaaataacattacgagagatatacagcctgcctgttgaacaaagacatttgtagcctttgtgagcatcactatagcctaagttcacacatattgtggagtggaattggaacttatgagattgataaggcctgatacatggatagcatgctgacccaaataccttaaggaatttatattcaggttgttttgagtaaacaacttggaaaggggactggtcattgagaattggtgtagggagccgatttatcaagtatacagctgtttgaaaagcgtcccaccagtatttaagtggcatgtaagcttgagctggaagtgttagtcccatttctacgatgtgcctatgttttctctcagcccttccattttgggctgaggtgtgaggacatgaatgttggaaatttattccattttcagtgacaatatcagcaaaagcctgaaactcccctccccaatcagtttttagtgctttaattttcctttcaaaatgattttctactaaagccttgaacttaatgaaagctgaaatagcttcagatttgtgtttaagtggataaatccaagtgaaacgactataatcgtctacaaagtgtatgtagaattgataatttgtgttggataaaactggagccggcccccaaaggtcggtatgtatcaaatctaaaggaaaattagcacgttcatggttaagattaaaagggagagcatgagatttgccaaattggcatgcttcaca

SEQ ID NO: 61816 - DNA, 899 bp, Cannabis sativa
tataatatcaattatatattgcaacatcatcataatctataacctaaataaaagtggcaatagttttggactttttatcattgaattacacatatacccttttacatgtaataacaaacaaattacttctaaatgattgaaattatttaccaagtaaactttaaaaatgaatttataattttattatttaaaaattattattataactatattagtcaaaaaatatacacattataatttattattaatatatattcaagtatttaacaaaagatatattatattaaataaacaatcttacatatcaaattttgttacaatccaaaatatatgataataatacaagtacgattttttaaaataatcaaatcataaaattacaaaaataattatatatataatatgtatgtactttaattaaagaataagatcactttgttttttaattaaggtaatatttttagaagaaagatagaaaattctactaaaatagaaaaatgatactaaaaatgttatactaacaaataaaagtggagctatatgaaacaagggcaatgctaggtgtagactaggtatggcggttacctcagatgaaaatattaagatcggtcttaaactatttggagcttaggtacataaatttttttagggatttatacaaatatatttctggtcaaataaaattaagtaagattgtttgatgtagtagtaaagatccttttaaaagttaaagagatcacaagtttaacactccacaccttcttttttattttattacttttttttttttgaagaataactaaaatattattgttggaatttgaactagaaattatgtaatataaaaatataataagtcattctataaaagtcactttaacataattaaatatgtttta

SEQ ID NO: 61817 - DNA, 847 bp, Cannabis sativa
gactatgaagttaaaggtatactaattccatctgattgatcgtcaattttaagttaaagaaggcatactagtaagaatcaaaaatgatagtggattcaagtcttataaacaaataacaaggaaaaataatgaggaaacgaactaccctattttggttaatattttaacatcaccaaaagcaaatgaacacaatgatagcatcaatgatacctatattggagaatatagtatacaatccagtcaactgctacctacaaggacagagtatgcaattaagatggcagaacatgttattgaacaaactcaaaaaataatagaagcaaacttcgaaccaaattgaataatttttaatcctcatgttgctaaaatacaagttggtcaagtgtttacaaataaggaaactctaaaacaagcagtcaacctacacttaataagacacaatcaacctttcaaggttaaaagatcatgaacacttgactataaactagtctgtcttgatgataactacaaatggagtttcttagtatcaaaacatggcaagactgacatgtttatcattagaaaaatagaatatacacatacatattcattagacattacttctgtagaccatccacaagctacaagaaacctagttggcaatgtaatgtaaaataaattcgtaaacccaaaaagacattacacaccaactgaaattgttgatgatatggcaaacgactacaatgtctcaatatcttaccaaataacatggagagtaagagaaaaaaccattgtgaatgttcgtcgttgctcataaaaatcatacagtgagataccatcaattttatacatgatgcaaatatccaac

SEQ ID NO: 61818 - DNA, 1121 bp, Cannabis sativa
gaggatagtataacactatctgctttagagaagatcaatgatattgaggaaacaattgcgaaggtatttttatgttcgtgtttggtaattgttatggattattaggttattttttttttaaactgatttttcttttttgtagggtaaggtgttgcacaatgaagtaatggcttttaatcagaggaatattgcaaaggttccatgttataaatgtttaattattatctaccaacatttaatcttcaactttgtttatgtacttattattgaaactttttagtttatttttattattattattattattattaaaatttgtgtttgttgtgtttgctggtagggtttgaatgtagattttatgcctaaggttgttaaaagggctgtgaagcctggatctgtaatgaagagtctttacacaacaaagttttgttcggccagcagtggtaaaccaacgggtgaagtgtatggattgtttccgttttcaaatggattgatggtcatgccagatgaacttcaagttaaatattttgagcaatggtttaaggctggtttcaatgataaaaacaaattgaagaagttcaaacaagaggatcgagtattgaaggtgccattagattttgttgttgtgaaggttaacgataaaatgtggttttacgatctgagaaccccggggaggaatttatcatgttcggttagtatttttctttttatatattaatgggatttttttttatgtttgtgtttgagtttttctgtgtgtttataatttatgtttttttttatgttctacgttctgcagcatattgatgtgtgcttttattagttgaggtagcaaattaagtatgacaagtgtgagggttgctgccagcaccactgattgtttttttacagcccatatatttgatttgtacgataagttttgtgcaaatgatgatgatattaatcctgttccttgggatactaaggtagctgcgtatattgcgggatttggtttgttgtgtggtacaccatggtttgttttagatttcatgctatttccgatcaatgtaatggctttggcacattagattttgtgcatatttgacatcaagatgagttgtcttaaggtgtgcaattctttg

SEQ ID NO: 61819 - DNA, 1089 bp, Cannabis sativa
ggttgaacccgacctgactacatgggtttttaggtgatcatttttctttggcatcgggtcggggcggggggtaagattttttgggtttgcgagtctaaatgtgcaggcctagttgatgattaagtatcagaccttcttccttctcattttccttgcttcgttgctgtcggtaggtaagacaccttgatctaagtaagtagttataggggtcatccatgactgtgttgtattaagtcggagtgactcttctttttgttaatgctgggttcaaacaagtattctatcaaaataaggttagtcttgtctacctttgcactcgttgccagtcttgccaaggcatcagcggtagcattctcctctcttggtattttttaaatggtgtacccctcttgttgagcgagtaggtcttatatcttactaaggtaggccatcatcttttctcctcttgcttgtagtcacctagaacatggttattactagttgagagtcgttgtaaatatctaagtattcagctttgacctcccttactaattttataccagcaattaatgtttcatattttgctttattatttgaggcagggaagttgaagcaggtgggtacattgactttttatcctttgagagttattagggtaacacctgcccctgatgactgatcagtaaaagagttgtcgacatgtagcatccatgtttctcttggttgatcctactcttgcttcttttatgcgtctgaactaggtgattcgagtgagctactcatattagaactttgggtgtcactacttggacctgacacttcaccttgttgttctcttgccttattttcaacatcttgtaccctggtacactcaactacaaaattagccaaggcctgacctttaatagccgatcttggttgataattatttcatatttccccaactatattgcccaattaaggaggcaccctaacgtatcgggctattgtaacacttggtgcaatggttgatcagtgagtaccatgatggcgtgcgcttgaaaatagggtcaaagttttcgggaggctaaaagtaagcagtagaccaaattttctatgaggggtatttat

SEQ ID NO: 61820 - DNA, 866 bp, Cannabis sativa
tctgagttcagtttggtgctttccttgagagctttcgataattaaactctgaacaaaaaaacacatctcccatatttaaatattcatcataccatggaaaatactactctagctgatcacgttgaacaaaccgttactgtgcatcaccatggaaaggagccttaagggactcaccccacgaacgatcaaaacacaagaaggggtttaaacatgtgggatgtgaagataaatgataatgaagaagatattccaaaaagaagaaactaggggacgtatgatcccaacaggtacttcgcaattgtagaattggaaaatcgtcaactttggcaaaggcttcctgagtcaaatcgaagaaattcagagttggaagcgaggttgctacagaaaaagcagcccagaatgttgcatctccaacataggcgtccacgaggaagacctctcggatcaagaataaaaaggacaaaaaatgtttctctcgaagagaacaatacagataacccatcacgtctcaggaaccacaaccagggaggactagggaagttcatgttgacagggaaaatccacaaaatccaaacagtgcaaatgcaaggcaaaggcgacccgatgccttagaccttctcatataaatatgagacctccaccagagcaacctactattagacccttgagacattctcggccaccacgagacccacaaagagctagaggaacttatatgacacatctgtttgtgcaacgtcaactagtgcgcaaaactacttctcaaaggattgagtcaaacactatgatgagtgagttaaggaggagccgagaacacaaccaaccatcaatgtcacaaacatggggaatttcttgtcaaagctagg

SEQ ID NO: 61821 - DNA, 1351 bp, Cannabis sativa
atcttaatctttatgacacttgaccaatgagatttcagaagttaagctgaaatgacaaatgttaatctctgatatgatttttaaagacattagtcaatctataagcatacttatttatagatctaatgtctcagtttttcttccaaattatctgtaatgtgattcatttgtaaattttggattttgagtttttcaaaagaaaaaaaaatttccaagatccgcttctcaatgtatgatgttttatattactattcttttcatttctgtctcactttgaaataggcattctgcagtgattctaataaggccttcttttcatattctagatgaattatgaagatttttgccatattgcctctgtatgtactgaacaaataggccccaaatgtcggcgtttcttcagcccttcaaattttatgaagtttgagaaagatgaacaaggaagaattgcaattttgcccttttacctttatgtgatgcgaacggtaggcctctaaaaaaacactaatgtatctgtgttttgatttttctttctttttgatcaagagtgtatttgtgatacttaatgtacttttttactttcattcgaaatctgctatcaggagtacttaccgtgatttgctattcaggtttcacttacacaggccagaattgatatgagtgagctcgatggggattctgatggattccttcaacagcatgtataaacttttttagaataatcattacttctgcttttcagtcttcactgtttatgctgtaatcaatactttttctatccctttatcaggagatgcagggctatataaatggtcttatacctaatctggcacaattacgagatatgccttccggctttattgacacgtactgtaaaatagcggcacacaagttctttttcttttgtgaccctcatagacgaggttggttgttattcaacttattttagattgttcatacatatgcccattttaagtatgttcttaaaataataataatgatgtgtagattatttttgttatataatctataatttccctcttaaaaaactgaggcatgtgctttaatttttattggtttatgattgtattagattttgttttgaaagagctcccgccttggccttttgtgtacaattttttctttttctcatttgctcccctcacatcttaagtttattcatgaatttaccttttctaagggcagtaggattttaaggatggttattgtttcaatcagtgcttgcattgatttgttattcacagtttactatgtctaaacaggaaaggcctgtataaagaaggtgttgttaagtaactgtctccaggaactaatggagctgcaccaggta

SEQ ID NO: 61822 - DNA, 822 bp, Cannabis sativa
tttgaggttttactattacatatatacacatgtatacaatagtcatttagttgatatttaacgggcgtgtcaaatttgcaataagaaaaataaacttaagagagttttaccacaaaaaaaaaacaaataaaaatattaagtgtataaaaattaaaagacgagtgagttgcactgcaaattgcgtgtgaaaagaaaaaaaaatacattaatattttatccaaaaaatgaagataaaaaaaaaattggaattactaaaataaaaaaaaaaatggaattaccccaaataagtagataaattaagtaaatgtctttttttaaaaattaataaaatgattaaatataataaattaaatagtaaaaactataaaaatatttatattttaaaattatgttatatatttgaagatgagttatacatgttcaagccaaaatagaccacgaggtttgggtcgaacaaagaattgtgtaaaaattccaattttgccacttagattggccagtaagaaatgacttgtaatagttaaaaaataaattttacgagatctcagttatgtaactttaagtattttgatttgaaataagtttgtaatattgcaagttatttatttaaatttagtttattattagttttatatcacttggcttatggatcccgattaatgggattagttagctgtaatcacaacacatggtgttcctctaagtaggacattataggacggaccattcgagtaaggccacgcatcacctgactgtgcaaagagagaagccaaaaagtccctgtacgaccagaagtttccatgcagacttggggagtaaatt

SEQ ID NO: 61823 - DNA, 521 bp, Cannabis sativa
aaggatccaaaactctgaccatgctttctcaagttcttccagcacagattgggcaacctcacccttttgttcaaatagctcatcaaaggtcatcctagggacaatagctcgaaccactagaaccagaagtcaaaaccaaagacattaatgtaccaatttctttattttttttttaaaaaaaagaacaattctcatttattacaaaagaagataccatccaacacaaaagcttgaatctgttctttagggttctgcaactcgtaataagcatcattggcattttttttaacgacccggtattaaattgatcattgtaattgaacaaaaatgttatcctgaaaaataaagatgatcaattattccctttgttaattcataaatctttatcttaaaaggcaaacaaacctagttttggtttcgatgcggacatcaagggagtagattcttgtagatagaacggcggcgaggcattctccggcaaaagggttaaagaagaggaaacttggctcggccaacctctc

SEQ ID NO: 61824 - DNA, 2055 bp, Cannabis sativa
ccactgcaaatgtacgctggtaaaactttgatctctttgccagcgcagtttgcgaactgtgctggtaaaagtgacatttcttgtagtggtcacaagttagttttgttgtaactaaaaataaaattttttgtaatgatatattccttttctgatttttttttttatgtgggtccacctagagttaagaagtatattaattgtaatttttaaaagaaaattaaaaaaaatactaattttggttactataatttggccaaatatccatgtgggggctctccatttttctaaatcacattttagatctcatgttgatcaaaatagtactctagctagatctaatttttgtcaaaataatttcaaacataataatctaatttattctacattgacaaattgtattcctttcaaacaaatataggaaccaaaattgcatttttcctttctattaataaaatcagaataattaattgctaattaattatattaaatttggaagtagtagagtttaattgtcaaaacaaataattaatttataaggatcactttgtcccattagtgagtacaataatatatatatacatacctggagaatcaaccaagtggaccagcaacaataggctccaaaaagaaaaatacaacccaatatccaatcatcatgatcattactactactgctcatgttggatcccaatacaaaatcattattattaggtaaatttaggagctttgggcctttgaccaatgccatggacatggcaccactcacacatactatagttcctaatatcttggctaagcttctcaagctccttatgtttaccttctctaatctaaaaatcaacaaaaattaatttatgtaagtatatatttatataatcacaagctgttatatggtatttttaataataaaaactatcataaatttaaatctcatctgctagctaagtctcattaatttcaacagttatgattattgaaatataatattttaatctgtatacccaaaaatggatgcaattagaaatgtgattgctggaacaagatttgccatagcgcttgccattgatgaagaggacaataatagaccttgaaaataaatattctggttgattgctacactaaaaataaaataaaaaaaattaagtgtaacaaaatttaactaaataaatatgattattaaaatatataagaattaattgaaataatatgaaattaattattaattaccctatgagggagaccagaaatatcaagctaaaactccttaatcccatagaagaccctcctgatttttttctgtcatatatagaaataaggttttaattgggagaaattaataatattttgatgatatatagatgtatagatatatatagatatatataccttgtgaaataagcaaatggtgcaatgaccaaagtagctatggcttgtctataaaagacaaagacacttggactcattccttgtagtaaagcagctctagtagacagagcaactcctgcataagaaaattgtaagccaaacatagccattgctggcttgtactcatcaaaacgtcccatcttattattctcaataacaacaaaaccaaaaatatgtatctttgttatgagttataatcgatgatgatgagctataataattatgttagaacttcctctctcacccttatatatttatacaaatatattattgctcaagcataaggtagctagaaagttattataatattatagtatgggacgtatttagaaaaggaaattaagtattatagaaggatctaaaagattttaacaactgtgtgtgtatcagtattttaatgaagtatatataatataacagcacatgaagaattaatatgtaccgtttacattacattataaagaacagagtttatatataataatgacataataaactattcactccttcacaatgagttggctcttccgcgtcctcttggtgcttgtgaatttcgacttcgttctccattattgaaattattgttattataactcccccttccttctcttcgttgtcctcgaccacgtc

SEQ ID NO: 61825 - DNA, 7246 bp, Cannabis sativa
  modified_base (7195)..(7198): a, c, t, g, unknown or other
gactaacaaaaaaaaaaaaacatgcaaaaaaataaaaaaagaaaagagaactgggaaacataatcaacttgaaaaaaatcctaaagcaacacaagatccatagaaaaaaaaatcttattagatttgggagactttaaaacattggctcaaactcaaaatcagagtcggagttctccaacacagattgagggtattttgatttagtattcttcgaagtactagaatctagttttcttttagcaggaactaggaagtatggctaggaggattatctttcaaactcttcttgtccattgatgctcgtgttttatttttctggggttgttttggggactttttagcaaccggagaagatcggttaaaaaccattgttaatgagaaaaaacaacatttataagaattccaagaaaaaaagtgggaaatgtatagggaagtttaagatgaaaaataaaaaaataataataaaaaaaaaactctacaaatttgaaaaaaaaaatagaaaaccacccatttcacaataagtgcctgaaaaaaaaaactggaagaagaagatgaatagtagagcatgggggttggatttatgtaaaaaaaactagaagatgaagataaaaaagaagatgaatagtgggacatgggggtgagatttttaaatttaaataaaaaaaaaaaaaagcaaaaaacatgtaacttttgtgacaacccacatcccatcaacattttaatctaaaaataatataataattattaaatattaaaaataataaataataatttttaaatccattaaaataaaaaaaaaaaacaaaaagaacttgtcacttttatgacagcccacgtcccaatcagtcaaaaaaacaaaaaaattgtgtacacaaaaggcagtatactgccgaataaaaaaatcagtaaaaaagttaatatccgcatatcacagtaaaattgtaagaaaataggaaaagttagtaatctatgtaaatttccctatttttttatcttaataataaaagtatatttatagtataggatcaaaataaaacccaatgatatatgatcaccttatttaccaaatagtgactcgtgtgatttgcttagaaataaaatagaaaaaaaaaattaagatgatacttgattattgtaagtgttttgatatttttaaaaaaaatattggacaataattttgctaattatttatattattaattattaaatttaataatagaaaaaaaaatcaatgacttactaaataagaaaaaaataagtaaattaattatttttttgaacatttactctacaagtaaagtttgttttaatattatttgaaaaactcttttaaatattttactttgatcaacgggggacacttagtataacaaacccttaaaattagataatatataataaaaattagaaaaataatgcatacatactatttggttgcaatgtacctccgcctctgaagctatctttaacttttttaaatagatttactattttcaaagaataagtgatgagaatgaggactaatactctatgtttataggtgaaatactttattagtatctattccaaaataaattatcaaaatattttaacaattaatttaaaatattaaatcgagtaatcaaatattcgatgaatcgaaatctaaccatatttagaatatttatagcaatcacataattattttggaattaattatagtcaatatcaatctcatatccaaaatgtaaaattaattcatacacatataaaataatttagagattttatacatacataaaaactatactaattttctcccacttggtgagtatttaaatttactacttaaatcgaacgattatccttgctatacaaaaaatatataaatcatggaactatgtccttattatataacgagaattatcgtccatgtgttacgatatatatgttactatttaacaagatttttgaaaacaaaatgtaataaaaaaaaagctaagaaaatgaatcaaataaatgaaattgagatggagatttttacatggttcatgtattaatgaatcctaatccacgagtcaatagtattaggctaagtagccttgaagtattacagcaatgttcgtgacaagcttaagaacgctaactttttgctatagtatttgagtccttaatttttaaccgttttcatgaagatatattatagtatttataggctaggatctaggtatggatatacctgagacccgctatggtttgtgtgcaaacatggcccatcaatggagtaaattaatatattacattaactttgggcccacggactgaggtccaacctgtgttgttatgatctttcgtactacgggagaccacttgatatcgacagatggcacgagtgtgtcacctttgcgcactgtagctgttagagtagtggttggcaataagtgcctcattattggaagttgtgaatctaaacttgattgccccatgtaaaggtttccccccaagtgtgataagagcaatccctgcaccagacagctgattggtggatgatccatccacgtgtaattttcaaattcatatgatgtcaatgtcttcttctagaggggattctttctcgtgtttcctttctagctccatttttttaattttctattttcttgcattgcatttggttattaagtttgctaaggcttgaccttttatttttgtgcaaagctggaaggtaatttcatattgtcctatctcaattcctattgaagtagctggcaaggagcatctaccttttgtatgacttggtgtatgggctagtcagtatacacttggatattggatgagcttggaagtatgaccttagtatccttgagtgtaggagcacgcaataagttaattttttgatcaggggtatcgaattttagcatcaattaacattttgctaacagagtagactgaaggttgggtaccgttttcttctctgatttgtatggaacatactacaaatttggtcgcttcaaggtagatttccaatttttctccatctaggggtttggataaaataggcgactgtgtgggtaacttttttagcttttgaaaaatcttttacacactccttggtccattcaatttttttgcttcctcaaaggatgttgaagaaaggaacacattcatttgtcgactttgacatgaacctactctagaagggctttaattttctcaagatttgcttcgtttccctgagtattgacaataaatccaagaaatttacttgagtacccggaaggaacactttaaatgattgagtttcatgttatattttttggggactttaaagcatttgtctacgtcctctataaggcccctacctttatagatttgacaaacatgtcatccacatgtatttccatgttacatctaatctgctctttgttgattagcctttggtaggtagccctaacatttttgagtatgagtggagtatcttccactagttgctgtctatgctcttctggcccatactgcagcccgttagggatataaatgtctatttctctgtttggattctttatttttggagtgtcatcccttggttgttgtccagttatctaataagctcgctaaattgacaaggtcacctccctggagtgattatcaatttttgtttgttaggctttcatgatttccatatgtttattcatcaactccttgaatcggcatttttgatgttcgaatgccattctcacagctgctcaagtatcctcttgatcatggtgcagagtgttggtgttcttacattttccctaaggcagctcacgaattttccagcatagtatcattaccaatcatcactcgaggttctccaacaggtggatttccaataccttggcaagtctatctggtatgagtactagtggttccaatttcctacgtggccagagtgaacccaactagaggggttgtcactccttgtcccaccaatgggggacctcatggaggttaaggaattgttggacagggatatgtcctcactggatctctccgatttactagagtttgcacaataggatttgtaaccattggatcggttgtttcagtggtattacctctccttgtggtcaaaaccatctttgtgagttttgaagagaattaaaacaacgatcgtgttcttttctatcaatgaaagaaccaaaatgttgacctctcttttagccaacaatgttgagtctttaaagcaattagagataatagaacttgataagaaaaataagaacatagatttattataaaggttcggccctgtgatggttgtaatagcatactccccttttacttgtattaacgtgtgagaaaaaaaggaagaactcttgatctctcttgaaagcttatagatattttagtagcataagtgcttttttgaaaataacattttggatccctgaatagtgaaagggtctactatttacaaggagtaattatattcattaggtttcccaaaagaaataaagaataaaaagggaaattagttattttcataaattacattatttacgtgcataaatcctttgaaaatgggtatttaatttacgaatagaggaaagtatctttaaggctttctctattgcatttaccttgcttggtatacagaaagtggttgtgaaattgatgctagtcagatggtaccatttaccctgtgcgacacatttacattatttttcaaataagcagtatatgatcgataatctacactagacgacataccaacaaaggtttctttcgtctagatttaaaaattctccacgtgtcactcagataagcgccacattaccctatgcaaattttaggatgacatatataaatttatatcaaagcaaaagtatatatatgtggctactgctactgttatccatgtttcaggatgaaggacatgcaataaaaattagatataaacctcccaaattagcagaaagattgctcccagacaagccttcgtccacgatttggaagccttactggtacttcgagtctcagagaagagtaacttacttattatgaagagagatttagatagcccaagcgacatttatacattttctatcacaggatcaaatcttgtccccaacatcagaccaagatagtgtgcacaactcacctatgaatataccatttttgcctgacgactttcttaggcatcttatcttcaaggtgccatattttggggacatgtgtcttgtaccaacagtggttcccattatacaattgcctcattgcatgaaaaagaactttcttggggccccaattgtcagtattttatttttattttactccaatagtggctttttcgcaaaaaccataaacgattcaatggtacatccatacccttagcctataaatacccccttatttgtagacatatcataaaaaagatagtcgaagctattctaaaatctctctaacctttcttcttcttcaagagaaaccaagagagtagagctagggttttcttgtaaacaccgctctaaaatattatacaagccttttaaggcgaatatacttactcgtggactaggactcattaacgcctaaaccactctttgtctagcatttattatttcttaagctctttataaattatattccaaaaatctatgtaaacatgttgatgctttcattgagaactcaggaaagatctaagccacggtgttgttgaaaccatggtggctacaaaaaataatcgcaatgaagatttctcaaggtagcctcgatgtcgtcatggaagatataaaccctctctctccagagcacaccatgccaagcaatgcaagagaaggggatacatctgaagccaaaactgagagggtaacttagacaagcatcataaacaaggtgaagaagatcgtgcatcgcagatgacaaggaggatgatgaaaaatatgtcgaggatggatactataaagttgggtattattatgaacaagaccaataagtggtgtgagtgtccaaagagttgcatgaggcctaggaaaaattagctcatcaagagaagttttcttaaaagattgagagaacgatggctcgcctacaaaaaaaattcggagatctggaagagaaccttgaggaagatgcctcagtggaactcatcaacaaatacaatagggaaaatgctactaatccctaaaccttagctcctacaaaggacaagggaaagggaaaggttggtgacccttaaaactcgacagctcccataccaccttgaaaaatcgtaaatcacaccaacagaaccttacaggcatagaaggccaccgatgcctccaggcttggatgcccttctgctcttaaagatcacgtagcccaaaaaggaaatgttgtgaaagtacccaggcctaagggaaggaaaaaccaccccaatgattccattaaccaggacggtgggactgggtgatagtattttgatgacagtttgtccaccttagacctccaaagttgtcttgacgctaagtaccaaatagctaaaggaaaaaaggcgaggcgaggtggcaatgacctcaggaaccatttgaatgataagggtcgtgggcgcaaccttctagaaagtgacacaaagacgttaaaggagcagattcctgccttgactaaaaactgagtggggctctttcaaattcagatgatgaagatcttgagtcgtgtattaggcagatcgggaaagcctcattgttggagaacttcaagatgccttagatcgagctgtacgatagttgtacagacccaaaaacataccttttgaagtataacaaaatgatgcaagtggcaagagtgagtgatgatgctaagtgcttgtgtttctcactaacacttaccatgtgtgtagaaggtaggtggaaaaggctcactcctaaaaccattcatagctggaaagatttacaatatactttttggaagcagttcatagccacccgagactatgacatggaagttgggtcgataaccattgtcaaacagtaagtaggcaaaagcctaaagaacttgtaatgaccactttagtaatttggattactaaaggaaattaggactaatttttgttatttttttagaattatttatgaatttaattatctgtgggcctcattattagaaatgagcattagagttataatttctcaattgcggagattttattaaacttttggggtattatttgatatatatgtgaaatatgttatttttnnnntttttgctcggtgacaacgaaaaatacgatggatggctagtttgatca

SEQ ID NO: 61826 - DNA, 801 bp, Cannabis sativa
aaatgagattaggctcatatatatttatttattatttaagaggtacagtttgaccattattaattggttcataaaactaatggcatggcacacagacatgaatgttcatacaccacctgaaaatccttctgtaatttcctttttttttgaaagggatcctattttcaaaagaacattttacccaaagatcttattttattatcctcctaaataaggcaaattcaataatgttgatgattctttcttacaaataattagtcttctttgttactatcactacaagtctcaactaaacatgttcaataaaatctaaaaatattatgaaaatgttcaagagttattattctcattcgtttgctagtaatattataccacgattttcctttattattcccaattttgcacagttatcttaagggaatatggacttttatcaaatatatatatatatgatttacgtattaggtacatttttttttggtcaactttcttttttttttttttttttgaaaggaagtctatttaacaacaactaactattccacctagcagatgttttaacatctaaagccatctttgttaaacaataaaagaaaatgttagcatgcttaaattaaaaccaaaagtaactaatttttggacaattttatgtaagaacatatagctatatatataaaattattttattgtatatttattatttataaaaattaagaaaaaaatattgaattgaatagttcaaagctatcttacatataaagttttttgctaaattcttatcaggcccggccctaggcatag

SEQ ID NO: 61827 - DNA, 1159 bp, Cannabis sativa
attttgtaatgactgtggtctaaaaaaagactactatcaaatttaagaattttaaattatatattataaacatatagtgctgaaataatttcaaaataatgattataactaacttgcctataaaaaaaataattataaaaaaatattttaatcttattttggaaatataaactacatgattttttttttttaaaatttaatgatagtctcaagtaattaggatgtacataattataaaagtaaataaataaatactctctaatgtcgaaacagataagatgtacacgattatgaaagtaagatgtacccgtagtctcaaatagtacacgattataaaagtaaataaataaattaaaaactcacttaaatatcgaaacaaataagtgtgtaccaaataaaaactctcctactatctactaatattttggaaataacataacacttgctaattagtaagttagtatgtacaaattcagtgtactaataatcttaggactttaaatattttgaacatattaatcgattttcagtttagaggaaaaaaaatattgaatttgagttaaatatttttaataaaaacttatttttgatttaatataaaatgaaagatatttttttttaattaaatagctaaattaaatttcaagcacaacaacttaaacttttcttttattattagtcatttgatcaaaatccaataattttaaatttctaaaattgatatttattgttatttttttaataactatccatgtatattactcattgaaaagtgtttcatatttttacatatcatatcttttattatttttcatgttgagcattgtttcatatattgtaatattttttatttcaaacactgttggatatgaaatgttaaaagaaactcttcatgtccagcacttattgtgttggtcataaaagtagtattttttagtaatgaagtcaaaataattttttttatatattaataataaaatggttatatataattggaggtttaattaaggcagaaaactctaatactattttctatactattattacttttaaattatcacattttttaataacattatgatatttttataagagcctttagattaaacattttgaggacaaaccaaaaactaacatttattaattaatgaataaattg

SEQ ID NO: 61828 - DNA, 723 bp, Cannabis sativa
  modified_base (650)..(652): a, c, t, g, unknown or other
atttagggcacaaaattcaaccaccagttggcccggtgactaagggcgcgagccaagaaattcaaataaaaactcaacaacttagtcacagaagtttaaaataagaggagaccgtggtcaacactgaaggagagcaaaaatttgggtttctcaccaatgtagactcaatttagacccaaattatgctgatcgtgtttttcaaggcatttggcagctttcatttttaattttgttccctttattgtgtctttattttatttagaaatttgtctttcttttagttaccttttttcttggttgtaagttggctatataaagccttgtaaacactttggaaaatcagattattttgaataaaattttgagaggttttcttctttagttctttaaagaactttttgaacttatcaaggagtattccttgtggcttcaacttgacttatcaaacgaatttccatcaccgtttgtggcgtcttccttcataccaaggttcatgcttaactaagcattggttcgcggttccacatcaaaatttcaagaattcttagaggttgccataaattggtatcgggtttaattacaactgttggtgtggtttgtttcggtaacactagtagttatttctttattggtacaatgccaaaaactgnnnagaactttccataggctgaataagtatccttcctgcaactttaacattcagcctcatagtagagttagaaa

SEQ ID NO: 61829 - DNA, 2122 bp, Cannabis sativa
ttacatggtgcgataatatgggtgcaagtgccttagctgcaaatcctgtctaccacgcacgcacaaagcatatagagttggatgtccattttgttcgagataaagttctaaacaaggctcttgaagttcggtatgtaccatccagtgatcaaattgccgactgtttaacaaaaagtcttaccaaccacaggttccatttcttagtggacaaactaggtgttgttgagacaccatctagtttgagatggggtgttaagaaatgaattttaaccatcatttaccactgtaatatttccctgtattttactgtgctgatgtgtatcttttgcttttcctaggctaaccaaattcggttaggatttgattctgcaattgtaaaacgtgtagatattgtacaatcattactctagaatattcttgtacggtacaattattggatataaaagtttgggccagcctcaaagtttgttgagctgagcatttctgcatttctgcatttttcctttcattctctgttttctctgctttcaaacttggtatcagagccgtacctacaccggtggtgcctattctcgcctcagctccatggcagatcaaaccccagctcgttcaggtgaacagagcatctccagcgtcatggctcagtcatcagttccttcgacaagtgctgtaggttctcaggttgtcaccactttgaatcaaccctttgccttgaaacttgatagaaacaactatacgttgtggaagactatggtatctgcgatcgtccgaggtcacagattggatggatacctaaaaggtaccaaagttagaaccagtggagttcccttcctgcagacccgtcgacaggagaagaaggtgttacagttaatccagagtttgaaatctggatcgtgaatgaccagttgctgcttggatggctctacggatcaatgacggaaagcattgctacggaggtgatgggctgtgaatcatcttcgagtctgtggcaggccttggagacgctgtttggtgcccattctcgtgtgaaaatggatgactatcggactaagatccaaacagcaaggaagggtgctatgtccatggccgattatcttcgacaaaagcgtcaatggactgatgtgcttgctttggctggtgatccctacccagaaaagcaattagtatccaacattctctcaggactcgacattgagtacctaccgattgtgcttcaagttgaagcaaggaactctacatcttggcaagagttacaagatattttgcttttgatagcaaacttgacaggttaaccacactttcaggagctacaaagaacttgaatctgtcttctccttctgcaaatctagctgctactaaacctcccaactatcctggaaacaaagggagtcactcagcacacatgggtactggaagccgtggcaattctagtcatcaaagaggaggaagaggtccaggcaggttcagaggaagaggtggtggtaggagtaataactcgaaaccgacttgtcaggtgtgtggccgctatggacactctgcagcttattgttacaaccgatacgatgaaaattacatgggttcggatccatctgctgggaattctggttcgaatggcaaaggttctcaaggtggaaacaacaatggtgcttcggcctttgttgcaacacctgagatggtggaggatggagcttggtacattgattcgggtgctagtagccacatcactgcagataccagcaacatgactcaaaagaatgagtacaatggtgaggaaacacttactgttggcaatggtaatcacttaaaaattgctcatgttggcactagctctcttgtttctgttgataacaaatgcttagttcttaataatgttttacatgttcccaacatcactaagaacttgctgagcatatctcaactaacatctgagaataacgtgtttgttgaattttttgccaaacattgttttgtgaaggatctggacacaaagagagtgcttctccaagggacaattagagatggtttgtatcgagttgctggacagcaagggagttcagccaccaactcacatgagtctttaagttttcagtatgctaaaccgtttactggtgtagtttttcaa

SEQ ID NO: 61830 - DNA, 845 bp, Cannabis sativa
gaggggtttcttcttttcttgcatgtatctagccattgatggtcactggcagtttcttgccattgacttttggtcgatgctggtttctttagtgtcctccagtaatggtggttttttgttttctcccttcaactttgtgtgcagtttgagagaatgtggtgtgtggtgatcaaatggtaataaagagtaacttttagcttattccgggagtggagatattgaccgaaaggtctgtcaattgggtgaaactttgtggcctcaatgtcgtctataaacgtaggaatatgaacacctaaattgatacttttttagagcatctacaatgttaacatttctaaaagtattaaatttttttacataacttaaatatataatattttattttatatttgttttaatagtcagtacttcaaaatattattaaaataatattatattactatttaacatatattaaagggtaaatacccatttggtacattatattttgtaaaaagatatatttgataccttttgtttttatataatgatgaattggtaccttctatttctaaaaactaccactttagtacctgtgattaaattttttaatattcctaaattacccaacatcaataattaattgtaatatctaaattaataaaatgaacaccataataaaaataatttatgaaaatgataaattgtaaaaaaataaatttattttataaaagaaataaactatatatattctttcgagtgatgaatacttttattaggaaaatgacttttcaaatattttaattagcaaaatagccttcttttaaaattgatataataattaatataataaatacaattaatat

SEQ ID NO: 61831 - DNA, 1256 bp, Cannabis sativa
atccaaacactctcaagtgtttcaggtttggtatcttcccataccacatctcataaggtgtcttcaagtctatgactctattaggactcctattaacaaggttacaagcagtagctaaagtctctccctaataaggcttttccaaccccgaactaagaagtaaacacctcactttgttcaaaagggttctattcatacgctcaacaactccattctgttgtggaaaattcataactttcctatgcctagttggctagttatcccatgctcattacacaatctatcaaactcggtattgatgaattcttaacctctaaatttattttgttttccacctgagctttccatatcttaaattgttctagacactcatatttggtcttaagtaaataggtccaaacacatctactgaaatcatcaataatagataagaagtagtgtttacctgaatgtgttaagattctacttggcccccaaaggtcagcatgcacatactctaggactgcctttgtgttgtgagttgctgctgtaaacttgatcttgtgttgcttgccataaacacaagtatcacagaatggcaatgcacatgtctgaagcttttcaaatatgacccccttcttgtgcaattccatcatgccttattcactcatatgttcgagtctttgatgccatagctgcatatcactttctaaaccttgtattgtatctacctcagtcacaggtacggtttcacccttgagtacatacaacccatatactctctttcctttcatcacaagcattgaaccttttgtgatccttaggctcacaattaaagacttatagccatgaccttcatcttccaaggttccaagtgatatcagattcctcctcaattctggaatgtgcctcacattatgcagaatcttcacttcaccattgaactgccttaaagccaccgcaccaatcccaacaaccctgcaagaaacatcattacccattagtactctaccaccattattggtttcttgaaaatcaaagaaagattcttagtggggacacatatgataagtgcatcctgaatcaaggatcaactctatactattattattttctaaaatagaaaataattccccatctgaacttccatctccatgctatcagccacagttgtagattcttttctttgatttccatgatcattagattttgagtattggttctggcttcttcaatttcctccatctctgcaatttcctctggcttcttctcagcca

SEQ ID NO: 61832 - DNA, 1197 bp, Cannabis sativa
ctatgtagttcccgactgcctgaaacactgtagatgtcatacatccagattgaagatcatgaatttgaacccagaggtccaacgtaccgagagtgatacatcgagggttggagttgttcttcattcgttagataattagagattttctattgaaataccatggactgccttcaatcactcgcttaatgtcaatttcatggaaaaattgaaacaaaaaacgtttagcatccaattcttttatgtatactcccttaccaggcttccacagagccactagggtcagttgcattgacggaaaatccactgcccctgcagtgataaaaccacccaccagacataaacgccaatcgtacacaaactcctcttcctccctaggacccagttcttccagatcgagtccaccttctgactcttcttcaatggctatttcgaatagttgttgatcaagattactagaagatgccatcataaaaaatcgtgggtaataaccaagacaaaaattcgaaccaacaggacaataacacaagagacaaaactaggaaacagagcactgacaaaccatgacaaaagtcaagacttaaaacatattaaatttaaattgtaatattaaaaaaaatattacattatatagccatatctaatataaataaaacataagagatatatatgtagtgattttaatttgaattgtaatattttttttaaagaaaaaaactatttatgttatatgaccacatttaatctaacatatatatatatgaaaaaaaaattgtgtgtaacaaaattttctaaaatcttgttgtttttctattggtctacatatatacattatattgcacaatgtgtgattcgtctatatatacccttaaatattagagaaattttggtgtgtgctatatatataatacttcttaatgcgtattacccaggtaataaacaaatttaactataaataataattttaaaaatattacactattaaattttagtccaatagcgaataataaaagaaaattttgaatttatatgtttaatttagctactgaattaaaaaaatatcaaaaaaataactctttttacactatatcaaaaatatatttatatgaaaaaatagttaagccaatttcaactttttttatcatttttttgtcgaaatcttttttttttattattatttttcagctaatggaccaatct

SEQ ID NO: 61833 - DNA, 1194 bp, Cannabis sativa
  modified_base (1148)..(1168): a, c, t, g, unknown or other
atctgcccggttaaggctacatcagtccaaactaagctggaaagttcctatccgtacagacgtccgcataggcacttatggggaaattattatcctgattttttccatctcacgtggcatatcaacgtggccaagattaatcacatgggagtacaacttgtcaataaaaatgccaagtcatctactcaacacttcagtaaacgagaggtctgagtacttagaagggataaaaaaaatgacaaaccagccacataagggggctagccggccacccctggtcgaccccatggccagcataggtcggcaagcctctagacattgtagggtcggccaacctctagacattgtagggccggccaacctgcacctggcagcctttggtgcgcagccttcatctgaggacagcaagctaagttgcgatttgggcttcaacaacccacaaaaataaagaaaaatatcagcaaattccttattcttgggggataattaacccatttaatgtttaattatataaatgaggctatattttcttatttttaaggaatattagtggttaatccatgtaagctctactatataaagaacactggcctaaccctaattccctaagttcaaaatctctaagctctcgagctaagtttgaaactcaaactctctcttctcttctctctcacatgctcttggcactctcttaagatttttcaatttgattctcacattgtaatcttaagagagccacattagattctaaaacctttgtgatgtgagtggtattatctctagtattaatacaaccaaaaagggagtaggtcattacccgctaattaagtgggtcaaatctaatatgtggcaaacatcagtaataaatacgactctattgtcagctggctaaatctgagattaacaggtacttatgccgctaaatataaatattgaattcacgccgcatacaaatttaaaattttaggtacttatgctgctatttaacctaaatatttcattgcattatttaataatggtgctgttcataaatgattatatatttagggatttaccccatatattattttttatttgttttttttcaaatttgcggtttggattgctttgttggtgcaatgtgaatttctgtaaaaatacaaaaaaannnnnnnnnnnnnnnnnnnnnttttttaaagttaaaaaaaaaaaaaa

SEQ ID NO: 61834 - DNA, 1706 bp, Cannabis sativa
ataaataaaaaatattaattatggtgtagtttccaagagttaatttaagccatttgattaaatcaataactatgaatcattatacctatcaatatgtaaaatgtacaatacttattgtattatctcccaaatataatatatatttatatatttatacaaatataccctcatccattaacttaaattaattttaaaaaattacttttaatatttttttaaaatttctttttcacattattttcatttcatatcaatagtctattttattttatttcacaatttcttttaatcatgtatgattttttaatttttttcaaataaaatttcatataattttttattttaatttttttgtcttaacacttaaaatatatttatttttattttataggtataatttttaagaatatgacaaggaagaaaaaaaaattagtacaaattaaagatataaattttatataaaataaaaagtattaaaaaagggtatacttataactttatggggtgcaaataaaatttttctatatataaatatagggttaataccattttggatcctatattttatgtaagttatcgatcaaactctctattttattgaatgacaaattggatcctatttttctaaaataatacaaaatagtacactgggctcagttttgacgattttttcttaatataactagcttgaagatcatttctagcatggattagtgtagaaaatataatcagtcttgttgtaacacctctagatcagattattattaagttttattttgacaaaaatttagttcgggctactattgtttactattttgaaaaaggcaagatccaatttatcaagtaacaaaataaagggttctacctgtaacttttacgaaacacaaattctaaaatgatatgtgttgatatttaaaattagttttcattggtaatttagtaaggactcttatataggggtaatgatataataaagcttcttatctgggtataccatgtacttttctcgtggcaattagtatttttgagtcgtgttcatatcatgtcgatgattaagtattacaaataaatttagaacccaaattcaacccctttattaatcacgttgaaaactaaaactcaaaacccaacttatttataagtgggttaatctgactcgaccttttttacatgtttatatggaggattatttttgtttaatttatcaactacccattaacatatttataacaaattgaacatgtttacactgttttataatatatctattagttcagatgtttatgtcttatttaactaatttaatccaatttagatataataaatataaaagtgtacactattagatagattattgtcatgtcatgtgttgattatgtgtatcaactcaaaaattaccagtttaatagatgggttagttgtgtcaacccaaaaataaaaaaaataatttaaggaaagctaaaactcaattcttccgtccaggtttcgactcgtattcctgtctaactcagttttctacctctacttatgtaagacaaaattcaactttctcttcatcaatttaatctggaacaaatggtgtcaagctaaatttgcataaataatttgatttagtttaacaaatttttacattataattccattatatcatttttgaaataaattcaaaaattataatagccgttttgattctattccaatctcaa

SEQ ID NO: 61835 - DNA, 529 bp, Cannabis sativa
tatactaacctattttataatttgaggtgtaatgttacatgcatgatgtaaaaattttatggcacgtttactacacagtattaagaatcgaaataaaataatgaaaaaaatataacagaataaataaaaaataatcgaaaataatatttgtaatatgttatttactaaaacttcttggaaatagagtgatagtgatttatcttgtttactttattaggaaaagtaattagagtgcgcactcaacttatatgatgaacttagacaaatttgaacaactttgtgtggtgattattaactaagtggatcatatatattatgttcttcacaatttactacatatatatgtagttgtagctctatttgtttatgctacggggctgggagtattgcaggtccgggttgaaacctaagaggtctcttgaagttatcttattcacttcagaagaacctacatgctttggaatcagctgcttgggaagattagtattaaacatcatatctttcctttcttgtactaaatagatgtcag

SEQ ID NO: 61836 - DNA, 897 bp, Cannabis sativa
atctacaaaacttaggtaatatttttaaccatccatggaagtgtaaaaatcaaatatctgtatgaactaattcaaaaggagtattgttttatttttagtggatttaaaactgacttaatgcaatttacctaattgactagtaatcaaaaaatgtcacaaatttacatttgaattgaggactaacatgatataaaaatttggctaaaactagccaggaagagtgtctaagcctacaatgctaataaaaaatagttttacatgattactagtagtagtagtacaattaagagcagagggaatacaacttttattttcctagtttgacttgattcttaaaggacatatgactttggaagctgcacttggagtttgtacatgccatcactgagggaacactttagaagaacttacctcgttgtcttgtccttaataaaacaacaaacatcattaaactctagagtaacattattatctctagtaaattaagaaatgctcaaaagaatattggtaatattaggaacatgtaagatatctttgagaataagacaccgattagaaacttttgttaagacaaaattggaaccaatttgaagaatatgtatcgaagaaatattaccaacaactaatttagctttgcctttgtagtctactgtgttatgcaatttctaagagtctgcggtcatgtgatgcatgactgcaatgttaagaaaccatgcaccagaaatgtcatttgttgttgtagtttctacaagatttgcttgaggattttctgtactgacattgtttgagtttcctgaggaataagctccagtgaaagtgatatcaaacctatgataacacttttgagttgtgtggccagttctcccacagtactgacaaataggtatgttgccttgt

SEQ ID NO: 61837 - DNA, 1158 bp, Cannabis sativa
taagataattatattttgtacggttatcattttttatcaatgaacaaatatgtcattagagtttttttgaaacaaggagctttcttcttcctttgctaataatgattttcatgataatattttatgtgtgatctattataacgatgagatgatgcagtgataatagagttgaagtaatggcctacatgtttttcttattgttattttttttttatgtggcaaagtatacatttttataccttagtgtatctttagtaaagttgctctttaagatattttcatagttaatattatttatctcaaattccgaaagttgaggtagaacaatataactatgtgtttttagagatattttaaatttgtgttatatgattattaattattttttaaaataaataaataaataactcttaatcatgaatagtgttcgtggtctaaattgtcaaattttcattgtatggatttatcaaataatttattaaagtaaattataaaattgtcttacacatataattttgctattctttttgtcattttttaacttaattttattaatattttctatcaaattatcactttgaatgtagtgacaactacaagtgagatacgattatgacagcgattttataatcatatgatgatatctctttcaatttcaatttttaatcttttatttactataacatttaaagatagctcttttattaaatgattataaaaaattaaaattaaataagttgattaaaaatatttaaagcatactatttgaatttaaatttgattattatatacaagtttatctattttctcattattaattaattaattttatttggcattttcttttttgttttttttttaaaaaaaaatatattctaaattcactttatatataaaagtgatcagtagtaaatttattgtttgatttgttttaggaattattacataaaaaatataacttgatattttatttacaaaaataccttcataaggtaaagtcaataattataccttttatgtaattttaattaccaaaataccacttacattatcatcatttacacaagcagacgatggttgttgcgtggttgtgcggtggttacatcagacgaaggtttcaatcagacgatggttgcaaggtggttgctaggtggttgg

SEQ ID NO: 61838 - DNA, 1269 bp, Cannabis sativa
aaaaaaagccaaaaacgttaaggtatatattttgattgatattttatgtatgtaaacgaaatttacgattgatttgttaggctatttttagcttaagttctggatcaattttatagttattttctctgtcaatgttatcttttaaaatagttttacacttgatttcctttatttcggatccccgaggcattagagttcaaattctatcaattgttgaaaagacggggcaaactggagaaaaatctactgaagctaacaaaaatgattcagtaatcgcgaccctttttcatggtcgcgactatggtcgcaactgcgaggtgtaggaagaaagcacgatttttggtttttgcctatggtcgcgactaggctttatgtagtcgcgactatgggctaaacatgggaattttggacaattttggactttcgccattcataggtagcaaccctaatttctatttaaggggctcttgttttagaacaaaatagtcaaaaataggactcgaaaagtgaaagaaggaggcagaggaagcaattgtatagcgacccggagcacaattaccaactagttctttctttaactcttgatttttatattaatttctgttttaaatttgattatggatgttatcatggattttatgatctaaactcctatttagggagatgatgaatgttggttgacattattgcctaagttaatgataattgctatttctcctttcttgagtgtgaatttatccatatttgtgtttaattacatgtttaagattaatcacattttgcatgctttaagatctcaattcaaaatctaaaaagtaaaaattgagaatgttaaaaattggataaactaggtttgttgtaaaacgaaagtgtttgcatagccttagtgacattgagattattacgtaatgttgattatatgttaagctaatttagaggtgataagataacatatgatttaagacctaaaagatctgaaaagagttaggttaatctttataatctatcattcacatttagaaagagaatactaattagcattaacaattgggtaattaaatcaataggatttttttccctaatttgtcatctttgattaaatacttttattgctaaatgttattgcatttcttaattttattgctatcaaaattattagtttgccaaatcgaaatataagtctaatttagtagtatttagttcaatttcctgtgggatcgacctcacatatgtgagtactacttgataacatgttcatatttttcgtaa

SEQ ID NO: 61839 - DNA, 952 bp, Cannabis sativa
gtctcggtaggaaatgaatggaatacggagatggttcttcagatctttggtcaagaacttggggagaggatccttcacatcccaagaattccatggccgtttactgatcaagtttattggaagaataaccagaatggtaagttttcagtcaagtctgcctatgtggtggatcagaattggaggtttggttcagtccttagcatctggaagtggatttggaatgggaagatacatcctaggatatcgattttcctttggagaatcttgaatgaagcaatcccaactagggaccgattgccttttgttgccaacaaagattgcagcctttgtggaatggaaggagaaactgctctgcatcttttccgaaattgtggttttgcaaaggctttgtggttgggaagtttgtatcctttgaggatagactgtattccaggggactcaatggtaagctttttggagaacttaatctcaatactccctaatgtcaatagagatgactttgttaaccactttggatgtatctgcactgagatttggaaccagagaaatgctctttgcattcgatcagtttcagcagacccttcaacagctctcctcaatgtaggaaaggccctaagggattttaaggtgttggttgctgggccttttgaggtgactgatgaattactttctattcctgaggcaaatcatcaacagaacctagattacaagttctgcaaagagaaagtccagtttgtattcttcactgatgcttcttgggataagggggaggccggccttgctgccataaggataaatctccttaatggaacctggtctgtcaaagctcgaagatcaaaagctgcctcagttctggaggctgaggttagagcaattgaaacggcgatgcagtgggcagtcgtagatggttgtcaagaagtcctcattctctcagactccaaaacagccgtga

SEQ ID NO: 61840 - DNA, 1357 bp, Cannabis sativa
tgcatacaaaactaagtaagcatcgcatcaacatgccactgccaccgccaccagcatgcaccacaacatgcaccaccatttgaccaccgcttggccaacttgtgggcatcacatagcttgtaacgtgccatcttagcacgcatgttacacctagcaaagaacaacaacattattaatgatttcttcgttgaagctatagaaaatggtgttaagccaagagccataagtaacaacacttaccaaactagtcgttgctgacaccttgttcaggcaagcatgagcgaaagggaaagtgacaagagcatgcataatagtttcaatattgccttggcacacagggtaggtggctgggacatcaacattcttggtacaaagcataaaactagttggaagacatcccgaaacagctctccaaagaagatttttaactttaggagggatttttaattgccaaagtttcacccaaaatcctgaatagttattaccagtttgctcatccttttgatcttgcagtaggcgataagcactcttaactgagaactgaccagacctttcgccactccaagcccaaaaattggttgtggctaaaaagctaagagggatactcataatagcatcggcatcaacttgattgaacgaattgcgaacaatgccaacatcccactgtctagagtcaatttggaggaaagagctaacttgttgattcataagagcaggatgcaaagaggacacgtacggattattaggcaaaggaagccaagggtggcgtaagatactagtttgttctctagtcccgattgttcttcgaacacccaatttaagaagatcttgggcgctccagatgcttcgtcaaataaaattgggattatttcctaactcaacagtcagataatctcctcttggaaaataacgagctttgaaaaatctgctagccaaagaattaggattgagcaaaaaccgtcaaccttgcttagctaacatagcaaggttgaagtcaagaagtcgccgaaagctaaaccgccttgagttttatgagaggccatatgatcccagttcatccagacaataccgcgtcctttactagaagtagtcttccaccaaaattgagccataagacgttcaatttcagtacatgttttgacagggagcaagaagacactcatagcatatgatggcagggactggacaacaaatttgagaagaatttcttttgcggctcgagatagaagcttaccgtcccaactgttgattctagactttattttattctttaagaaaccaaggatggatgatttaattctgcttattatgctgggaagaccgagatacatgctgttatcagtggctgcactcatat

SEQ ID NO: 61841 - DNA, 924 bp, Cannabis sativa
atagtatttaccctaaaaataatacataaataactaaaaatcaacaataaaataataaaaatacaacataaaatgtactagaaaatcgtattttatgtaaatgaaatctaaaaaaccgtaaaaatattgaaaattccatacatattgtatttttataatttatttttattgttttagtgtatttttttttttttgaaattatcccataaataaatgttgtagttatttatgctagacatcatgggtgctttcagcatttctctttgaagaaaggttcattaatgcattcagcatatgggagaattttagtccaatttttttttctgatcgtctacgttgtagttatttaagacaacttataaaattttgagagattcagaaaaatttaacacgttgaaaataggattcaaatagtttcttgcacttgagagtactcttttattttatgtgtgtgaaataaactgtataaatcctattttagacatattaaatttttcaaaattttcaaagaatgtcctaaataattataacattgattttaaatgtcaaaagagatataaatgaattaataatgcttttagagttgcattgtaaaaaatttcataaatatttatatatatgtgtgaatatatataataatgaggattattgttgtatatattttagtgaagaaaaactatttatttctagcttgtgttgtgtctagatgaccaagtaatatttatatatattataaaaaggaaaaaagatgagcaaaaaatattaaaacctaaccctaaaaccaacctaacctttcttctctatccctacctagctaggtctataaactacaactacaactacgaaagcagcacctaaagtcaataaataattacaaaaatgtcaattaagaaagagtatttgtcattggacatcattcatggc

SEQ ID NO: 61842 - DNA, 684 bp, Cannabis sativa
tctcgtgatgggctaccgaaaaacaagatgcacattgttgatataggtagtaccaatcaatccttttaagcccttttcaactgtgtattccaatacttacaaagtctcagaatcatcacacatgaccttccctaggcgatgtgggattcaacagcttacttggtttttccctttacgtatcacgagactactgactgtcacaaaccttttgcgatctttcaatccccttttgttattattttggtcatcaaaacctgtaccaggagtgaaaagaaagaaaaatactttagcgattgtgaagggaatcattccctttcatgaggagattgagaagaatgctcctactaaagaaatacatgcatacaacgacttgtattttgagggttataaacctaaaactaagtagtattttctttcttcttttatttgttttttttttaaaaaaaatttcactacataattttatgaattattcacatttctataataaatgcatttttgtttttcgattatagaaataagttcatggctgacgctaatgacgttgattttcatttcgggatcatgcatataaaaaagaaatattggttttaccaacttcagacttgtggtcaatttttgtctgattctgtaagtatattattttatttgttcaagaccatgttacattattatttattttat

SEQ ID NO: 61843 - DNA, 1473 bp, Cannabis sativa
gagttatagatatgctctactaactctgcatttaatgagttattccatttaatatcctttaatataattgccattatatttgttgattcgtgttctccaaagttaacacgtgtcatcttctaaagtgctagccaaatttcgggtataacaattaccccttaaaaagttcttttcaatgaaaagtgcttttaaatgattacagagggtatttttgtcataatctattttgaaaaacgcatgtcctctgattttggcagttttgtggtttcgaggcacatcatcatttaataccatcttttcctcttcattattttgaaattttacccgttggatcaattgcctccttaatctgacggagatcaacccaagagtataaaacgaaaaaaaaagaactagcttttcattacctttgccatttcaaaaactctgaaaaattttcgagcttctctgcaaaaaaccatacctagattgtttcgaaaatttgcatgccatctttgtctttgacattctctttgtgagtttcattcgattttctttttgacctcaagcattcaaagggatcatcacgtcgttcgttgtttcgtcgattgcaggaccattcatcgctccaaaaacaacttcaaacagtaagtgatttctctttctttattttcttatacgcttttaatttcacatttttgggtttgatcactagtttcttaattagcacctttatctccttatctggttttagcgattttagggttgaattatatctgggttaattttaagatttaggcagaacgaaggttttagggtttctcaaatttaccaacttctggtttaataaatttcttctagacattgggattgctttctctttgcagcaatgtcccaatctggttcagaagtttatcgcccagaatatttagaaccagagtgtcccagtgaactttccatcccatataaaccctaaatttcacaacccaaatccaaattagagataaatgatgcaaaaattagggaacacttagtaaaaacttaccaagatgacattgtcagtcgccatagacgcttcttgcaagaaattacagaaggatatgtcatttcttgcgagatgctgcttggcctgaaccctccaatttatcgtcaattcctcttgctaggcctttatttttaccaagagtcacaattgcttttgaaccaggtgacctagactttgaaatcatgacctccaggcctcgaaaatcaaagactcctcaggatcctaacgtcacctttgaggctgaactagtagactcgaaggtgtgagccatcggagattacgtaggtaatatcctaaggacttgtggtattaaatataagtaagaatgctgggttagataggtggttgttggcgagttcagttgttacccaccagaacgacttactcgcgaagcatctgaggggaccggtggcgaggctagtacaagtggctcgacagggataggcgct

SEQ ID NO: 61844 - DNA, 1065 bp, Cannabis sativa
ttcttttcaatgtttttaatctaatgttttttattattattattattgatgtccaaatttttgaattttttttttaaaaaaattgattatttggaagtgatagagagttcaatataccagatcgaaacttgttattctgtttgcatttctgacttacggtatagtctaaatttatgtgaattggttatttgagaaagaagcaatgagtttgaaaattgaaatgcagggctaaatgtgtgttaaaaatttgacatgaattgaattgtgcttttggatgttaaacgaattcaactaaagactttggcattatatttactatgaatatcttttttttttccctgaaaagggtaccatgaatatcttttattcgatgtttatctacatattgtactttagaaattctgttactttgaagagtattgctcaaatcaatactcctgatgcaagttccctcatgatccaggtattacatatatcattgggttctaaaagagtttagaattttatattataccaacataatattataaatcggtttttgacaataagatatattcatgcttgtcatagagaaaggcctggatatttttgtgatcgtttctcattatcacttcaaaaatagaatatcattcatatgggaattgcatcatgtaattctctgtattaaggatctgttattctgttatatccttacatttcttgtaattaagggtatcgagaaagcaatagtcatttgtgatattatcatggtatgacaccaaacaacgatggtgatgttataagattgaccctctcacaattaattgacatcatatagaaggaagggatttcctttttgtttaaagatcgcttaaattttcttgataatgaataaagcactcaaaaaagatgctgctaaacaaactcattctacttttctgtttttgccttttatttattatttgtctatcaaaaaagaaaaaaaaccatatattatttgtaaatcatactatattttcaggaaagtgggaatgaggccttggcttcccccactaaactaactgtgttctcttttgcaggaaagtt

SEQ ID NO: 61845 - DNA, 656 bp, Cannabis sativa
catacttgttagtaaatctagctcgtggtaaaatattcccaacaactggcctcaaaggcatggttatgatttactttcatgaaatagggatttaaaattgattaatattatttgtgtgttgatttggatgtgttcatgttggtttatgtgttaattgattaatgtatgtgaagtacgaaatttttccatgaaaataattttattttcgtactgaaaatattttatttggattctgttgcccctattttcgcccaaaatacgtgggctagtatgacaacgacacgtggatctaagaggcgcaacccttagatcaattgactaagtctcttagcttcaggagtgtcaccaagaatataccctcccggaggaaagtaaaagctccacatactcctggagaccagaggaacgccaagggacctccgggggaaaaggacattatttgaacagtcacctcacatttaatgccgcatcggagaaaacgtattggaaatgccataagcaataagtttgacagcgtaacccctcttatacagctattatgctatgattaaaaaggttagtgacaactactttatgagggatcacatcaatcaagaagggataaaagactttatccacctaacccctaagacacctaaggtataggtcatgtattt

SEQ ID NO: 61846 - DNA, 1556 bp, Cannabis sativa
ataatttggtgaccccttataaggaaagttattagtattaacccttaagcttcatttactaagatcttcaattgaggtgtcttacaggagattttttttttttttaaagaaagatttctataatatttttcttttgatcaatgtgatatgtatgtatgccactttttctcttttatatgtagatgataaaaatgatgcatgagtgataaattattaggatttcttgattgcatttttattagtgaacaaatcatatgcatgccgatacaatataagtaacattcaagtgaataatatttatcgaaagccatactaatagaatcatatgaactctggtaaaaaaaattggtgttatttgaataattaattgtacagtcaaatatatttaaaactttagttttatatgtccaacgtgttcataatgttcgtcaatctttaagtttcactatatatcaaacaaaaatattgcagaagtattttttttaaaaaaaaaaaaaatctcatgtaaaacacctcatttgaagatcttttagtaataataagacttaagagtgcacaatattgaatattaataattttctttattaggggtcaccaaattatttaaaaaaataaataaaaataatataaaacgaattaattaattatttgtataaaatactagagtgacacataatgaagaaaaaaatgcatgtatgtacagacgtttttcgtgactttacctaagcattttccaaaattataatatatctttaataaactcgaccccaacatcgactacgggtagggtcccaagtcccatattcgggtcttgggaccgagtttgggtctggatcctagttcggattcgagtgatggtcctagacctggttctggtcacgggtccgggtttggatttgtgtctgtgtccgagtttgggtctagttcctgggtcccgagtcacagatcatgggtctgaatccttggatttgggtcgaatattagaatttaccttgaatcttttgtaaatattataatacaagctaatacaaaatatttgttatgtattaaataatacaacttacattatattaaaattttttattgtaataatgaatacaatacattattttatccaaacatagtgttatttgttatttaatacaatacaatcaaacgagccctatatgtagagaatattttctcaaagtttgagaaggtgtatagtctttaaagcatttgatggagcacaattttaaactcttaggtggcatttagttggaaggaatgaaaatataagaatgagaatgaaaatgaaaataggaatagaaataggaatgaaatggaatgaaatttaaaatgcataaaaaaaattgataaaaaaattattaaattgtttctcatcatacattggaatgacctttccttccatttcaaaatggaatagtcattccaccaaatggtggaaagactatttaattggaatgacatttccaacattttaatattgtaacgccccgatattttgccttattttacaaaaatactattttcatgcataatttgaaaagataaaa

SEQ ID NO: 61847 - DNA, 586 bp, Cannabis sativa
tgtccaactccggttgatactaaaccaaaacttagtgctaaaaccagtattccatatgaggatccctctcaatatcgcagcctagccggagatctccaatatctcacgttcacaagacttgacatatcttatgccgtacaacaaatttgtttatttatccataatctaatggatgatcatatgcatactctcatgcgcatcctgcgctatgttcaggggactcttcactttggattgcatctttatccctcatcaaccttgatttcgtatacagatgcagattggggtggttgccccgataccagattatctacttcaggttattgtgtgtttcttaggacaacctcctctcttggtcttctaaacgacaacccacactctctcgctccagtgctgaggccgaataccgaggcgttgccaatgtggtttctgagtcatgctagttacgcagtcttcttttggagttacattgtcctatccatcaagctacattggtctactgtgataatgttagcgtaatatatcttgctggaaatccagttcaacatcaacgtactaaacacatcgagatgtatattcactttgt

SEQ ID NO: 61848 - DNA, 2421 bp, Cannabis sativa
atttccattttttgccattggagcttgatggagttgcaataccaggttgataagaaagattcatagcttccaaccgtttgctagtgtcaagaagaggaatgttgataggcaaaggaacattgcagtatttggaactagtagatttagagctactagagttttgtgaggtacttgaaaaactaggtggtgaggcttgtggagctttttggacactagagttgctcattgtggcattgaggagtgttgtgaaggtgtgtgggttagtttcggcttggggtaggttggtgatattgggttgggcttctccatgggtccaggtgacagtgtcttgtgtatttgatgaaggacccgatttgtataaacccacaagttgggtttggccgtgggttgggggtgggtcttgagggcaatatgtggggaatgggggcattaggtccggggggagacacacacagcgctagcagcattggaggtcatgaaagtggccactggagggttggtgaagctaagctgttcagagcacaacaaagagttagtagaaaccttaacttttccagaaatggatttgatatcatacctgagctccggtggaaggggagcttcatcaaaagctttcatatagtccacacatcccttattatagctgtgtgccatgcgcccacagaaagagtagatatcagggagattttcgtattttaactcaagcaaacaaccttgtttatgcccgagaagtggatgggaattccccgggggagggggtgggccacatcaaacatgattcttatgcgaaaatatgggccccaagtttcgcggaatgatgggttatacacttctaataggtggctgagggaagccgaaactaactgcgcaagttgttcggttcgcttaagaaatggtgtgttgaaaacttgcacccagagagggattttcaagaggctatcaccattaaggacatccaaggaattaggaatatccatgaggaggggctggttgaggtaggtccaaggttgctgcaaaagcactcgacgcctatccccttcacatccaaactcaaccaagaagaggccttgggaatgatcagttatggtaaccgggaatctagagatatggttccaattgctgttcattttttggataaaaacgttatggttaaatgacttaaccgtgtgtagttttgcaaccaagaagaactgggttggggcattttcagtctcggctgggctagcaggaatgggttcaagcaaggtctggattgtgctttcggtatctgtgaggtttaaagcaacagtaagcgaatttgttaagtcagccatagtggtgaccttgttagagcagacaaacagacagcaagagtagcaacaaagaaagcaagaacagaaatggcaaagggtcagtgatctgggagatgaaaatagcgatccatttataggaaaatttccaaaaagggtaataaatatgatactcggtggttgagtatcacattgcaggtttggattttccccaaagtggaaatagaaacttgtagtacaatcattaaatggaatgcagagcaattgtacagaggatttcatgaaggtagagggcaaaacacattcagtacccaaagcattaactagattaatacattctttttgataaacattgaaaaagccagaataataaatggatgagatggtgttcatactatccatacagaggggaagtaggattcggtcaggcagaagattaaatttccttttgagtttatacctagaaatcataattaatcccctcctttgtagatacgatttgacagaaaccagaaaatagcaagagggagaaagtatacctgaagaaatctcataaatgcagtgacgaaaggggaggttggggatctggccggagttattgttgatgcgattggtacggtctgggcatcgcagcatgatgcaacggggacggctagaaccagctgagctggcttggtcgccgttggatgagtcgtcagagccaccaagatctcgagatctggagcttgagcaaggtttcgcagtgtggaaacgtttagattgcaggtgtgaacaatacgacttggagggaaccacatgcaattgcattctcaaagaggagagagagtttaaagagtttgaagcgtctagagaaggcccttcacggttgttagttagttaaatataatgttattttgtaaaagtattggattataaagtatgaagagaaaacaatacaaaaaatttaaaggaaaattaaatgttataagctattggtaactaaacttggtagtgcttattcatggtaaattttggtgattggtgtgaaattcttttcttttctgccccttgaaatcttgtgagcagtttccacttcaccttaaaatctcttcaaacaacttataaattatgccatcaaataaacatggcatat

SEQ ID NO: 61849 - DNA, 641 bp, Cannabis sativa
aaattcggaaccccaatctcggcgggctcgtgtgtgtccgtcgagattgactgtaaaattaaaaagaataagttctaacggacagcattctcggcgggccttgtgtgtaccgtcaaaattgaaaaaaaattcactgaacaatggaccaatctcggcgggctataaaaaggctgccgagatcggtccccttaaaatttgaagctgacggttatgggcatcaagactacccaatctcgacagaaacgttatggcccgccgagatcggtccttgaaaaaaccctaatcagctgcccaacccgtcacaatgtttgcctctcttttcttccctaattttttccctctctttctccctccaaaatttcaatcgcatattttatccgcctctctaattcttcattcttctctcgttctctctccctcctcttgtcgattctctctcttgctcacatttgacatttgacatcttgcatcaccatcttcctttcgtttttcaggtgtggcaagtgttggagaagacattggggatgggacaacgccagagctagggacgatgaaacatggtcactggatacgaacactagtctgtgcttcctcttctctttattatcaaatctatatttttttcttccatttatatatat

SEQ ID NO: 61850 - DNA, 1619 bp, Cannabis sativa
ctatgctgcaggtttggattcaacaaatttcatagcctcccacgggactatttttcagtcgacaatggctctattttgggaggaaaagctggtaaggttatctctgtggatttggaggaagggcaaccggccctgtggaagaagtttttgagagttcttgttgagttggacgtcaacttgcctctgttctcgggttgctattttgaggttgaatcgggcggtaatcgttggattcaagtcaagtatgagaagataggcattttttgctataactgtggaaagctgggacaccaacggaggggctgctccctttcttcaccggtcacggttgtcaatagcaccggagttccttatccgatgtttgggccgtggatttcaactgagtcgacttacctggacgttttttctggggctttctctttctctcttgcaatgggagcatcgaaccggactggtagacatgctcagaggttgaagacgatggcgtcgttggccgtgggtggcagagatggaagcgttgattgcaaagggaagggggtgcgggtctcgatgaagcctgtgaaagagaccgttcggaggtctgagctggtttctcggaccaagcagacgacgtggatccctaaacggtcgactgtcattggcgtgcctggcatttctagttcgggtaatttggccgaacttggggaagatgaagtgggaaaagtgtcccaggcttttactcgaaataaattgaaaagagttgaccctaatttgaatgtggcttttaatttatgtgataaagatgggtcaaagaagcttgccattgggccggccatttcatccactgggtcgagtccaagttttaagagaaaagagaaggctcttgctaattgtagtgggccgtgcaagtcatttgggcctaacctggtttttaattcctcctcagctggtgggaccggcccctttttaatgaataacttaagtgaacaaggaaatgggcaggatgtgaggcctattatttctcttgggccgatggtcaaggaaaatgggctacctccttgtgacaattctaaagggcctttgggtaatggtccaaccaagaccctttctaatgagagctctatttgtggacaagaggttaattttcaccatgatgaagaattagctttgtctaatttctttcaagctcaggatactctcttgcaagagcttaagaattttggaaacttggatctttttgagattaaatctattggtggagacattggagttcctaccacttctgaggttaatccaagaactactccattcaaaaagaggaagtttgatggggcttcctcctcgctttgcccacgaccatggaagcttcttcgggcccatccttgggctattcgggattttccttgggacacgaaaaaaagtgatgatgctaccaatgtcatcgaggatgagccctcagaggatatctctttatctaatagcgaatcaatcggcctggacaattggcgtactcaaggaaagaatgtgatctcatttagaccaatggagggcactttcgtggtggaggactctggttcttttgggtcggcccagtctcattcccctgtggaggaggtttctactcctccacaggagccatg

SEQ ID NO: 61851 - DNA, 821 bp, Cannabis sativa
acaagagaatctagaaaaaaaaaaacacatttctctctctctgcaactctttctttctctctcgatttttttgggcaacagctagggttggagtagctcggtctgagtcaaggatttttagttgtaattgagtgcttcggctaaatgtaattttccctagtctccccctctttgtgtttcttgcatgaaagttaggttttggtgttgaattatgattctaagttgttgtatgtattgcgatggtttgagattgaattccgaggttaggttgagattatttaggttggtatagctgatttggttcgtagttgtgaggtttgggtgaggttggagtttgagagctcaagctttgagctataatggtatttttattttctgggttgtttactgtgttttaatgcttgaatctggttcactacagtgtatacatgtcttctggagattattggagagtttgagtttgattttttattaggggatcgatttttgggtttccctgcactaaaccggttaaccagttttagtggaacctgaaaaactggtaaaccagtttctccctcaagaaacctcagtgaaccggttaaccggttgggcaaccagtaattcagttggggtttttccaggaaccctagttttacccaaattgttgatatttagggtatggtcatgtctttcattgatatggttattcctagtttgtttttaaagtccacgaaaagtgttttagcgtgtctctcaccaaaattacaaatgatgtgatttagggtcctgtgaaacgtcgagttgcaattccactcgagaaatttgaatttccatgctta

SEQ ID NO: 61852 - DNA, 1663 bp, Cannabis sativa
agggtgtagttacctttgctgttttgacaaaattgataaaagtatctgggccgttgggctgtggcttgtttggcaactagaaggaatatattacacacaagaacaaagatgagtaaagaaactttcgccatgcgtagcgttaatattggtatggtcgatatgtcttgtgaacacaattataaagacttctgctacatggatcaatcttaatctgtggattattagtggtttgttatttgataaatgaagcctgtaccaaaagtagtccaacttgagattcatatatatgatttaagcttaattaaataaagagttttctgttaattagacgactctcttttcctggtacttgcatctctcattattttgcgatctattttcaattgatgaaagtaaagttatatcaaaatatatattcatgatgtaaaacgttaaagttgataaaattagtagaataatatattgctcttagtatatatttgaccacggtgctgggttgacatagtttgagtaataaatagcagctagcgaagtcttaattaaatggatcaattaacaataataaagatatttttactgattggaacgggactattagttttaaatttgactaatatgtaactttattttatacaatttattattaaagagatattatgatagtataagagattgtgacggaagtattcttattaaataaatactaattctaattttattttcttattagtgtggcatgcccagtgcgctcatcaccaccacgttaaatttcgtcaatgtatgagaaacttttattaagtcaaccaaccaaaaacacgtaaactagaccatctttctaatcttttggccccaaaagacacgttgaaaagtcataatgtttcaaccaaaattattttttgatctgaagtttcaaccaaaaattattatagctataattattatttttttattaaaaaataaaatttaatctcctactcaatacatatatataaaaaaatatataattctcaatccaattcatcattcatgtaccttaagttcatgcacaacaaatttataaacagctttattaactgtacagcaaacatgaacatgcctcaagaaaaataaaaaacaaactattaatatcatctaaaaaagattcaagctcattataaatggaagagtgcttgaaaaaacaaaaattaaaactaaacaatcagactccacgtaacaaataggaagaccaagcatgtgagatcaatcaaatgctctaatcggccttctgcttgaataactaaaaagttatcattaagtttacaacttctgctggaataggcaaacttttctacttagaaaaataaataaacaacctcctatacacataccaaaataaaataaataaacaaatgaggtaaaatttaacttatagaaaataaaataaattagaaaataaattatggtttctttatttactagtgcaaacaattttcttaaaaaaaaattctacttaagaaatacatttttgtttatacgttaggtacagccattcccattttgaaagtaaaagattatcataaatattatcgaggaaagggttcagtaatagaagcctcattaatagattcactttttgaatgatttgatgatttagtagtctctcttgaattgaaatcggatccaa

SEQ ID NO: 61853 - DNA, 938 bp, Cannabis sativa
gtttcaattaaatataaattagaaataaatttgattaattgataaataaaagatatattttttaatttatcccaaaattttacaaaagtcaatatttttatagattaaactttttttttaacaaaatactgacatagttgttttacattatttttacaacaacattatactatattactttcgtcttgttgcttttacatgttgctttaagagtttcgtaaaattgtaatttttaaaaattgtaaaaaagtaaaaaaaagttagtaagaaaagtacgactttaggtattttgtataaaattacttgttttcaaactttaaaataattgggagcaaaagaatttagtatcaatcaatactttggtaaattccaattgttattattcttttttgttactgtattagaaatttcattgacaatttaaattgaattgaataatttttttagtatcatatattaaagtagatattacactatatataaaaaaattataagagtttacttttttatggcataaataaataatgctaaggggttatgaatttttttatttttttaaatttatatgggctttttttatgccatatttctgtaaaaaaaaagatagaaatctcatatttgtaaataataataagtttagccggaaaaatcgccgataccgaaaagtcgccgaaaagtcactggtgccggagaagtcatcgaaaaagtcacgggtactgaaaaagtcaccgaaatagttagtgccaccgaaaaagtcaccaaaaaagttactgttactggaaaagtcactgaaaaagtcatcgtcaccgaaaaaagtcactgaaaaagtcacaataagtaggtgtctcaaatataaataaaaatagaaccggttctataatataatgaatgaaaataaataacacaaaataagtcaaaccgattgtaattgaaatata

SEQ ID NO: 61854 - DNA, 847 bp, Cannabis sativa
atgaaatgaaatggacgaaatggtgaaaggatcgattcttacagagaaaagatgaaaagaaaaaaactgaaatggataaaattatgaaggtgattgggctttaaaattcattatgccccaacatcaataatgacatagtcctcattgatggtctgttcaatgacgacatggcaatccatcaatgacgacttatccgtcaatgatttttttagggaaaattctcgcccactcttacagttgtttttcaagaaaaaaaaattactgatgagattgttgttattgaaagtggtatttgccgttgatatttaattttaccaaaaaaataatttttttagcaacgatccttaaatgtcagtcattgatactttagtgaggactttggaccgtcaaataatgtcgtcattaaagctattattcttgtagtgtgacactagtcaagtgatggtttcactcgaggtaacatcagaatattgtcttgctaaattctggtgttaacataatgcactggattgggatgatggcactttagtatgtacttattctaatgatcagaagggtaaaaagaagtactacaagaagtaagcttaaaagagaagtgtatatatatagctctattggaagctatttgttatcatcacatatggaaagtaaggaattcagctctttagaattgacaggttccaaatcacattgtggaaaagattaaatttgaagtatatatatactacaagaaatgcacttttgccagcacatttttgtgctggcaaaagttagtattgcactggtaaaatagaatttacttgtgatgtgttggcaaaaggaggtttgcaaatcaacgttggtatta

SEQ ID NO: 61855 - DNA, 1312 bp, Cannabis sativa
  modified_base (1256)..(1256): a, c, t, g, unknown or other
aaatttttgtgactaaggaatctaaatgacacaaaaatatccatcctaatttaacaagcatagcaagattgaaatcatgaaggagatgaaagcctagaccaccttcatgcttcagacgggagggatgatccctattgatccaaatattcccattacctttacgagatgtggttttccaccaaaaatgagccatcaacttttcaattttattgcaagtacaagttgagagaagaaaaatactcatagcataggtgggaagtgattgaacaacaatctgcaaaagtatttctttaccaacaccagacaatagcttcccactccaactgctgattctattgatcatttgttcttcaaaaagcctaaaataccttatttattcctccctatgatgtttggaagtcctaagtaaaggtttctttcagaggcctcattcataccaggaataaggaatagaggttagttggtcatggaaattttgctgaatattcagactaaagaaaatggatgacttggttataatgatttgttgaccagaagcattgtcagcgcatcgaagaagagacataacacttccagcagcaccagtggttacttggcaaatagagaaatgtcatcaaaaaagagcatatgatagagatagtggaagcaccatgtgcaacacgacatccttgtaataatctctccctttcaaacatagagataagtacagagaacccttcagcacagataatgaacaaataaaaggagagggaatcaccttatataataccacgggaaggaataataggccccatgacatggtcgccatgggattaccgaataatgaacattagttacacaagccataatcaagttcacccaatgctggtcaaaacccatcaataacattaccactcttaaataatctcactcagcgcggtcgtaagctttactcatatcaagtttgagagccatataacctttcttgtaatgaactattcggttaaggtagtgaataactcaaaagcaattataacattatctgaaattaagcaccctaggatgaaagagctttgagtaacaaaaataacttgatcaataattggtttcattctactggcaagcacattggcatcaactttataagaaaaattacacaaggcaataggtttgaggtcacccatagtaattgggatcttctttttaggaatgagaaccaaatttgtatggtttatgttaaccttgcttttagccaacgacaatgagtcaattattangccattaagaatataattaaaatagagcaaaaccgaataagtaataaagagcatca

SEQ ID NO: 61856 - DNA, 3053 bp, Cannabis sativa
aaaacatcacttatttggtgttaaaaactccaagtgtcctatataggaatgttttatttggtgttgtttacggtgcttatttttggtctgatcgtctttttactgagagcaatgtttcacatgatcttcagtctattgtgttagcggatattgttgtttaatgaattattttgttcaaaaaaaaaataatatggacaattgtttgattgatttcaaacgtttaatatagatatatatgatcgaacattgacagtaataatatttacagtgatgtcttgtgaataattaataattttttataataattagtaaattaaaatatataatttttttcttttttttgatgaataaatatataaaacttgacacaataacaatagataaaacttcatgatattattatagcaccattactgccgtttaagagaagtgatattttttttctcatgttaattaattaattaattgctacaactaactacagaacagtccctacaatacttcccatcaatcattccagtctttttctttcttttctctttcgaagttgggttgggctgggcccatcaatggcatgtgcggggccctggaagcgtgcatgactagtttgtctacatatatatatagatacaactttatcaataattattagttcgtctacatttatatacaactttatcaataattattgatttgttggactattataccctataatttcctcaatccttggtgacaggttatttgaagtcacaaaagttttatattcaaaatgctctttcatttatgtccacctcacgtaagtgtccagaattttatgatccatgttcatcttcgagagatcaacagataataacgtgtcagccattatcactttaaatactgtgtatatacagagaaatggtatgtataattgtaaatacatatatatataaatatatatttttggtgtttctcggaatataatatataaattatcagaaaacgacatcattaattttcatttctatgatatatattccttggctgttttgtttttctcctttcatttattaaaattaatgacatatttatgtgatttgagtgcataatttaaatgcctcaatcatttctctaaaactaacacaataatgatcaaaataatctaaaattcgttatatatgaaaacatttttaattttttaacacactcacccaaaaaaaaaagtgtattcctgtaatgattatcagtccatatgtatacaaatatatgtacgtttgtatatatacacacacatacgtgaactatacacctaatgattctctgtttgtttcgtgagaaactgggtggactttgttattattattattattattagtattagtattattattattattattactacgtggtatatccacacgaaccgagcctgcaatattattgttgttattattattattggtggtaacaacgacgccagggcacttagccttactggttttgccctcgtcggattgttgaactaccaaaagagagaccccacaattattactcgatgatgccaaaacatctccaatgaaacccagctcaggatactcactccactccgtaagcccagcaaacagaggtgactcgctcgaatggcgtctccccactaaaatcaactcgtataacttctccatcgaccgaaccacattgatcatttccacgctgttcttaacacctttgtctctgaagtgatgccttttcttcccaacaaccccggctcccttagccaccgccatgaacttttccaacatcttagaatcaagctctatgtttctaacgtcctctgcatcaacccctgttgctgctttgttcaaatctctgagtctaacaaccgtgacgccaaccgaaggatgctctgccattcgagttgcgtatgccaatgcttctcggtcgtcaggtccttcaaggaagaccattccgattgagtgagttgtttttgtggaggaaacaggtggattcatgatgccacttaaggagccacggtcgacaaggatcccaaccgagcagggtgcatttctgaggatgttaaggttcactgttcttaaagggttgttcatcaatgtctcgtctgagccgtgtcgtgtccacaacttgtgaaaagggatgatcaccatggcaacccttttctcaagagcaagagtgcacacgtcgttatgcatgctggcagagggcgccatggccgtgactgcggttattgtgagtttgccatgattttcctcctcgaaatgttggaaagcgttgattatgcggctggattgaatggagtgggaagactttcttttgcctggacggtgagttatgagaagggctgaggatcggccaacaagtcggattaggtggacaacatagaagcagatgggtttcttgattgtggggttggagagttgaaggagatggatgatggaaggagtgttgtcttggcggtggatgcaggctagcagccggagctcggagtcgttttctgaggcgtgctcaatggtcctcagtttggttgatgcgtatctcttcgatgggttatagagtagtttaattagtggggttatggttcctgttataaagatggttgataaaatcatgcaagtgtatgatttttggtcgaccaactgaaaaatcaaagatatgcacacaaaacacacaagctaattagctagaaacaaagtatattcagattaatccaaagaacagtaaaaactagatatgatgttattatgtacgtgtacgagtgcaagtgcaactgtccaagtgcgagtatcttggctcctggctaatcatacaagttttttggttaatggtctagttgtatgtacagggcagggccggtcctaagctcaaaataaaattttgctgcctatacaaataccttttagtaaatgaatattaaatctggtgtttcagtgtagcaatgaaataatttttgaaactcttagcatcaattttattattggaaaatatagtaaaatatcaccaagttaaagtatagatgtaggttgtcaccacagagtcattttgatactttaatatag

SEQ ID NO: 61857 - DNA, 999 bp, Cannabis sativa
  modified_base (452)..(454): a, c, t, g, unknown or other
taatagaaattaggaatgactgttaagggtggagaataacatttaactagtttctcatatcgtagtctcactttaaatttgttctttttatttttatttttattttgctatttttattctaataatcaaaatcctccattttctaattcttgttactaaattgtgaataattaaataaacatagtcctcgtgggatcgacccttacttacgattatactaaaataattggaattaaaaaaatagtaaatttattgtggcttatgacacgcatcatcaggatggcccaactgagccaaggaaaagaatggaagaaacatttgacatctccatgcatgctccacttggctcggggggacatagctcagttgatatagctccgctcttgcaattgggtcgttgcaattacgggttaggtgtctaatagttcaggcagtaatgatagtatcttgtnnntgaaccggtggctcactttttctaagtaataggctgcttacactagaaaattgttgataaaactccaaaatgacattttcttttgacttaaatttttttctccttatcattcaggaaagacaagaaaatttctaggtaacaaacattctctagaatttctcttagatttgagcccatagccgatgatagaactagaatagatattttttttttcctattcacacgagcccatatcctttcttttctatcaatctctaattctaaccttcctccccaatatgatattatggtgtcagtatagatcgaaatttgctaattatgagttgggtgctttaaccattcagccatggatgcttagcggggatcctcgcacatggtgaataaccaaatttcaattgaagtaaaatctttagggtaaatcaatgcaatttaggaggacttaatcttaatgaaaggacatcaattcaaatcctggattttcgaattgagagagatattgagagagatcaagaattctcactatttcttagattcatggacccaat

SEQ ID NO: 61858 - DNA, 1466 bp, Cannabis sativa
aactttaatttatactaaaatattatataaatattatatatttagatgcccataaaaaataataccacatataacttataaaaaaatattacataaaatataattcaatattatattatataatacaatacggtgcaatacggcgtatcaaacgagcctttaattttcacatgcaatatttaattttcacatgcacatatatttttaattactaaataattagacataaatgtaatttttttttgaaaccaagccataaagtaatttagtgatgatactatagaacaaatctacaaaatatataaaattataaatatgtgagtgtaactatgaaaaatatgtgtgcctcttgtaaattttatacaaaaaattgatccgaccattaaatgatagacttacttggtaatattcttgaccaagagatagagaatctgaaggaatccaagccaactttcttcatcaatttgatgtcttcctgttggattacaaataaattttgagtttcactgtttttgagcaagaaaaaaccactataaaaaattagctaaagtaataaatttaccttattacgatgataaaaatctagagctacatctccattgctacgatccaaaaatttttctgtcaattcaaaaatttggtcattgtttttccttagttcgagttaatttacgccaattcgttttgttgttttttcttttaaaaaaaataatgcatcatctgtgtttttttttaatgttgcttcatttggaattatttttcttttttaaacaatgctttctttttttttttttttggaaatcttttaaatgatgcttcaatatttgggattagcctttctttttttttttttttcaaaaaaaaaaatggtatatgcttcatttgagatcggatcaatgaaatgaacatattttattattattaattaaaataaaaaaataatcattgactagatatatcatataccaacatgataaactgagagtgatatttatatatgaatttaatatatagctaatacttttagttgcacgactttttgatgcatggtaaagacaatattttgagaaattttttttggatttagtatgaattttgcattattttttgttttctttctaaaattgtgttttaagaattgagaacataaaatcaatgttttaaaaacagtgtttttatatttttttactaaaacaaaagaacattaatattgtacaccaaccatgagaatagaaaacaagttgtgcagctttcaaaatattaaacgtgtttggttaataatttttttatttttttttcactaaaaagtcttagcacgaacccaatcccaccccgatctcggtacatacgctggacagccaactcggactctaactctagacgtagacctagacccagacctcgacccccagctcgtccctgcccctagcagcagacccaaaccccccacccccgccctctaactt

SEQ ID NO: 61859 - DNA, 2830 bp, Cannabis sativa
aagcaatctaacttaattctctaactacctgagctctttttcccaataaagttgcgcaagtgatgaagaaaatgatctacaattttggggtactcttcgataacagtatcaccaatgcagtaggataaaattctattctttgtttatctttttttcatgatgacatgaaagtagcttgtattctcatccccaaattgaaaccaagaaaatttcgaattttgatgaagataactagcatattgtttttgggcagtaaggagctcacggtttaaccttttctcagcttgcataagcacatgacaagtagggttgttagcaagaatttcttgggctctaataaaagaatctttagcctcgttacaatggctcttgatatcctcttttttagagacaaaatatttcttcaaaacatgcttgactctaaaaagaagcttggaaaaactattcaaatctaagatattggtacccttccacatattaagaacaacctctttatacccatctatgaacatctaatggttacaaaatctgaagggtctaatacaatttttaacaaccttaacatgttttataaggcaatagcaatgatttgaaaaaaaacaaaaaacccatctaaaactagcctcagtgttcgggtattgttctaaccaatgattgttaataaaaactctatcaagcttagagtaaattcttaccccctcctcatatttgttagtccaagtgtagcgagaccccgagcacctaagctcatcaatttggcctaaagcaagaaaatcttgagcatcttggatttctatcgccttgaattgtgtaccaccaaatctatctttgtactcaaacatcgcattaaaatcaccaaggataatccaagatttatgcaagtaaccaaaatcagcaagtttgctccaaagctccttcctctaactcaaagaattgctaccataaacggctgttaagtagaactcaccctcaaacccgaccattttaattttacaatggacaaattgtctatctaccttaaccaacttgtctatccatatcaaaaggattttgtacgagatagttcggctggaataaaaattctagtcaagtaaattattagacatcacattatgaacattttcatggataagttttgtttcaaataaaacaccaaaaccaattttattctccttgcaattttcttacaactcaagttgcttctctttttattcaaccctctaacatttcaacgaagaagattatagttatccatgaaaagaatgggaaccaccaaaggcagccatcccctttatattttccttcaaaacttcatatcgattgcttctcatagcatttgcctgagggttcaatgagttttttgaacctcttttttgaggagtaatccaatcacctgctttaaattcatcaaccacatgcttgctattagtaatactagactcaataatagagtccccctattctggctttctactgttagcagccaaattagcattatttatctcagaatcaatattgttgggaaggcgctaacttctcgatagaatgaactaaatccactccagtgttttgtagttgacgtgcatctgcaccagcagcaacaacttcatgccggcttttgttcccatctttgatgtcaacctttacaccctgattgtttaatcttccacacaaccagtgtgcctttgttacaattttccacagtgtgacctagaagagcataagcaacacacttagacaaaagccactcgtactcaacttgttgctccacaagttgttttctctcattggcatatgcaataattttcaaaggatcatctgaaaattcaacatccactaacactcttgcaaacttgatcatggatctctcaagattaaccttgtccaccattattggcttgcctatagtactcaccaaagcactcaaattcttctttccccaatattggagacctaactcattcaacctaatccaaactagaatcgacttcaccatctgcgtagtatctatgtcctttgagcaatgtctaaggaccactgacttcttgttaaagtgtataaccccaatttcaaggataacatccctagtaacttcatctttgaagctaacaaaggtgaacccaaaattcattcttaattaccaccctttctactcccaggtttaatgaaaccttgaaacactttgaatggggggtttgcccctaaaactatgcatacaattgatgttctctaaaaggaagcctcggtttcaatttcttccaaatctaattttactacaaattgatctccaattttcacgagctcggtaaaattcaactggaaggaaggggtcctaacctggttcatgttgaacttactccatatatcagaagctaatgctcgaaatccatcttctccatctcattggcccaacttactggcttagagttcgatttctgagccggtaaaccatcatcaagttccttcaaatttgtttcaagttcctcgcataggtccaagaatacttatattggagtagtggcatcttcttggatccaaggcagctcactctggactatctcaataatgttctccacaatcacatgcttcgattttgcaagcttcggtgtccctttcttcctttttaccatgggagcaaggagagagcatcacacgctttttctatattaattataataaattatttacggtctcagcaatcgagaaaaattatttttccaattaattggttggtaaaaaaatatatattttaaacttatcttggccaccttgcacgcacgatagtgcctataaattttatcgactggccaagtgtttcatatacactatt

SEQ ID NO: 61860 - DNA, 1202 bp, Cannabis sativa
taatacatataaaaaattaaaaaatatatatatgtataagttagtttggttagtttcagttttattggtcggtttacggtccaaaaaaaaaccgatcgactattggtggttttttcggttttcggttctgtcggtttcggttccaacggtgttcggtaggtcggtttgaacggttttttcagtattctgtattttatgctcagtcctagttatggaatagtcgatcgagactctcaaggggaattagtgatggctaagtcggacagttttactggtataggcaatctaaatttgactgaagcaaataggataaagaaagcattaagcttgagtaaaactcaaacatggcggaaagtggagctggagtcagattgcttggtaacaatccataatattcgaaattcattacctatgatttcttcttttggagttattatagaagattgtcgtaaacttcttacatctttaaacaatgtttccttattttttattaaacaatctactaacatagttgctcatagtttgttagagcatcttgttcttttctagatcgagtgtttaatagggtttatgttcctgttgatgtacaatcttatttttgactgatttgacaaattaataaagaaatttttacaaaagtactagattttgggtaaaactttacaattttactgtcacatgggatttgtttacaaaaatactgtctttttataaaataactataaaataaaaaaacagaacaattaaaagtagaggtgttcatcaaaccgctcaaaccgcccgcaccgcaaaaaaatgtggtttgaaatttttaacggtgcggccgcagtttgaatttttcctaaaccacgcagtgcagtttgcagttttgaattgttaatacgcgattcaaaccgtacaacaccgcatattataaaaatactaatttttatatttatttaagtccaatatgtgaaggtcttgtattattgaaactttagacttttttttttcatatttgtttgcaagacttatggtatttttgacaagtgttgctcattgtatttgtgatagtttaaatatttggtgatagtcaaaactgtactgcaccgcaccacactatttttacggtgcggtttctgcgattttttagttttgctgtgcgggtgcgatttggaaatttaaaaaaattgtatatataacacagtacactgtataaaact

SEQ ID NO: 61861 - DNA, 1251 bp, Cannabis sativa
  modified_base (829)..(832): a, c, t, g, unknown or other
  modified_base (1017)..(1020): a, c, t, g, unknown or other
cacgcaagatgagtgtttggtcggtatatcgaacaataaacagacaaatatgctgaccaggagtactcaacagattaaagaatgaaaatattcaacgataagtcaaagtttagaagtttaaaacttttaagagttagggccaaaatttcacgaagctttgaataagcaaggtgaaagacagacattgtgcagtcaaaaagcaagcatcatgaatcgtgaactcgcataaatcattgcaaagaaagatcgcagagtttctaaacctagggttttctacctatcttcaacatcaaggttaagatcgcattcagaaattaaatgtgcaaagtaaaagtagaaggaatcaaaaacttactcactgatcgacgtttggattcaatctaagcaaagctgctcaaatggttcttgtgaaaatttcacggcaaactcgaagtgaaaaacttctctttttgctatgaacttgcttaatggagaagttggaaaaaatgagtttgtgaacaatgctcagtcatatttataggcagagaaacaaaaaggggtaatcatttcaaatacctcagacacctcggttccccccaaaaaagcaaatattgaaaatcaaatataatcaagtgtaattgtcaaacgcggtgagagaaaatcagatttcgaagcattaattgcgtcagagcatatattagccaaaaactgaagagacgcctagtcaacctcacattaaattgcgaacagatgcacctgacacgtgtcgcccattcaaattcaaagacagctcggatgaagtctacacacaactttggaagtcctctacagacttggggggcaaatgttnnnncaatttttgcactctaacgtggcataacacgatggtgacacgtggaatcaactctatgtacctgcttgcaagaaatatgctgaacaggacaccatatacacttgctcggacaaagtcctctaaaccgggcagtgaaaaatccgtgcaacacgccaacatttagcaaattcagctttcgcatcgtnnnncatcaaagaaatccctataactttcaagattacagagatatggcaagttgtccaaattcaacgattagtgtattctctatttactatgcaatctttcaacttatatcgattgtaaacataagggaaatactaccctcccaagcttatagccctataaatagtgattcatactcactaggcaaaagggccgaaacatttgtctaagagttcatatccaaagatatcattgta

SEQ ID NO: 61862 - DNA, 1100 bp, Cannabis sativa
taaagaccgcttaactttaatttggaaattagcagataattagggttaattatgaaaattagttattaatattgaatttattatttatgataatttatttgaactcagaatgcagtttatatgtcatatatagaaattttgtatttttgcatgttcagtgcccggcaacattggaacgcggtgtatggctcagtagaatcacatcttagtatttttgtatagcggggtaatttagttagacattgggaatgtcaggattagtcgggaatttagaatttcccaaaatacccttgttacctcttttatgttgttttagtgtacaattttgccccatatgtagtttgtcctttactggactatgttactcttactaatgtgattttttaattaagtcttggctgaaggtattttaataaaaccaatttcataattcttattttacaaaaattaagaaaagaagcaaaaatcatttctctcaaagctctctctctctcgaaaattccttgggctgctagggtttgagttttcttcatcaattctaagtgatcttagctcaattcaagtgtatccaagccaaggtaagttcttagcttcagtcgttttagttgcttgaattgtatgaaaatggagttttgcataaaatgttgtttaacttgctgttcttgttgctgtcgttagattatgtattctgtagctatattatggtattgtagagtgatttgagcaggttttgttggttagtttgttggatgagcaaggtttgagtttttgaactcaagcttggttcatcaatggcatttcttgtttctgagtttgggtattggttttgctacttgtaaattattctttaggttatttggagcaggtctagagagtttgatatggtttggggttgatttggtggagatataaattttttagtcattcctacactgaaccggaattccggttcaaagaggtctgtaggaaccgaaattccagttggcttccagggatttttttcccagaaccagaattccagttggggcaattttgggaaccctaatttttcccagtttttgtgttatttaggatattgccatgttattcatcgataggga

SEQ ID NO: 61863 - DNA, 880 bp, Cannabis sativa
cccgaagaaagactctccctctctagttactgattaccgtcccattgctctctgcaatgtggcgtacaagattatctcaaagatcattgcttccagactcagaccgttgctgcctaaactaatttctccaaaccaagctgcgttcgtcaaaggcaggcatattgctgaaaacaccatgattgcaagagagattgtacactccctcaacaagagacgaggtaaacggggggccatgctaatcaagctagacctcgagaaggcttatgataagcttgattgggacttcattcaaacggttctaacccaatacgggttcaaaagcccatttacggagtggattaaagcttgtactaaggtcgaggaaatcaaattgctgcttaatgggtcaatagtagggaaattcagatcggaacgaggattgcgacaaggtgatccgttgtccccatccctctatatcatcgcagctgaagtgttatcgcggttactttttgaaaaggagaaccaggggctcattaaaggtttcaagttggctcgtagtggctcccccatcacacacctaatgtttgcggacgatgtcatcctctttggtcaagctacggttcgagaggcgcagggatttatggactgcctcaacctttattgtaactgctctgggcaatccattaatctccaaaaatcgacggtgttcttctctaaaagggttccgagtagaacggcccaagcaatttcagacatacttgggatgaagagaatgaataggcaggcaacttatttggggctgcctctgttcagatcaattagacgaacggaggatactcagtttctggtagagcgggttctcaagcgcattcaaggatggaaaatgaaaatgctctctgct

SEQ ID NO: 61864 - DNA, 2147 bp, Cannabis sativa
  modified_base (114)..(116): a, c, t, g, unknown or other
aaccaaactctctacctgcataatatatcccaataaacatgttccaagtgatagaacaactacccctgcttagaattgaaaaacaccattaaagagccaagcttgagttctaannntcaaagcttgctcaatcaacaaactacatacgaaaacatcctcaaatcaacctatataaacattatttaactatagagaacataagtaaacaccaacaataagaacaacaaccaacgtctcaaaaacatgcataatccattttctttaaaatcaagaaactaaagagggagttgcttaaaactttaccttggcttagatcctcttaaatcagctagaaatcacaaaaaaatgcagctccaaagtcagaaccctagctggttctatagggtgtcgaaaagagtgagagagagagagagagagaggaaggaaagagaggaagcttttcttgattttgtattttttgtaaaaatgatttaaatgagatgattcttttgttttattaataaaatatcagcataaacaatgataaaaatctgatttaacataaattcattatagacaaaagcttatggggaaaaatgaccattttgcccctcctacactaaaagggcataaaaggaacttaggggtattttgggaaattcaaaaattccgactattcccgacattcctaatgtgtaactataatgtcctgctatattaaaaatactaggatgtgattctaatagccaaacaccgtgtaccaatgttgctgggcacaaaacatgcaaaaattatgaaatttctatatatgacctaaaaaatgaattctgaattcaaataaatcatcataaataattaattcaatactaataataattttcataattaagccctaattatctgctaattcaattaatgctaagcggtctttacatgatcattatgaatttgtgtggtttacccaaatacataccctactaatccatttaggggaatactcgatgcagtagccggttgttgattggtgacttggtaggcccttcttatccgtgcggtgacctgcctagtacaatcatcaatggctgcctaatgtgtcctcataattttcatctccctgatccttcattctatgaattgatgactttgtacatcgaatgtcaggtttatggctattcggatgtcttcctgatcaggatgtaaagtgttcttatgaccttgcatgagcctaagtgcctctcgcagattttggagttcagtgtcatctccaactggcctttgagtattagtagtggatggaacatcagtgctgggagtggaataatcggctgccaaactggtttttccaatctcttgtaggcctggtgtgatcccggctagaggggaagtcactctgtggcctatagtaggaggttatgtattaacctactcggggtttgtccctggtggtcctctcgtgtttccaggagttttcaggttgggctctgtcataattgggttgcccttatcagcaaggcctcccttacgagcttatacaacatcctgtttcctatcaaaatgtaagataaaggcttctgtttttgctctcaatgaaagcaccaaaatattaacctcgcttctagccaatgaaagttagtcaaaataaagcaactaggtaagataaataaaaataaaagaaaaaactgtaaaataaagtgaacacctaatttcaaagaggtttggcctcgtaagtgtggcaatagcctactccccttgtattgtattgacttgagagaaggaacgaagtgttcttcctcttgaaagctcttacaattgatctttgagtaaatttctctcttaaatcactcttttctctctagagtatatttttgcagcaattctctcgatccccctcatagtgaggcgaggtcactatttataaggacttaatacatgagggatggtttctcttttgcttaaaatgaataaaataggaaactacattaattctataattataatgtaagaaataggaaattaggaggtgtggccattattctctgactcgatcacgtgatttagggattgtcttcgtgtctggacacaacgaaattgatctctgacatcgtcattgctttgcttggcatagacatgtcttcaccttggtcggacatctaccccatcaacctgct

SEQ ID NO: 61865 - DNA, 749 bp, Cannabis sativa
  modified_base (210)..(212): a, c, t, g, unknown or other
cgtcaaaatgtggtgagagaaaaccgggtttcaaagcattaattgcgtcagagcattaattagccaaaaagtgaagagacgcctggtcatcctcacatcgaattgcaaacagacgcgcctcacacgtgtcacccatccaaacgcaattactgctcgaatgaagtctacacggaacttcagaagtcccgtacagacttggggggcaaatgnnntcccaatttttgcactctgatgtggcgtcacacgatggtgacacgtggaatcaactctatgtacccgctcgcaagagatacgctgaacaaggcaccacatatatttactcggacgaagcctctttaatcgggcagccagcaaattgagcagcgcgccaacacttagcacatttagctttcgcatcgtgagtcaccgaagaaatccctataactttggtatgagatcatagagatatggcaagttgtcagaatcccataattagtgtattctgtatttaatatgcaatcttcccatttatatcaattgtaaccataagggaaatacttccctcccaagcttatagccctataaatagtgattcatactcaccgggccaagggtcgaaaaacttatctaagtattcatattcagagatactattgtaagacctctgagaaaagggattatttttcttgttcttaagtcaatacaaactaggaggattaggctattaccgaattgctcggggctgaacctctataaaattctcgtgtctt

SEQ ID NO: 61866 - DNA, 605 bp, Cannabis sativa
gaggtaaaaattaaaataagtagagtaaagtggatataccatgtaatttcctcgatttttaaagtagtttagttaaatatggcattttttggtttgacatatttatatgttattttttttttttaaatatttttatagtatttaatatgtcatatatatatataaattaggttttcaatctctctccaagatcccgatcctaatcacatcttttttttttgttgtgcttaattggtttaaaaggttttttgggatcgtgggatgagatgagaaagaaggtggagatgaagggatggtacttgtcagcaaaaagctcgagaagagtgggtggcgagttatagaaatttgtaatttttttaatatatacaatgttttttaatatttaataaaagaaaataaaaaaaaaaagttcttaaatttttaatatttttcttatcatttaaatgattttcaaataatattttatgatgtggaccaataaatttttgacacatggaaattttaagaactacaaacagagctgttaaattaagtacctacgaactaacaagaattttgagtttgggactattattgctatttttttgagattggggagttgtttg

SEQ ID NO: 61867 - DNA, 1136 bp, Cannabis sativa
aattaaaatctgagagggaggaacgactcagaattattttgttaccctttcatacgttggggtgtgaatacataccgatcattaatcccaatcctctgcatcaaaaaaaaaaaaaaaacctttgcaatagtttgcttctccggggcatttctttattcctttaatctttaagttacaaacagtacaaactacaatctctttctaggtcgcagtgtattcggcagcctcaacatcaactatgcattcggcctccatggtagagttatgaaattactgattgcttgacacttatccaaacaactgctccactcccaagagtgaaaaccatatcagatgttaacttcttgtcatcaagacaagcttagaaatttgagtcggtatagcttaagagattcaaagcaccacccttgtagactaacacatagttccttgtcctctttaagtattttagaatatgcttaacaaccgtctaaggttcctttcttgggttggactgatacctactcacaattcccactgcatagcaaatttctggtctagtgcatagcatagcatacatcagacttccaactactgaagcataatgattttttctcatgtcttttatctcttggggatcagtaagagattgttccttagatagtcacaaaccatgtctagaaggcataattttccctttggtattggtcattaagaaacgctctaacaccttattaatgtaagctgcttgcgatagagcaagcgatatgttctttcggtctctaataatttggattccaagaacataattagcttcatccaagtcttttatttttaactgggtgctaaaccactcatttacgtcagtcatcttcttgacgttttgcttatgactgaaatgttatcaacataaaggacaaataatactaccacttgattattcttgagttggtaaacacaaggttcatttttattttgtgtgaaagccataggttttgattatttgatcaaacctcttgttgcaagagtgaaaaacatgcttaagtccataaattgtcctatttatcttgcaaactttctcttcttgtcctggaagtttataaccttctggttgctccatatagattatctcgtcaagaatttcattaaggaaagct

SEQ ID NO: 61868 - DNA, 611 bp, Cannabis sativa
  modified_base (456)..(458): a, c, t, g, unknown or other
aaaaattaagcaatttttgtttttacggaactcaattccgataaaaaatgatagagttatgattgtttgaaaaatcgggtgcatatggtgtcgagggtaccccattcgcatgcacagaccttcagacaaggaggatccgcgcgagcacgtgcttgggacagctccatgtctgaactcggcctacaaccctcctttagacacgatgcgccctagctgatgctgcaactgccgagagttctcggcgcagcagcctacaaatcccttctcccgcgcgcgaaatgggctgcttgcaggctgttttgagggcagccagggtgtgtgcacccaaaaaatgcgatttttggggattttttcccaaattttgaaattttgtttcaaaccctaatttcaatttaaaatattatttttaatatatttaaagttcaatatcaattttaaattaataatatttatttnnnaatagattattattaattttttgatattttgagatttaaatttaaaaactgattattttattttaaattatgacaagaaaaggttagatattttaaattatttttctcagtttgttagtgtatttttgtagtgttatgtgttttgttgtgtta

SEQ ID NO: 61869 - DNA, 1231 bp, Cannabis sativa
tgttcagattaattttgggtggaggaataagctggaagatgagacgagaaatagttataataatattggctgtggggtttgaccgcgtgatgaagctcgaaaaataaaaagaattttacagaaggagtagtagcttatagcttggccatggtgtgtggtagaaatgtatatatatatatgtaatttggggggacataatatgtaaaataatgagtatataaatgggactaagagacaagatagaagagatatatgtactaagtttgacccaagacatataatatcgattcttatatatgtttcatatacataaactacttgagttgaaagtcaagcatgttgaaaataaatattccttttaagcaatggaattttggggtcgacacaatgattgggcgtgctctcatggactcataatatataaatatatatatttatacatacatatatacatatactctcgcacttctggaaagagagagatagagactatacatacactactcacatgccccatgcatgctcattaattaagaaagaaaaggtagagagagctttctgaccaataattttggcctccttcttacatatatatatatatatatattaatacgtattatacgtgagtattatcttagtttctattccagaattaataattattctagttaaatattttattatacatgttagtttaggtttatacttttgtagaaataggctttttgatcgatattattttaattaatagaagatatatatattaaaacattattaattgtaaagtacatgaatagtgattactctaatttaatggggatagaggctgaataaacgcgcgttgagtgtgttaggaaatgaaataatatgctaatcactttcctactattgtcttgctgtcattttgtactgttagtttgtgattcaaaattttaacaaattggtaatgttagaaatttgctaggatattaattccattctctatgattctacacaatcattcatttcctctgtatttttcgtaatattcttaaatcttataattggtctataaaatacaattttagccatacccatttttgaactttacaatttttgtgcttgtcatatccttattttttgatttcaagtttggtatcagagtctttcaagacgtgcgctcaagcttccttcgacaacaatggtgaccagcaatagcaatctggccaaagcactacaagaaatgtcactt

SEQ ID NO: 61870 - DNA, 643 bp, Cannabis sativa
ttgagtggttattgatttagtatatcaaaataatttggtttaataattacactcttataattaatgtatcatttattttataaatatattttatatattttttaatatattatccattaattatttattacttttagggcataaatcctaacatttgtaccactcggacacatgtcaaccaaaggttcaatctttaaaagtaggggctacttgtcgctcaaagcttgttcgtttatgagtaggagtctgtaatatctgtctggcaaaaaggtggggtggtatgcgccactactatgctcagatgtaggagataagatctaatctttgttaaaaaaaaacataaatgtcactttggttacttggcatgtataaaaggtcgacatctgcaacatctcaagatggtagacgtccgtgttaaacctttcaagtacccattcgggtaaggtcttagtgagattccctttctccaacccctccgggtccaagagaggtaattcgccttccacgtccgggaggttgaggcgagcatgagtaggcttctgtgtattctttcgtcctggttgtttcccagttccaggaagcctcttcgtgacagagtagactttaattaaggaaggagtaatccctcctcattaaatgacat

SEQ ID NO: 61871 - DNA, 1795 bp, Cannabis sativa
accccttccccgttatatatagataacctcacttgtggcggaagaataccgtgattacaattactataacacaaaaatttaaaacaaaaccaatctaacaagacataaacaacttaggtactcttaaacaacattacacaacaatctccaatctctattcaaatctaagaacgaaaactactcaaatctcttagtcttgtaaacccaaacagctgtccaaaatctgactttttcccacaaatcttcaactgaggcttcaatcccttcaaaaattctgttattcctttcgagccaaataatccaaatgattgctaggacagctgtcctccataggtatgatctacccttactccccccaccttgctcacaatcattagagggactgatccgagcagtacccagtgggtctcaaagacgttcaacagctttatccaaagtaattgggccatacagcaccccaaaaacaaatgtgtcacttcttcactacttttcttacaacaaacaaatgtgccaccccaaagacaatggcctcattctcttttcaaaaaaaactaaatcattcatctattctatcattgctgcaagccaactaggatgagatattgattcacaaacagatttaggaatagtgatagaatcaagagaagcaataaaagagcaaaaataagaggagaaatgattataagaaacaaaagaagaaataggatacgtacattggcgtttacctttacgtagtgcaatgggaagatcatctttgagtttcggatctgatgacgaagatgcaggtgcaagacataaaacggaagggggaggagggggacacctggtatacattataggagggcagagagtggtgaaggtgtgggcattgtgggagttatgaccaagttaggtgaatgaataaaagattcctcagaacatgtatcagacacagaagatgtgacagattatacttacaaatcatcatcctacccctaacgagtaggagtagttgatgaaaaataaggtgtatttttcacaaaggtaagatcaatagaaataagatatttgttgagatcaggacaataatatctgtaccctttctgaagatgagaatatcaaagaaagacactttaatcctttagggtctaattggtaacatgtggacggacatcgcgagcaaaacaaacactgccaaatacctgaggagcaattgaaaacaatgacttactaagcaaaagaattttaaatgggatctcaacattaagtacaaaggatggcatgcgataaataagaaagcagcttgtggaaactgcatcagcccaaaaaggtttatgaactttcatttgaaacaagaggacacgtgcagtttcaagaagatatctgtttttacgttctgtgaaaccattttaatgtgcagtatcaacacaaaaagtttcatgaaacatgtcattagaagttatgtaagattgaaattgaacatgtgtactctttggcattatcacttcgcaaagtacgaacaaacacatcaaattaattttgaatctcaacacaacgcgtagaatatacaaaacaactcagaatgatatttcattaaatataaccaagttacacaagaaaatccatccacaaaagtaacaaaatacttgtatccaggttgagacaaaataggaggaccccaaacatcagaataaacttaactcaaaaggaacactagcacgtttattcactcaagggctcaaactaacacgatgatgtttgacaaactgacatgactcacaatctaataaatacaacttactatattagggacaaa

SEQ ID NO: 61872 - DNA, 682 bp, Cannabis sativa
ccaaatattgagaaatttgtgagtatacacatcgagaaatttgtagattttgaaacaggtcaaagcccccactagaaattggcacacattggccgaagagtcccaaatagaggttgaaggggagacatcaaaaatatctttttggatcggcaacactttgactcacaacgacctttttggatcggtggcactatttgggctcacaacggatgacaagtggctctgataccatgttaaaatttgggataaggtgaatgaggttccatatcaaaactaattggcaataggagaagtagctcattcatcttatatatatatatatatgacaatttatttccacacataagcaattaagcattgtgcaactaaactctaacaggtggagcaagattaaatgggagagaaggttaatatttaaaatttaaataattttttagggagcaaattttattcctaatatccatatatatttgaaatcatattcttaatatatttagttttatgataaccaaatattattaatttggtgaaactataataaattttttagcaatttttatttgaatattgttacttctatttttgatatatttaattaataaaaatattttatatttattattcatcgacaatatatgtataaataatctatatatttatgttttatttgatttatatatta

SEQ ID NO: 61873 - DNA, 1446 bp, Cannabis sativa
atttaatctttgatattttttattatatatattgattaatatatataaaacaaaagtaaaatttacaagttacttttaaatcaaacaaataatacacatttttttttttaaaaaaaaataataagataaaataaatgtaactataaaattatttccatacataatacaatttagttaactgaattttaaaaataaacttaacttgttaactaaataaaagaggaacttacaaaaatactgaattttgggatagttttatatttatactgacacatgaaatttttacaaaattagtgtccccaccttaatttttttcttttatactatacacatccccaaaatacatacaaagcctccattttcaataccttcgatccgaaccaccagagaaataccagaacggtcagaaaataacaattattctaatcagaacgtaagtatttcagattccaatcttagaacataacataaaaaatcaactaaaataactgtaaaacaacaataaaactacaaaacaaaataactaaataaaatcaaaaaaatactatacctcaataattcttttgccagtggagacttccataacatcacgagagggaacctccaccttggaaaatttctcgttaccctaaatgcagataaaaataatgcagaacaactaaaaaataactgttaaaaaacataaaaatcaagatataatactaaaaatcgaatagcacgtacaaacaacaacacatataaagatgtaacaaaatcggagagtgatgaacaaaatcccaaatcgatatctgagactgaacatgcataaacaaaaaaaaataaaaactgaaaaagaagcttaagaaattgaaaattattttgaagatgatggagatgaaaaaggaaaaaaaagtaatggtaaccataattgaaaaagcgtggatcaatctttcaaacaaatgaagaagaaaaacaactaaaaaaaaagcttgaaaagaagaatttttttttttttttgaaaatgatggagatgagaatatcaataaataatgagtttggggtaacgtatattcaaggttttttttttttaaaaaaaaataactcaaaagaagaagccatataacgacaaaacaactgttaaaaagcattaaaaatatgcatataataagaaataaaaaatactaaatgcataacagcaataaataaattaaaatgaacaaaagacatagatcagagaacaaaaaacctagaacatctacagcaaaaaaaggaaaaaaaacctaaaacaacataaaatcaacataaatactttcgacactttgggtgtctcaaaatttttatcatcaagttcgaagtcagaatctaaatctcttcaatgatcggtttcaaacgttttaattttctcttttctagagaatgaacaaataattttcttttcgaagctatagaaaatgtagggttatggaa

SEQ ID NO: 61874 - DNA, 1535 bp, Cannabis sativa
tgagggattacataattggccataaaagtaatatgagcattgctattaggtactagtggtgcctaatactttctcgacatcttacgttgcgattggctagcgatacttcctaaaagttattatattaaaaaatttgagacccgatacttagttagaccaatagcgatattgacacataaaagagtgctagacactaccctttagcatttctcaaataatattggtgaatattgagatgttcaatgaaatacaaaccaacaaagttaagacttcaaactcagctatataatatcaagcccactgccaacttattgcattccaagccaagtataaagtggctgatgacaagttgaaggcagcccaagatcaattggccgtgttgcgcaaacggatcttactcactataacatttaagacttgtaccggtagcgaccaaaatttatttccgccggtaataatattaataccgacggattaataatagcggtgagttctatcggtatagttttttgtcatttacacgctgacaaaataataccgacagatccattatagtattccgccggtattaatattttctatataaaaaaatattttcagtttttaatatttatataataaaaataattataattattgtatataataattacttttaaaaaaaatattattaaccaatttatgtatttaaatttgagaaatcaaacattaataataattatctataatattaatttatccataacaatacacattaatattgtcttaaataaaactataaaattgtcttaaaaaactttaatttataaaatttttcttagttgaaaaatctaattattattattctaatcactaaattccataaagtcatctgcattacaactaaattttgaactatcacaattatcacgagattgaggcgctgacaggtagggtaataaggttgtgtagattattgcataggtaagatctcgacaaattgtcgagtttgtggacgaactaaagtagtttgctgttgttgctgactctgcatgcggactaaaaatctgaccatacacagactgttgtggagatcctcctatttgaccatacataggttgttgttgcgacccaaattgatcatacacaagttgttgttgtgatgacccaaattgaccatacatagggtatgttgttgttgcgatgagcctccaaaatggccaaccataggttgttgtgtctgagatcctcctgtggcatccagaagatatatgggaggagactatgaggggaagcccgaacatgtaatgtaattgaggcgactgtgaagagccaacagacatgttgagagaattttgttgatgttgttaaaagaactaagtcatctgaaaggagttaccggacatgttaggaggcatattttgtggttttttgaaaaacttgttgtggcattgacattggatgtggggttgaagtagacgcactaccttgctgttgtgatggtaaaaattttgtaaaaagttttcaaaccatgggtcatgtagagaagggtcact

SEQ ID NO: 61875 - DNA, 967 bp, Cannabis sativa
  modified_base (919)..(925): a, c, t, g, unknown or other
caatctttgttttggagatgctgttaacttttggcagttggtttgacaatctttttagtactcttgatgacgaacaggtgtgttgggctttataaatgccacggtttgaaagaaaatttttccactaagtgaattcttgcatcagctaaggtaactcttgattattggcgtaaggctcagtataacaccagtttgtcatttatgttttttgaaaacaaaggagacggaattgagcgttggactaaaccaaaaatgaatcacatgattcactgagccagtggacgctataatcatcgaaaacaaagagacaacaaaataaacgcaaaccaaacaaaaaacaccctaatcagagagcaaaactcaaaagagagcaacgttggtattattttaaagtgtgctaaaatataaccgccatcataaatatatataaattacaactaccacaaccacaatatatattgtatgaaactgaaaatgtaaatatcttatactttacctctctcaccattttcttgaatctgtaagactggattcaagaccctcttgaaagcttttgctcaactcttctagtattttttcatgtcaaatggtaacatgtaatcataatattcaatatttattcagtactaattaattaaataccaggtttaaattcaatatatgaagaaataccctttaatttctacatattcattattatgaagaagttgactttttcttcttttatttatttttttattaattttttttttcttttgaatatcaataacgtcactcacgcatcaaaattttaaattttaaaagaatttggaaatgattataattactaaacctaatgttagtcctgcataatattttgatttgactatatataatacaaataagttatataaaaagatatgggtgactattcaatggnnnnnnntttattgtaaccatatagttacatttttctttaacctgtaat

SEQ ID NO: 61876 - DNA, 1065 bp, Cannabis sativa
aaggctaccactttctgtaggttagatttccagctgatgcagcccccaagagcagtaaaaagccatttacatcctaccagcttgtaaaactctagtttttttcacaataatccaggttctattcttcctaagagactgcatctcttcttggatggcctacaaccatgatgcaacatctttacttctcatagcttcttgaaagctagtgggttcttaactgtcaacctcttatgcaatcataagtgcatatgcaatgaattcatcataaaaaaaaacaagtagggcctttgtctgtcttctctctctatccctagctaactaatagctgctaagttcctgttgatctacattttcttctccttctgttatttcagttccatttggaacaacattagttggtgttgtaggagcaacctactcacattcttatctgaaacagatatattatgtttagaagtggtcttggttttcatggccattttatcttcttgaaaaataacatctctactaattaagcacttcttgaatccagattctaagcaccacactctatatcccttaaccccttcagggtagccaagaaacatgcttctcaaagctttaggctataacttatcttgtttaacatgcataaatggagtacatccaaacactttcaagtgatctaagtttaggggtttacatgtctataactcttgtggggtcttgaagttatttgacacagatggtgatttgttgattaggtagtaggttgttttaagagcttctcctcaaaaggttttgtctaaaccagctcctaataacatgcacttaaccatttcaattagtgttctattcatcctctcaggaacaccattttattgagggattttgatcacgatgctatgtctttggattctcactttggcacacaatcccttgaactcatttaagcagtactcaaagcaattgtcaatttttaggaccttgagtttgtttcgagtatggttttcaagcaacctcttccatgtatcaaaggttcctagagtctcatatttccttttcaacaaataaacccaaactttc

SEQ ID NO: 61877 - DNA, 1273 bp, Cannabis sativa
  modified_base (1231)..(1248): a, c, t, g, unknown or other
ttttatgttatgtatattatatttttacactacttagctgattattgcattcagttttctttatatatttttcttttcaaattattatttttctttaatttagtatttcaatttaaaaaaataatgattttaaaattttttataatatttcctcttatttataattaatttttctatatttttaagttttttttcttttatttttctctcagtttgagttttcacaaatctctatctatctaaccaattaattaggcttaccaatgaataatatggctttttaaaatacttagccctccttccgtccatttttttgtaaatatttcaagaagactgactattggttgcaacttaaatttattgtgtagttgttgttggaaacaataaaatatcacctaacatagatattttattaaaagaaaaactattattcaaaaaaaaattaaaagaaaaaataccatttactcttttttaatgtttagggatatctgcagttataatttattgacaataacacttaagttctaattcatttattatgagatcaattctttatgttaatgtaacatgtaagtattaattcttttattttgattgttttggttgatgtaacttataaatcttaccaatgttgatcttagtcgatcaaagtggaatcatagagtaatttgtggtgaaacttctttatgtttcaacaagaaaataacgcgcgcttcctgtgtagttatattttatttaatgatagatattaaattttaaattttgatatatattttttttaataatatgagtaactgttttactaatttttttttgtattcagaaatataaaaataaataataaaaaaaaatcatcatacaatttcttatttaataaataaaggaaataaaaatatatcttcaaatattatattaaaaaaaattgaagaatccttatacaaaatcgggactatattaattgaaaatcgttgtcatcactgtatcttacttatagttgtcattatattattcaaaatcattatatcatcatcatatctcattctaccatttataaataggttacataggtcgtatttgaattttattttttgacaatattaaacgggttgtgttcaggatatacttttaatacatgtgttgacacgagcatgatccatgaatacaaattgtcacattttttaataagatcggacttaggggtgttcacaaagtatccgatccaatccaatcnnnnnnnnnnnnnnnnnnccaatccgcaaaatgcggatatccg

SEQ ID NO: 61878 - DNA, 888 bp, Cannabis sativa
catttccaagtgaatcctaactctattatcttgagagggaagcacttcctgcaacaaatgagaccctgacacgatcacaataccacaacatcctcatggagaaaatcgaagattctcaatttgaattgaaagccttcttcatcaacaagaatgtatgtgacagttttgatatctttgttgagccatggaaacttgtcttggaagatgaatcttgagagttcaatataaagtaatttttgttttggtcttaattgtactgcatagaaggttatattgcaatgtaattaatattattaagaattttttatagtagtttttgtggtagggcaatagttattgtatggtgcatagctatttttgttggtaaagagtttcaattatggtcttttacttgtttagtatagtgacacatgttatacatataattaatgatgaaatcagattttatgtttctgggaatgagaaagataagttgcttaaataatgatgtattcttcgaagtgttatccctattacctacaaagacattgttttaattgaaatgtgtacctaaatcttggaacaacttgatatctgatcgttcttttatccaatctcaattacaaaggacaaaattctctatctcagaattcattgttattagagcaccgtatctttctcatttcctaaaacacaaaattaaatttcatcattaattatatgtataacatgtgtcactatactaaacaagtaaaagaccataattgaaactctttaacaacaaaacctgctatgcaccatacagtgaactattgccctaccacaaaaactgctatgcaccattctcaataatattaattacattgcaatataacttgctatgcagtacaattaagaccaaaaggaaaa

SEQ ID NO: 61879 - DNA, 687 bp, Cannabis sativa
ataaaataccgctctgaatcacttggacacacaccaagttatctgtttccaacatgattctgtcccacgaatgagttgcaatccaactcaatgcttctttaatgtctattatctaagcaatttcgggttgtacacatccaatcttccccttcttgaatgcttccaccatagcatcatgataattctgagctacacaacccatgcaaaagacaacactcgaaccggaaaaaactaaaaaactatgtcaaaagacaagactaaagaactatgccaaaagacatgactaatgaaaaaactaaattagtttcaacacataaatacgatcacggcattaaaattaattaaggaatgatgaactccttatagttttaaccccggtcataaaaacattaattggaattaaactaataacagtaaattaataaatgaaaataaaaatctgaaactgaggacgtcgttgagccgaaccgaaccattctcaaacaactgctctcttgaaccccttacagaagacgttgatgtggaatgagaaaaactttggtatcaattaagaagatcaatacaattgtcttttccttcgataatatcttatcatcaaatttattgtctataccattacctcaggcttgccgaaaaactctccaatttagaactttatcattgaaaagaacattgaagaattttatc

SEQ ID NO: 61880 - DNA, 1206 bp, Cannabis sativa
tgatactatccgccccatatttaatctatacataatttctatcaatagttgttacttatatgatatatctatatatttaaaagataaaaaaaaaaaagaattttacaaaaatactagattttgggtaaacgtttacgattttattgccacacagcagaaattacatttatactgcctttttttttcttttatgctgtaaacacaaaaaaaaaaaaaaagaggccttcatcttccacacccacagacatatacagtagcgactatatttacaagcccagtcatgaaaaatcagaataaaaaaactactaaaataaatctaaaacaacacaaaaacaaatgtaaataatgaagtagatataaccacttagaaaaacataaaagaaccacacacctcaaaattcttttttcactgagctcgtcaaatgtatttataggagaagaagaagaataaaaaaccacaaaaacaatcataaaaaaggaagaaaaaatgtatttatagcctccatctttcacatttacggacaaaaccaccacatcaacacgagaaaatccaaaaaataattattaattctggcgagatggagcaagaatagtgaaatcgatatcaaataaataaatcatgacgaacaagcgtaaaacaacactaaaaatataaaaaaaccaaaaataaaaaaagtaaaaaaaaactaaccttcttctacacagtctcaacaccagatgcaatagagtctatatttgcaagctcaattctagaaaatcataataaaaaaaccactcttatcttcaaaaacttatatgttaatggagaacttatatgattgaaaacttcaaaaactaaataaaaaaatgaaaagaagatgaagaagaagaactgaacaaaaaataaaatgaaaaacttatatgttaatggagaaagatagagataacttaagaaagaagagagtaaaaaaaaaaggttacttgttatttgcttaagagaacaaaaaatagtctcttggaatgggatccaggatttgcccaaatttcacatagtgctataattgttgtatatatttaataatctaatatatttatttatttttgttacaatatattattatgccatactaaaatatattatataatttaatttaattattatatatattttaaaaaaattaatatataataaatgtatttttatcatttttattagctaatttatta

SEQ ID NO: 61881 - DNA, 682 bp, Cannabis sativa
ggtatttttgggttttagataaagtagtcatatattttcaatggtgatatgtattagtttagaaataaaatattaggtatatataagtatagaaaatcaaattttccattcccaatagtatttgagtgacggttccccttatcatacctaaacgacgccgcctttgggttaatttaacgagtaaaggtgtcaacttcaagttctcgggactgagcgcctgagcggggagcgggatctgatcttgttttgttatgttgtgggtggccattgttgaagctctcaattcggggatttggctaaactggaatgaccagaaagggtcatcgtgtaattcaacactcagattagtttcatagcagcaagcaatggtggtggagagctacgtggtggttcataacatagccaagaggcacaacgtcggaacgcttgcccgcagcgccaccgcttttggggtctccgagcttattcttgtcggccgtcgcgacttcaactcatttggtagccatggctccacttcccacgttcgattccgtcattttcactccctcatcgacgcatgccgcttcctcaaggtccctccctccccctttttcttttatgtctctctctcctttgtttatttacgcttttggggtttcattatctcttcacataatttattgggtagcagaggaaattcgtt

SEQ ID NO: 61882 - DNA, 630 bp, Cannabis sativa
aataaataataaagaaaagaaaaataaacaaacaaacaaaatgttgccatgcaaatgcaataaagaaagagaaaggaaaaaaatgtgataagcatggtcttaagaaaatgacaagaaaagatgtgatattaattacggtacggtatgagattgattaaattaggtgacaagaattatgtaattttcttacaatttgcgtatattattgaaaacctcccaaaaaaaaaaaaacgcacaatattttatataactttaaagaattctatgtattttactgaaaaatttataatacataactcaaaataattgaattatgatgctccgtgtatatagggacttgacatacttaagtggagagtgatagcccaagaagctgaatctgccacaaagagatcaagcccaaaaggcttcaagtccatgtggatcaatttcttgattatgtgtatttgaaaattgaaatttttacactaaaaatacaaaagttaactttattacatatatactacaacacggtaaaagcaacttttatacactttaagtttattttattatacttctacgacttccacacacaatcttattggtatgtttggaaattattcatggcggaagtaacccagaagactccga

SEQ ID NO: 61883 - DNA, 1580 bp, Cannabis sativa
  modified_base (1525)..(1533): a, c, t, g, unknown or other
tgctgcctttttgaggacctcttgctcctggagccttgagaagatcaagttaggcttgcagttagagcagagtgagacgggatttgtccgctcatccctgaggggttcccatagtgcaaagatgcgggagccaaggcttggctctgattgtgtccttgggtagcggagaactgtataccgctcattgggggagtagcttgaggtagggttcccgaaagctgaactccgggtacatatcctgcaactctggtcgggtagtatcctccgtaagccactatttgggcttcttctaagttgatctacttttggaccctcttctggaaatcttggagatacgcagctcctgcttgttgtaactcgttccagaacggggttcctgtacgaatcccaacttggaaaagtgcaagctgttgtccgtcatcaactttcttagtcttcgaggcttcttccttgaaccttttgatgaaatttttcaaatgtctctgtgggtagttgcttgatgttagtcagggtgctaacttcgagattaatctttctcgcggcaacaaactgtctccggaagctaacttgtaatttgttcctgcagtcgacagatcctggctctaactttttgaacgatccctccgcggaaccgcttaacgttagtggaaagcacaagcacttagcatcattactaactctcatggccgtcattactcggttaaactaggacaaatgatcgctggggtctgagtccccagtgtaggctgctatttcgggcatcttaaaatttttggggagctccgcctccaggatgcgtctagcgcacggctcccagtcctcagagtcagagtctgagtcatccccctttgtctccgggagactcgagcaatgtccttgcgcaatatggcttgctcagccataattccttcgttcagcgttcctatggagatcgccggtgcatgtttcttttttgtccaagtgatctcgcaaatcaccgtgcttctcgttgatttgatgtcttagatcaattggagggtatcttcggttccgtcttcctttttccccaggttcctggtgcacagaaatgctctttcggtcctctcgatcctaagggccaagactccctttttggagttcgcccctctacggacctttccctttcgggaaatctgagtagaccttccgcagatcctgcatctttttctttttccctgggatggaagtagggtttttccgttggtttccttcagagggataccatatggggcaaggttccctagacttatgcttttgagtgcttggtgaggacttttccggcatttcttcgagtcctgcagggatggctttagggtgtatgtggatccctgtcgtctccatggcttttacatggcgaccatcacctcttgcatctttttgttttgttcttttcgggctgcgatcttagctttatgatcagtagccttttgccttaagagcagtagctctgtgtaactaactttgtccaattttcaatagatcttttaaataatttgtaacaggtaannnnnnnnnttctttcatctgtgtaaacctactaacatgatagggcccatccaaat

SEQ ID NO: 61884 - DNA, 715 bp, Cannabis sativa
tggaggaggatgctatccctcctccactagagacatgagaggtgttgcttggaactgtagagggttggggcagacctctacagttgtggaactgaaagccctgattcggtcgtgctcttctgattttatctttgtgactgaactcaaagtggatgctaaatttttggtacgcactcttaagaactttcatttttatttcaatactactgtgcctgttgtgggtaatgtcaagggtttaatcttagtgtggaaaaacagttttagttttgaaaacatctgtttaactgaaaaccaaattactggaattgtgtactttgaccctacaaattatccttggttattatcttgtgcttatgggccaccgtactttcatgagaagaagcaattttggtcgaacaccatggacattgggtgcaagtttaatgggccttggatgattttaggggatgtgaactttgtgctaagtagctctgagcgggtaggttctaaaggaaaagaccaatttatccctcttatttctgatttgattaagtgccatgccttgatagacttgcctatcaagggagataacttgacatgggataaccatcgggaaggcccacgccacatcaaatctactcttgataaatctttggtaaatgaggagtggttacgactcttcttaaaaacttcaattccctctttgcatacttgcaattcagaccataggcccctg

SEQ ID NO: 61885 - DNA, 2226 bp, Cannabis sativa
aatcgttttcctataaattacttgtgtttcacaggtacaaaaagagaattgaaagcataaatgcacgaaagcgaagccctagaaagaaatttcgaaaaagcaaagcagatagtagagagagaatgagagagaaatacctgaaagagagaataaaccctaggaaggaaggttgagaatatggccttcgggttcgaggggtgtgtttgggtgagtgtttgctgcaaagcaaagactcagatacacgacgactatgaatttgctcccctttttctcactaaacgctttctttctaccctaaaccaaaaaacaactcaactaattcccaaatcttataacaaacaaactaaatataaaatatgataaaaaatattgcaccatcaaaattaactttaaagaacatttgtactgagttttatttaccgctctaaagacacaagcttgcttgagcactcaattattatgtaaggtaagtaattgtccactaacaatcccttcagtcgcaaataatttattatttttatccactaagagtgatttgacggcgagccatcaaagaacaaaggagaaccaacaacgaaacaaaacaaaaccatgtcatataaacaagactgaaacactcaaaatcatgtcacaagagacaagactaaaatactcaaaatcatatcataaagacaagactaatcgtagtagtaaaaatcttaatcaaaaaaaaaaatcgtagtagtaaaaattgaatcgtcatagcaaacacaacccctagcaagtcgcacctatgcacatggaaggctgggggcttggtcggagtgaaaagacaacctcatgtagctataaatttaagaacgagaaaccctaattttattttttttttaatctaatttcactctaactaatcgatctaatcattttaatttattaagaaaaggattatttattttataatggatctaactaaaaacatattttttttatagtgaaaataattttattttattttttttcaaaaaataaatacttgaaaaatctataagaagacagaatctgtaaatatatatatatataaaaatttataattttttttaaaaaaaaatcaaatatcaagtgcattgtataaatttatttttttttaatgaatttttagttgttttattttgttgacctcgtttctagccaacaatattgagtcaattaaaacaatagatataactatattcgtaattcaagaacaatcacgacacacgaaatttatagaggttcgacccttagttcagtaatagtctactctcctttttgttgttgcttatgaaagaatattaagatcacaaggtccgactaggtgagtttctcaatatctcttgaaaaggttacaagtatgttgcagagtattttctctcttgaaagtgcataaaaagaaggccccttaaatagtgaattggccttactatatataggggagaacaaatacatttagcctcgaaataataggagaaaaatcagtgtggatttgaatatgaatcctacgattgtctcatttagttaaataaatctcatgaaagtagaaatttaaaattagtccaattattggggagacattttgaggaaaatatcctaaaatatcttcagcgattcctctgatcaacaattcatgttatgcaggtggcttgcattgctcgacgtgaggtgaggtcctaagcccgttcaggtgttttggcatcatctggcatggtcagtataaactagcgttatatttcgcccatggtcaaatttccttgccacatgtcagcttgccaggtgccacgtcgtcagtacgaattttagaatgacatttttctccaagtctgcatgaaaacttttgctcgtacaaggaattcctaggcttgcacattgcacggctaggtgacatgcgtttgttcccacgtgcttgcatggatgtgacatcagttctgcctgaggtgtgcaaatctctccctgtctcttcaactctttgcattaattgcttttccttaaaaactgcaccttaaagattgtgcgctaacagttacacaaacccctgtaatgattaacttttcactttttggggagaaacatgatattttgaatttgatgaccattatacctttcggtgaattatcataatgaaatgtctgcaataatataaaatagggaataaaatcccaaactaataattgaaactaaaacaattaattcaaaaattaaagaagatttcga

SEQ ID NO: 61886 - DNA, 1567 bp, Cannabis sativa
ttctttacactaaaaattacacacctcattatttaaatgggctgctatttatagagccataaaagggctaaaaaaaaataaaaaaaaaattaagattataaaataaatattaatattaaatttgacatttgagatcaaaaataaaattaatattatttattatcattgctattttgtcttctaatatttggatgaagattgagtgtggaagaagaaaatagagttgatgattacttagatgacctagacttatcatcattgcatcacattcacatgctttggaagagagaaaattgatgatgagcttcatgggctaggcttgacctttttgggttgggttgctttggacttcaacaaaactgccatcgtttttcttcttttcttttcaactttgctcatttctttttctttcaacaaaaatacactttaattcctacaagaaaatcataaattgaatcaaaatcaaagatttttatttataaaatatattacaataatttcataaaaatattaattaaaactcaacttattttatcatttaaaataaattaatataagtgtatttttaaccactaatcataagtctatgttttagggtgaacttcgagagaaaatctctatgttttatctcttttacttttttgcattattgtttatcttctttattgtaattgttatgtttgttcatgttttaatggttgatgctaatctatttgtatgtaaattgaatcttaaaagttgttcaattcaatttgggtttgtgtatgtgagcaattgtatatgtcatgattggtaattgtttgattgaatgctaaggttaattaatactttgatgatctaatgtgtatgttgagttggtgtagggattgagtcgacaaatcccagtaatggtatgtaacgccttattagtttaggtatgctataatattttctcatttattgcgcactcctttgcatcaaagagtttatgaaaaagatgattaattaaaattttcttaaataaacttaaaatttaaaaaataattataatttatattcctccgggatctcgttaaaagcttacaactatattcaaatcatattgtatacaaaatttgtcatccaaaaaccatcaaaaagtgagcttaaattgtcctgaagattctgaacactctaggtctaaccgtcttcatatgtacaatcttcattcaactctaaactcattccggttttgttctagcacatgtacataataactacgagtctatagactcagtaagaaaagtataacataaacataaacatataaccagaccgtaacaaggcgcccatatacctaatcacgatcctataactgggtcaagaatgttctcaacaaaaatatgactaacggtaaatccaacttatactcagtactctagttgtactgatgtggtagtaattagttcatactatctgaaagcctagcatatatttgttgatatctcagtgcaatatgtacacttcactaatattctaatatgctaatttgatggctactgatttgcctaacatatatcttttagcatctcagtgcaactctatgtac

SEQ ID NO: 61887 - DNA, 952 bp, Cannabis sativa
tcctcattagcagcttcaaaaacgcaagtacagtacctgttatgagtgaagtaattgtttaaccggccaaattcctcctctccgatctcggatcagctagtgaaggaggttgataagaaagccaaaaaggccgatatagagagagagatcgcggtacggagagagagccgaaaagttatgctatgactttggacgaaaccctaataaatatgactttggtttttcttgctaaaacattattgggctaactcaaacaatacaaatgggctttttttctatgttgggctaacaaaaacataaacatttatactacatattaatttcaaaaatactattttaaaaagaaaaagtatttacaattacggtagagagaacgagaaagtgagaactttgggtgtgttgagctttttcctcaacacaatagtaactcgaaaaacaaactttaaagtacaaaatcaattagatatgaacatattgaatcaacttacaaatcccgaaagagaaatcattaccaacttctacagattgattgaaaaggaaaaataaaagacgaaagccactacgtacctgaagataacaatgaataagtagttgaagtagtaaaaattgaagaagctgagtgagaaagaggcagagagaagagatcgaaaagtagtgatttagggttttttttcccaaactcctcggatcgacctcggagttgagaaataagggagtgagcgagtgagggtttgagatgagaaagaaaagggttattaaattgaaatcttttttgtgtttccgaaactacccctgggttttggaaaccgacttgggctcgattcagtacttatcgaaatatactgagaatgagacacgttttggaattttgttggtggatcaattcaataaatataattgtataaaaaaggagtaaagagtttattacggagagagaaagtagatggaccct

SEQ ID NO: 61888 - DNA, 2109 bp, Cannabis sativa
atcttgaacctcatcaatataaacgaaattcatttcatccgcattatatccttcatgcttgagccgagagtgaagatcattaacaaaatcagcaagatcaaattcaccactttccattttctttctttcatagatctgaaatatatcgtatattctctctctcttttcccgacttaaattggaggaatgtccttctgacattttaagataatcctcacggcttagcttaccatcacttgcttcaatggacatcaaaccacctttgatatgagaaattatctcagtgaagactcgagaaggatcaagcttcttcgttaacttggaatcaaaatgatgccaatataaaacactaaacttctcgtaattgacttccttgttccttatcaatgtctgaagcaacactgatcttgaatttctaccttgatcataagaaagatcttccacattaaggaatctttcaaaataagatttactcaatgttccatctagcatcattaagaatttgtggagtgttatgaccaaagggtagtaattagcaggaatgtcataaaaagagtttgggatgttcttgaactgtgtttcttcatcatctagatcatcagtatcaatcaaactacattcatttagattggtgttgccaccacaaacaaatctgtccaaataacagaaacatcacgaaatcagatttaacttatactcttaaattagcatagaatcaacttatagtcacattaacgtaccttttcaagtcagaaacatgttgattgacggcattacatagtttaggactaactgtaacaaaaagctgacgtaagacttttttcccattctctaccaggttattgggtcccatgatattttcaggaacatgtccaacaatatctgtcttgactccacagatttcatccatagcaaaaagatgcaattgttctcttcgaagtagtttcattgtcaaaactgttgtttttccagttcccgaccgtccaagtatgaagctactttcattaacaaggatgatctccatttgttcatctgttacttcatatggaagatcaatttccctaccatcacgatcagataacaagtggtttacgacaccatgagacaaggaatagaacttcatcagcagcaagctttcattgaccttcgaattctcgacatagcttattgcatctgaagaggaaccaattgattcactctcagatttgttgttgaagagatccttaagcctaacaaaatccaaagaggatggccactccttcggtatttccaagtttctagcaacataaagaacacagtaagataggagagtataaagcaaagtttaagtagaaatgttagctaggagttattcaaatgcaaaaatacctacccatcgaaaagcctttcgttgcagaggttgacaaaatcatctgtgtacttgccaaaaatgttgtcaaggcgttttatcaatttcggtacatgatccggaggcaagacatcccatatctttagcacttggaagtagttcaaattctttgaaatgtccacagtactaataagaatctggccatcaactttaaatttcattatctccaaagaacttccacttcctgattctgaaggagatttcttaggcctccaaccactggaaatcttaagaagatgatttaagactgacttttttttccggataggtgtcaattttttaaaggacttcaaaaagttatcactgaaaagaacctaaaatttggagtggcaaggacagaaaaaaaaaattagaatagaaatgtcatatatgtatgtctacgtagatttatgcctgacattagtaaagaacaactgagcactaacattaccttccacttcgaatttctgaaaagcatactatcagcattaagaagatcatcgaattgatcaagctctttcttcatctctaacatagccttggccaaacccacatcttcatcagcattatagaaacagtgacgctcttttgcatcaatgactagagcttcccaaatagattgactattagcaagggttctttcattaccaagtatccacaagcaatgcctggacagatcaatagagcagacatttttaactcacgcttatgaaaaccaggca

SEQ ID NO: 61889 - DNA, 680 bp, Cannabis sativa
caaaactcaaattaacaatcttaaggttcttacacaaaggatgatacctgaattgagattgattagcagccaagatcaatcttctggtcaagtattccatgattaacacaaataagagcggagaaagcgggtcaccttgtctcagtcccttcttgccttggaaactcccttggactcttccattcaacaagatagagtaggatgtcgattttaagcaagtcatgatccaagatatgaacctgccctggagtttgaatacattcaaaagattctgcaagaattcccaattgacaatgtcatacgctttactgatgtccaccttgatagtgcatctcggagatatgtttttccttttgtaattctttaggaggtcttgaagaatcataacattattagctatggatatcccttgcacaaacgctccttggttctgattcacaatacccggcagcacctgagaaagcctagaacaaagcaacttagaaatgcacttgtagatggtggaacagcaggcaataggtctaaactccactgccctggtcgaattttccgtcttagggatgagggtaatcatggtagcatgaagttcccgcggcatgatacctgtcatgaaaaagttctcaattgctttagtgaattcagctccaatctcaggccacattttcttgaagaatccagct

SEQ ID NO: 61890 - DNA, 669 bp, Cannabis sativa
ttttgaaatctcttgcttatgtttcgagtgttgagtagagttatattcctaaatgtacttttatcattctctaactacctcgactaatccgactactcaacattctaaactagtttggtatattttaaatatatcttaacttttatcactatgacatttctaaccaatccgtcaagtttccacaaccatcaaattcaaaaatattttattttgaaaatggtgtttacaatacccacataaactgataaaattttcgtaattaataaattccgctcaattattcatttaatcacatatttaataaaatatacccaaattaaattaatcataatttctaggatattatatatagtgtagaagcatcttcttctaatttatcaaattagacttctatttatagtagttaaatctctattaattcaatcatatttaattatttaaataaatacctataaccgaatttggttactgatatttatgagggaatctctcaacctcttgaaagaatatctcaactactttgagacatctttaaccactttttaaattcaaatatttatctaatttaattaattaattaataaccaaaaagacaaaactaataaggacaccctacactagggttggcgcctaccttgtcttatttaggataaaaaatgtgtcttttat

SEQ ID NO: 61891 - DNA, 1928 bp, Cannabis sativa
aagtcaatctaggggaaaacactaatttggagaccctgaaagaagttataggaggtgcaaactcatactaatgtccttcaccacaatcaaaaagaaacacgctatgtgatgaaccatgggtgttgacctcggttgtagccaacgacagtgagtaaaaaataaagggattataaataaaagaaagcaaaaacaataaaataaagtaaacaccaaattttgaagaggttcgaccccgtaagaatggaaatagcctactccccttgtattgtattgatttgagagaagaaaagtgttcttcctcttgaaagccattataattgatctctgagtaactttctctcttaaataactcctttcgcactggagtatatttttgtagtaatcctatcgatccccttcatcgtgaggttaaaccactatttatagggacttaattcatgagggatggttttccttttgcttataatgagtaaaataggaaactacattaattctataattataatgcaaagaataggaaactagaatgtgttgccattatagggattgtctttgcgtctggacacaacgagatcaatctctaaaattgtcacctttcatactccgctcggtatagacatgtcttcaccttggttggacaactacctcataaacctgctcagcaatctgagcactacggatattaaccaaccataattgggctgctaggagtattttcctccacccaggtatcaaaaacatgggacacgtatcaccccttcttattgccacatcaaggtgtaaaaaataggataacatttatccccaagtctgcgtgggaccttcctaggttcacgtggaattcactcagcctggagtcttgtttggatgggtgatgtgtgtcctagatattgaatgatgaactaatgtgacccttactaggggtctcttcaatttcttcccatttaatgctaattgacggttttaccttgaatcacgattcgatgcttgcgtgtgtttaacggttatactccctgtaatgagtacataatgtacacatttggggggagattcaagaaatttcaatattgaaatgattaattcctttttcagactacttataaataagatcaaggatctcgagtaatccttttagctagttcaactcttaaacatcagagcaaaaaaacatttggctaaatttcctcccaaattcttcaaggaattcacaagaaaacttttgacgatttcttccaagaaaagcaataaagcttgaaacaagtgagtgaattcttgacttctttcttttacacatttgcaacgaaatcatgcctaatttttggattttttttctatgaatcttgcctatttttgaactgttctcggtcaaccatagaatacatagggttaggactcaaaaatctcatttatgtttaacaataacatctgattgtctgactgcgctttgaatttaaccttacaatgtttatttccactcatccatagggctttagtgaaaatcagattccaattcgaagttttgaacttctgggattgaaaattatatttctgggtgaaacctttgcttttgatttcttagtcaaacctggtcggtatatacaacctatttttcattcgttgctctgaccaactatcactttcttgtctcttaccttttgtagatgtagatgaaccctagtgtgttttggggaggcaaacatcatatcgacagggatttgcttcaacttttatatggggatcatcctcgtctctgtgctagccatcttcgtgtaatgatgatctttcaaattctagcttttaagattgggaaaaaagtattgaacatacaccttcccaagagcccaaggtgcaacattatttctatcccgaccaaattcgaggtgaagaatacggtcgtttcatctgggacctcaagaaagattggaggc

SEQ ID NO: 61892 - DNA, 1014 bp, Cannabis sativa
ataaccaacgcaagacatgatataattttttttttgtcattcctattagtttggaaaggatgcaaactacaaaaataataataataaaaaatctgaaaaatataccacgtcgttgccaccaccacctacgagactcaccccatcaccccgccaccaccaccaccaccacccccactccaaacccattttgttaaggagagatttgcctttcttattaaggagaattttcaaaaatatttttcataaaaaatttcgtaatatacaatcaatcatcaaatagttacataaactaacatgaacacatctaaattatccaaacattattttaaaattatattttcatgaaaataaatgattaccatgacttttgagactaattattaaaatttattttaccaagatctagatttactaacatgtatattgattatagaactataatctaacatcctaattataaacttcctaaaacaatgaaataaacacattttaaagttataaaaaatcttacattagtggcaccaaaatataatatctccttcccttagatctctaatccttgatccattctgtcgcagagtataatcaagatctaaaccttgatcttcttgtgttgttagaattccttacaatcttccacaaaggcctgagtattggcttgaattgtatgggcaatattcctcaactcacttagggttcgaaaattttagaggaagaagaagtgggttttgaaatttgacaagctctctctttattttctaagatgtcagacaaagtgaaggtatgcaaataagagtcatctcttttttatttataggattgcatttaggattagaatttggattatatggaattaaaaaaagagataaagtaatggcttaattgaacccataagtggctgaacctattgtgagtcctacatgttttaattttatttaagaacttattttttttcttcacaaatgtcatattttaattctaactctataaatgttaaatctatctatttaataa

SEQ ID NO: 61893 - DNA, 875 bp, Cannabis sativa
gacttaaggtttgggtgtgggtttgggtctgactcctggtttaagtctaggtccgtaatgtattcaggttcgagtctttgtcccaaatccaaacgccaaccacatgtcgagtctagtttgagttctggtacgagttcagattcgggtctggatcagcatctgggtccagggccatttcctagatgtagacaccgactatgggtcgagtctaagccttggtcttgggtcatgggtctcgcgtccaaatctagatcgtggtccagttctagctcatgtcttaggtcttggttcaggtcttaggtccaggttttggtctaagtttgggtcttgggttctgagtcatgggtctgggtcccggattcaagtcaaggtcctaggtcccggtctgggttagggtcctgactgagtgcaggtcccggtccgagttcagtactggtccttgtatcgggtttaggccttgtgtaggtctggctcacgtttcggttctcatgtcccaagttagagtatcgggtgctgggtcttggtctcagtctcaggtctcgatcccagtcctaagtccctgtcccggtctcaagtcccgatcctggtccaagtcctaggtcccggtccctggtcccggtcctgggtcttggtcccggtcccagtctgggttctagtcccagtctacgatcaagtctcggtcctagtctaggtttggatccaagtactgatctcgttttgggtccgagtcccaggttcgagtttgagttcttgtcgagtctaagtcttggttcgagtctagttttgggtctaggtctgggttttagtttgtgtctaggtcggtgtcttggtaagggtctgggtctgtgtccgggttctggtacaggtctgggttc

SEQ ID NO: 61894 - DNA, 858 bp, Cannabis sativa
cgaaccagatttttctcccattttcaagttttaacaatttaaatacgtgattggttgacaatctgaaagcataccaaaacaaatattgattaattgatctgagtccaaaattatttttatttaatgatttttcaaaaaataacaaattttatatgaatcaacttttgttaatgccaaaaattaatacattaatttgattcttaatgttagcaataactgattataataaaggttattctaatcctttttaaacatctatgtactttcttcttgttttccttgtggcaaacaatgctcctctttctttcttttttcctttcctacgagcttgattctctcaaggaggagatggcagtcagattctcgtatcaagatcagtatatacgtatcacttcatgaaagacatgatagtatggagagaacaaaggaaaaagaaattataaacttacacaaaggagttaccaaagtggagccaagttatattgatttataccgaactgaggctaggtaatattggcatttcttgcactgactgcggataaaaaaaaattaaaacatgaggtaagccgtaaacaatgaactaccaccataggtaagttatatataatgtgcatccactccacataattgcatttcctatttcataatttgaagttgatgtagatgtttctaaaagagtttcgtacagctcaacttagatcaatgatcatcgaatgccttgaaaggcgataccgattatcatggttgtacagaaacaacatacaaacaaaatatatatgagcatcttataattgcgcccagttactttacttaaaattaaaaagcaaaataagcatatgatttatataaaattttaaa

SEQ ID NO: 61895 - DNA, 1127 bp, Cannabis sativa
tatatacaactgacatttgcaaaaacacggtttttcaattttattagtcctttcaactacccccttgagctattgtttttttttttttaaaagaaaaactattttatttattaagagtgaggttggtataccgtacattgtatttcgatgtattatattatatatcatatttttatataactagtactatatttggtatttatttttatgtaaagataaaaatatataatatttttcatataaattaagatttcacataagattatgtatataaaaatataatatatgatacaatttaatataacaacactatttaatacaattaatatggcataccaaaccaatttaatattttttatatagaatttatccattatttatatttatgttgttaaaataattacacattatatatgctatgcacataaaataacaaatgcaacaaacacaaacataatgacaatttattttcttcactcatttttgtagtttggttgaagaacatcctagatttctttgtccctatagtgttcttttcatgacaatattttccaaacacaaaacattcaaattgttcttcataatatgtgtatatataaatttgacacatacttatgtagtaagtcatttttaatgactgatcatgcccattttaaattaaagataattaatttaaattacatactacataaatatatattaaattatgtgtaaatgctttctaatctcaaaacatgaaaatgctttttgctaatataatgagagcatggccccatcaatgaattattttgtgtaatttttgttgaattagtgccttttcttttatgaaatctatctatgtatctcaagggtgtaaaactcgacaaaacacatggtaatgatgatgagaagctcccaatgtaatgtaataattgatttttttttttttgaaagaatgtaataattgaatttgagacacaatagtaatttattttaactaaaataatgtgctacttttttcttattgaatctcatcatgctaataatataaaaatgtaaaaataattcattggacattttaattaatgcagctttacttaaagccccttctcaatattattgcaatcttatcttataatcatatatat

SEQ ID NO: 61896 - DNA, 1067 bp, Cannabis sativa
tctgtaacatccaatttaagcacattatcttaacatgaagataatacaattaatggtttgtttgtacagctgggaactagattttagtatgcaagttgggttgccgtttcatcaatgttaatacattaaacaatgtttgttttatagaagtatcacataaaacataaaactataagttcatgttcattgctctccagttcaggttatgtcaattactttttttttgtgatcaaagaaaagaattcattaatcacaagaacaaacaaattacaccagcaagtaactgctccaacaagcagaaacttcagttcagcattttgtaaagtaaactataattacaacctttcaatttcctatctttgagactatacaacctatgcttaacagtatattgaatttcattaactacggctgctaccgacaaacaatagtccttatacacacactgattcctgttgttccataagctatacacagtagctgccacagttgcataaagaatgtcctccttcactctacctgtttttatcttcaaccaatttcgccaattttcaaacttgctggaccaacccttaaacccaagccacctaaatattgcagcaatgattttcctggaataacagcagtcaaaaaacagatgcttgtggctctcgatctgcaacccgcacactggacagctagagtcagctatgaagatgttaaatcttggaagctgatctccagtgagcaactgacagttaacaacctgccagagaagaaatctgtgcttgggcaaggaaagcttacaccaaacagcactagtgttcaagcaatcatcagcattaatcaaactattatacaaccgggcagccttgattttacctgaactgcttgctgcctgaagcttctctgggctaaaaactgatctgagattgcagagtttcctccagtaccaactggtatctgtaggaagattgtaatcccagatatccactcctttcaagtacactgtattaacccacttaacccataaaacatcatgtttttcaatgactgcccaaacgaatttggctaagcttgcacgattc

SEQ ID NO: 61897 - DNA, 651 bp, Cannabis sativa
cgaatggaagtgggaagatataactatagacttcgtggtaggtttacctaagaccacaaggctaaatgattctatacgagtattagtggatagatttaccaagtcagcgcactttctgcctgtgcgtacaacctatactgtggatcaatatgttgatttatacatcagagaaatattttgactccatggtgccccaaagttgattgtttcaaattgtgatcccaaattaacttctaagttctgggagagtttacagaaagcaatgggaaataagttgaaatttagaacaacctttcatcctcaaacgaatggtcaatctacaagaactattcagatattggaagacatgctacgagcatgtgtgatagattttgaaagttcctggaacaagtttctacctttgattgagttctcgtacaataattgttgtcagagtaccattggcatggcaccttacgagatgttgtatagaagaaaatgtcgatcacctattcaccgagatgaagccagtgatagaagatatcttgggcctgaagcgattcaaaggactagtgaatccatcaaaagatttgatctcgtacgcttgcttcacaaagtagacagaaaagctacgctcatccaaagcgtagagatattgagttccaagtagga

SEQ ID NO: 61898 - DNA, 1155 bp, Cannabis sativa
aaaatttatcaattcaataaaattgaaagacacaactctacaataataatattgccgtggtagattagggtatctccaatcagactctaaaacactaaatataatacagattcacactatatttactccaatgtgatactaaaattatactcataaatgactttgtgtacagtgtcccacaaaatttagtggggcactgtagaccacactatttttaaaaaaaaaagattttaataattaaataatatttttaagaggaaaaactaaataatattatatatatttagtattaaaatattgttattatattagtaaaataatagaataataattaatataaaatttggtgtaatttttagtattgtgattggaattaaaaaaaaaaattagtgttaatatagcatttttttagtgttgatttaacaccaaatttaagttttaccattggagataaacttagttacattttaacttctcggatatttcatagtaaaaaaatattgaacaaaggagacagttaacaatgataatgatttaaggaaaatttaaaacaacataaaaaaaaaattaagaatcacgattaaaaaatggtaatactttgagggagaaaaattataggcgggaaccattttgttttttatttttttaaattttacttaacaaaatcttgtagtttcttcataaattttgattaattaatcaaaaattgatttttttaatggttaccgaacaatatctatatttgttcttttattcttcttaaaattgaaggggcaattgtatctagtatatatatatatatatatatctatatatacgtataaatatatctatataacgaggattgactgattgtctattgtgttgacagcaagatctgggtgatcttgcctggatttctggaaattctctactgggtaagtgtagttttttatttttcgtttttcattttggttgatctggtaatgggttatgatgcccttcacattgccaaagggctaatatttatagtgatgatttgctcctagaattaatatttacttgcatagtatagtgggatagttgattagttggagatggctgtaatgggatcatgttgaactgagatttattgggttttatgccctaaataaaactctttacaatctgattagt

SEQ ID NO: 61899 - DNA, 1204 bp, Cannabis sativa
aagtcagacacgacttgtataacataatgttaggtttgacccctcgaattgttataaaaattaataaatttatagaaaacttatcatattattttaaaatcatatctcatctgtataacatgatcctaggcttgaccccaatatattttgttgtatatataaaacaaatcaaataatgagtaaacaactcacttttataaataagtgaatcagcataattttcttttataaaaataatatattaaataaaatttattaattaataataagaaaattggtagaattgtatcttctaaaaaaaataataataataacaacgtgtgatagtatatatataatgtgttttcttaaaaaaattattaaaataatataaaattatcaatttttaaatttatgttctaattaaatataaaaaaaaagagagaattatagagagaagagaaaaataacttattaaaataatagtaaaatattaattatagatttatgctctaataaaatattaaaaatgagagatttaaggagagaaaagaaaaataattttagaaaaattttagagtgtcattttatgtatatatagattattttgtactaaaaatgtatttaattatttattatatattacaaaaaataaaaatatttttttgaaagaaaaatatttaaaataagtaatactaaaatttttattttttgttcagttttaaaaaatattttatgtttatattatattttcatttcaacaaaccgatcaacctagagtcatcttataaactacaattttttttttaaacaaaagtgataaaaatataatttaaaaataaaaatgcatataagtttatactatgaagaaaaataattaaaaacaaaatacaaaataaaaaaaattatttgacataattttttttatatatttgtgattataatgaactagattataatttaccacactcagctcagcttttttccatagttttgctacaactattttttcttacagcacagctacaactgttttttcccacaacacagttgtgccaaactagctctaactgtgcaaagaaaaataagaaaagtaaggcagtggtggttccaaatgactctttggctatggatgaagatgtatcagcaaagtttgtggtgtagacccgccaggaggcatgagtatttaccgaaattttcgaaaactaataaaatatgagaaagg

SEQ ID NO: 61900 - DNA, 1092 bp, Cannabis sativa
gagtctgtgccctcgaataatggtggataccattgttttccacagtgtgtagttgttgcgatcgagtttaagagagaacggttggtttagggtattgaatggttgagtgaaattgtgattatagacattagagctgctgctgtttccagtaacagctccatcgttactctggttagggttggtagggtggaggggagtctgagagttgcctgtagacattggtgaaggccgaattggctctgataccaagttaagttttagagtgaaatgcagaaatgaatttctcaattcaatttgagactgaggcaggacctttcattaaatagatattttccaatacaatggtaaccaatacaacagtgacaggtgttacacacagaatacaatgcataaccgaaaaagggtaggaatattccctcacgatgattacacaataacaacctgacatcaccagagaaaatgctatactgcagcagagtacagggaacagagtacaccctcacatactcacttaaggtttctaacaccacccctcaaacgaaggggtgattcttttatcccgagtttgtcaatgagaaaccagaaccgagtatgtgtgagacttttggttaagcaatcaacaatttggtctgatgaaggtatgtagcgaatgtcaagctcctttttgattactttgtctcgaacaaagtggatgtctatttcaatatgctttgttcttgagtgataaacggggttggaagcaagtgcactagcactttgattgtcacaccaggcaactagaacacttggtaatttaaatttcagttcagcaagaagagattgaacccaagttatttcaactgaaacatgtgccaaggctcaatactcagattccgtactcgatcttgagacaaccgattgctttttggatgaccaggcaatcaatgtatctccaaagtatacacaatagctagcgtcagatcatctatcatcggggcaacatgcccaatccgcatcagaaaaaccttcaagttttagcctttcactgtgtccaatgtgcagcccgtgatgcacagttccctttaaataccttaaaacacgctttgctccact

SEQ ID NO: 61901 - DNA, 882 bp, Cannabis sativa
atgagcagtttggaaaagacgtaatcagagaaaaagcactatcgtttggggtagaagaagatattggagaggtttaggcttcttgggaggactcttgtgcatatttatttgggaaaaggaaagagttgttatcattttttcttcttcttctttttgctgaagagaaaagattatgatctttaagcatttccttcaggttttgaactatatggtagtgtctctttcatttttttgtacggcatttctttttaacaagaacaaaggaaaaggtagacgattattctttattcattttatgaaagggaatagaggattattccattcattagaatttatgttattaaatttccttacaataaaaaatgtaagaaagtctagtatttgcccctaaaaaaaagcaccatgtggcggaggcgatggcgttgttccatggcctctctctttgtatccggttcaccagttgggtttttttttgaatgttacaattttctttgattgttttcgcttagtcatgatgtcattggtaaggaagttcattataatgacttagatgagtcttgtgtttggtggtcggggctctctttgaatttctatgtttgacctttgagctcctatttagctcctatttatgccatgacacttggttttgtgcctattaatggaatacatacgtttttgttaaaaaaaattgttcaattttaagaacaataaattcatagacatgtcctcattgactcatcttgtccctggtgtaaccgagaagcataatcaattgcccactgcattgtgggttgcaattttgctgctgcctgctggcggttttcaagtctgtctcatgacagcataggaaactcatcttttggtgactggtttcagcaacag

SEQ ID NO: 61902 - DNA, 660 bp, Cannabis sativa
tacctctgctcgtactcctttaactgccgagaagcatagactattacctttcaagtttgcataagagcacagcccagaccgtgtctcgaggcatcacaataaacaacaaacttttccttatgttgaggaagagttaacaccagaggagtaatcaagcgccgctataactctataaaagttttctcacaccaatccgtccaaacaaacttcaagttctttcgggtcagctacgttaagggtacaacaatctttgagaaaccctcaacgaaccgattaatacccagctaagcctaaaaagcttctaacttcagtagccgatttttgtgttggccaatatcgaacaacttcaatcttggccggatcaaccatgatcccatctttatccacaatgtgccccaagaaagagacacaagagaaccaaaattcacactatttgaacttaggatatagcttgtgatctcgtaactgttgcaatactgatctgagatgcaactcatgttcctcttctaattcagaataaaccaagatgtcatcgatgaacacaatcacacatctatcctggtaatccttaaatactcgattcataagatccatgaatgctaccggggcaattgtgagtccaaaagacatcaccagaaattcataatgtccataccgagt

SEQ ID NO: 61903 - DNA, 2709 bp, Cannabis sativa
tcatggtaaaaagtctaacaagttagagttgatgatccaacatcaaagtgttaccaaacttcaaacactgaatatcaaaataggcagcaaaattagaactccccatgaagcttttgaaatggttaacaaactgattcaccacttcaacatataatcatcaacaatttccccttgattgttcatgaagctagctattttattttcttctcttatttttttaatacatgcatagaagaaggttgtattatcgtcatttttttttcagccgattagcttttctcctttgaagtaaaacaatatgaagcattttatcttgatcacataagtgaataacaactattttcttttcctccaagatagttggcttgagcagctagcttagcattaaggaagtgatctttggccttttgaaaattaacctccacatctccaatagtctgcttgtataacttcttaagttgacattttagcctcaagcatttaaagtgaagagtcttgagacatgtctccttaactggtttatactaattctccaacaatatgtttttaaaatctttgtgatcagtccagaaattgaagaatctgaacgatttgacacaaatatcctgaataactgaagaatagaccacacaagggcaatgaacagacacagtttcccaagtcatgatagcagaagattttaaacgagcatgatcaacaacatattttggcaattccattgagtctgaatgtagctggggatcatttttcaggtctaaggagtatcatggtttctactcggtgcgtagtgcatataagttaatacaagctcaaaaaagaaattggattgcagctgattcttttgtgttctggcgcaagctctagaatttgaaggtaccaccaaaagctctcaatttggtacggcagactgcttcaaattatttgtccaccttgactcaattaagtggtaagagggtcctagttcaaatcatgtgtctggtttatcaaagaggtgaggaaactatttttcatgcacttatatcctgttcattcgctgctcaatgctggcagaggcttttgactggggtttaggtcgattggttctactaacttttgcagctggtttgatcaaattttgcaaaagtacagtaagtacaagtatggggatgcagttatgttgtactagaggctcgaaatgatttggtttggaaccaaaaatatgttgcggtggatggggttcttatctcatctatgaattgtcttgtgcaatggaagtcggcccataatagaggttcacatgcttctttttcaatttttaaagctgatgatggagctggattttgggttaagtcgtacgagaatacaatcagggtaactgttgatgttgccattattcgtgattgatgtgcgtttagttatagcatagtcgctcgagactctcaaggggaattagtgatggctaagtcaggtagttttgttggtataggtgctcaagatttggctgaagcgattggtataaagaaagcgctaagctggattaaaactcaactatagtagaaagtggagctggagtcagattgcttggtagtagtacaagctatatattcaaaatctattacctatactttcttcttttggggttattatagaaatttatcataaacttcttgcctctctaaacaatattttcttatttttttactaaacgaattgctaacatgcatggttgttcatagtcttgatggagcatcttgtttttttctagatcgagtagttggggtacaatcttgtttttttgactgatttgacaaattaataaaaacttctatatttactttcaaaaaaaataataataaccacgtgaaaaaattctattatttgatccagtaagaagttaaatatttgatataaataaaaaaaaaaatcagtaaatttgtctcctttaattaaaattaatatagaatgttaatctataatacaccagtaattaaaatgattattctggtacatgcactttatgggtttgacatttaggagtttttaaatttaatttttttttatatataatagtgtgtgttatacttttttaagataacttataattttttttttaaaaaagtaaataattcacttacttgtgtcgaaaataaaatttaaatacttaattactatgcgtataagaaaaaaaataactcgtgtaataaaatatttgaacaatattttcaatactgtaaactattcaaaattttcaaaaaatattatatatctaaagggcgtgtttggaagtcattatgtaattaccatgtactatatttaaaatatgaggtgtatttgaatataaaatggtaattatatgaattcttaatgttttgttcagccaaatagttagtaatacatacttaggaaaataatattttttagtaactaatatttaaattgaaattttttgaaaattatacttaattctcatggggctataaaaattgaagagtgtgattggaataagtgacagagccacttggggagtatgcggggctacagcccttcttaaatgttttgtttttatgaatttttatatatattaattatgtaaaaaaaaatatacaagtttattaatttacctccccaaaaaaatgaattgttctatattttgctccccaatttacatttctctctccgccagtaattagaatccatcaattactccaattacatagttacattttattt

SEQ ID NO: 61904 - DNA, 576 bp, Cannabis sativa
cttttctggaaatcttggagattatctgctccttcttattgtagttcattccaaaaaggagtccccgtgcagatcccagcctggaggagggccagctattttctgtcatctaccttcttagtctttaagcctcttctttgaatctttttataaagttctttagagtttccaaaggtaattgttttatattagtcagggcgctgacttcaaggttaatttttctcgccgcgataaactatctctggaagctgacttgtagcttgctccagcagtccactgatcctggtttcaacttcttgaaccattcttcagcagaaccgctcagcgttagtggaatctccgatgtaagttgtcattttgagcatcttaaagttcttgggaagctctgcatccagtatgtgttgagcgcatggctctcggtcctcacaatcagagtctgagtcatcccttttttgtctccgggagaccctagcaatgtctttgcgtagtattgccaactcggccaggattccctcattcaacgtgtctctggaaattggcaacgcatgttttttcttgtcaagatggtctcttaag

SEQ ID NO: 61905 - DNA, 688 bp, Cannabis sativa
cataggcatcaagattgaaaatgaagatcagaccataattgtcttgaattctttaccttcagacaggtatgaacactttgttgatacaatgatatttgcaagagactctttgccatcggaggaagtacaaagtgctttgatgtccaaagagttgaagaagaaacaagaactaaaggaggataactctgcatatggcttactggtatcttgaggaatatttgattaaagagagaacaagaaccatggaagattgaacaaatgaaaatatatgtcaaagtacaagaaaaggtgttacatttgtcataagacttcacatctaaaaagggattgtccagaacttaagaaagagatcacaaaaggtatggaagtgcatatgttgcttctgatgatggatatgaaagtactgatgtaatggtggtggccaaaagttctgtgaaaactaactggctaattaattctagatgcgcatttcacatttgtccaaataaagaataatttcttaattacaagaaaattaatggaggaattgtgaggctttgggataacagatcatgctcaataattggcattggattagttcaattacagttagcagaaggaactattatgaagattcatcaggtgagacatgttctagagattaaaagaaacttaatttctgcagtatcgtgtctgacccgttttgccg

SEQ ID NO: 61906 - DNA, 2572 bp, Cannabis sativa
atatatactctaaagggctaaaaagcgtaaaatgtttacccaagaaaacgacatgtcgtatatgtactctaaagagctaaaaaaaagcccaaaatatttaatcaagaaaacgacatgtcgtataaatactcttaagagctaaaaaattataaaatatttacccaagaaaacgacatgtcgtatatatctctaaagggctaaaatgcctaaaacccccttaaaccttggtcggagggtctccgtcgtccaaagtccaaaactttgggggaaaatcgttgttctaattagggtttggatttggggccaattatgactgaagattcgaaacatccattggatacagtcgaatcaccaccccaaagaccttcaaagttggctaggaccagcgaagaagacgacctagaactagaagaagacgaagtagaagggggagaagaagagtttgttcctgatccccaatccatgacccaaaaccctagaaccaatattcagaggtatctgatcgcaattgagtacattgggactcgcttctctggatctcagcagcaacccaaattcagaactgtcgttggtgctcttcaggtcaacttttttgctttactgatttcgaagatttatgtatgtagtgattcaaagagcttttttttttatgctttttgtagctcaatcctcgttcaataagcatagaatgaatgttattggttgaagtatgtaaaacttgaaaagtttatggatttaagctcttcatgttagatagctttgtgggtaacttgagtttgaaggattgtgtagaatctacttgaaaagtttatggctttaagctcttcatatcatatagcttagtagattgacctgggtttgaatggtttctgtagaatctgtaaaaaaagaaaaaaattgaaaagtttatggctttaagctcttcatgtcatatggcttagtggattgaattgggtttgaatggtttctgtagaatctgaaacttgtaaagttaatggctttaagatcttcatgtcatatagctttgtggattaacttggctttaatggtttctgtagaatctataaaacatgaaaagtttatggctttaagctcttcatgtcatgcagctttgtgggttaacttgtgtttgaatggtttctataggaggcgtttcgaaaatttgttggtaaacctgtatcagttttctgctcaagtcgaactgtaagtttgtcccttgtttgatctttaacctcagtattaattttactatcacagtatcactaaactgaagaaacaacatttagtttctttggtttcgcttcccttttctgatgaatatgttgtttcgctattgcaggatgctggagtgcatgccttatcaaatgtttgtcatgttgatgttgagcgcatgagcaagaggaagccaggggaagtggtatgatgacagtttatttaatactcctttaaagtcctgataatattttaaggccttctttgcaatgggttagtgcttttaaagtctaattcacatccgagggaaccaatgaggccctcttctcaaatttacacccaaacgtcttagccgtgaagttccttgtcatcaacctgattctctatcagttaagcttatttatgaaactgcaaccatatttaacccagcttttggtgattgtgtcatttttgtttgaatgcagttaccgcctcatgagcctgatgtggtgaaaaaagctgtgaaccattttttacaggtacagtcttttaccatatatgaccaccgtcttataaccgaaacagcctcatctgattgtgaacagctttggtgaattagctaaccgagcaaccaaatgagttgttaagaaagtttgagctgaatatgtccagtgaatcttgtgatggttgtgcgatcattgatttgaatttaatatttccatgatgttaaattgatttaagtctcagaaattttgacaaaagttcaagctggttttgtgtttaagtatacatgcttcaagagatggattaatagttatttatccttaaaatacaacttaaattgtatctgatttaaatgcctattgtttgttttgaattttttattaacggtccatgcattcattgaatagtaatgaaattcagaattgttgactttggcacatcagaaaaatgaaggtgacataatggtgattgacgttcgctgcattccacctgattttcatgctagacataaggctcaagagcgaacgtaggtactcatagatctacattgttatatataatgcattaaggagcagatctacttgtaattattttgtttatttacttaaaaaaaagtgcttttcaggtacttctatcgtttgttgtctgggccagagcctttatcaacattggagaaaggccgtgcttggcatatacccgaggagcttaatctcagtgcgatgcaggttgacattttatctcttattatgtctagtaatgttgttttatcatataaatatgtttgcttatcttcattgcaggaagcttgtaaagttctagttggtcatcatgattttagcacattccggggatctggctgtcaggttctttcatcatc

SEQ ID NO: 61907 - DNA, 1787 bp, Cannabis sativa
tacgcaagtgttgaaagtaattgacttgactaataccttacatggtgtttggtggagtagtataagggaaatttcattaataatacatgataaaattcctaatatcaaaatatatactaactactaatttgtacaaaaaaaatgttattaatttcttaaatactcaaaatacttttttatttaattttccctccctgactgtctctctcttcctattctatcttttcgtcgttctctctctccaccacaccaagaacccaaccggtgtgataaaaacccaacccaaaggcctaaagtatcatcccctccctctctctcacatctctctctctctctctctctctctctctctggcgacccaacgctcaccaccaccacaacaatgaagaccacaacaagcgacccacgacgaccacgaccacgaaccaccgacagcagaccaccaccgagagaacccagagtaaaactgtcgccaccaccaagcttagtaaaaacgtaagtttttttttaaaaaaaataaaaaatcaaatttttcatagatttggatgcaaatttgtgtatgttcttcagattagttgaatttttatagattttagataatgtgtgttctttagtagtatttgtatatttttacagtgttaacgatgagatatcgataggttatcgatataatgtcgacaaaaattaaaaatagtttgagcatcataatttttctattttattactgtatatcgataggtgatcaacattttatctatgatttctcgacattttgattaggatatatttgtaagaatttgttggttgtatcgatattttgtcgatgaaatgtcaatatgttgtcgataataggtctttgtttgaacataactagttttaaagaatatatcgataggatgtcaatgggatgtcaatagttttccgacaatttgagaacatgttatggttgtcgatataatgttgacagtttgtcgacatgttttcgacaccatatgtgcaataattatctaatgtaatttatcgataaattgttgataggttatcggtatgttgtcgacaatatgattttattgtattctgtcatttctaagtgtgatgatatcgacagaatgtcgacattttgttgacaatattctgtgagggcatcaataatattttttgttatacattttttcagatggctccacgactcatagttccaacatcctagcattttactggtcgcgtgacatatagaggcaccggtgcttttacaaaaatcaagtctcaatttgaggagtacaatttgaataacacgacgaaaaaaatggttttgccaactgttagattttttttttgttgtaatttacttggttagttgtgtttactgtgttatatattttagggtttaaggtttaggtttaactgtgttatacatttgtcgataagtcgataggttgtcgatagggtttagggttagttctaactgtcaatgtcaaaatgctttcagctttataaacccaattaaaaccctcaacagaccaaacaccatcgtaagatacaacaagaaacacagtcgatcctgtattttcaaacaaaaaaaggtaagttagggaaaaataccaaaaaataataaaaaaactaaaaaaggcaaaaatttaacatattcgacaaacctatcgacattccatcgataagaactgtcagttttaatgtttatttagtctttacttatgtttaaaaaaattcacttgttttctagtcaattgtttaaaagttttcattttttttgtcttaacgtcgacaat

SEQ ID NO: 61908 - DNA, 1162 bp, Cannabis sativa
taaattaaattttgaaaattacaaattacaatctaattataattaatatttaatattttttatttataattattttaaaccctatttattatgttaaagttacaaaaatttcaaatttaacttcaaatctaatttttattttatttacttatttattttatgattaactaaaattttattttttttatttaatttcaaatatataagataataattttttatttaatttcttttcaaaaataataattatatctaaaaaaaactacaacatttatcaatttatgtatatgtttatctaaaataattactgtgtgtaattggtaactactcttatcttaataataaaagtgcatgggttcaatccttaacaacaacatattttcctttatttatttttttttttctgtttttcaatttagagttttactttctataattttatattaattaatcttattttttaagattataatgttcaatacattttaaatttctagatataaaattaattatttacttcaattacaatacccatataaatcatgtgtgaagaactaataaaatagtacacatttttagtataattatatcttcttctctccaatcaacaaatatatatttgtttcatcctatcaacaaaatttaacaatgtatgtgttttgtttttattcataactatcatattttgacaacacataattcattttatatttaataaatttttttctttttaaattattcataattggtatttatatgtcatacacaataaaatataaatttacaagaatctatttatataactaaattattgtagcacatttcgtaggttcgtctaattctagttaagtgacatttgttcaatcatttacatattcactttatagttttgtttttatttattattattattgtatttgaataattttttgtgagattataatacacttttttttttatctttttattttgtgcattggagaaatttaaaattatttaattagctaaacttttcaactaaatatgtgattgcttttcggaaccacatgtttagcttagttgcaaggaagtgactatccgacctgaatgtttcattcgacattgcttatgggcagattgaacgatctacttggaccaagtgaatgtgcctattattcttaat

SEQ ID NO: 61909 - DNA, 1036 bp, Cannabis sativa
ataacaaatttaacaaaaaaataatttagtttaacacaagatatttttatattaataatatacaaattcaattatcgttttcagccaaaatgcccacaaatccaattattattcccggctacttatccgtaaagttacctcagagcatgaattcaggttacaaaaattatctttatttcacattcgtagtacgatataataaaaagaaaaataaactaaatttttttctagaatacttaaataaattggagtgtatcatatacatataagacaaatataccataataatacaacacaacattattgtttgttgatagatatattttcttttcttaccaagaagtactcaatttttattattattattattattaatgtaacattaatattaattaattttattttactatatttttttttaggtacaaagcaatccaataaatcatctcaatcatctcaaaggattttcccattaatacgtgagttgaaatatactgtgtagtgaaagggagggtgtactattgcagttcatttatctaagttgagggcaatgtacattgctgaaaaagaaactcatgcatcacctccttcagattgattgaagaattttttaatgttgttgtttttgcctatatgttgaaggtacaagcttgttgtttcagtgtcagaacctaaaaatattgtctcacccaccataacaaacattcaggtacttgaatatttcatttattttatatattccttttcctccagtgggatagagttgttttcttgttggaaataacatgcagttgcagaatatcgcagccttaacttccaaatattaatctagagtgcaaacaatggttacttgtgttgttgggagacccattttgatgctattttttctatctcaagtactagttgttattaggaataggaaggtagttgtcgcaaacaattgttattggtttttttagattgtgttgctattccaactatatgaacaactttcttcagttgtaatagttcagtgcaaatagaaccttgcttgagt

SEQ ID NO: 61910 - DNA, 1327 bp, Cannabis sativa
tatttaaagacagttaaaggtaaacaggtaacctcttttctagaagctgctttacttagtggattattagaggctgacacaaatctagaacaatgtttatctgaagcttcatcatttaatatgccccatggctgacatcgtttgtttgctaccatcttagtatattgtaaacctactaaccctaaagagttatgggaaaaatttgaacaaccaatgtctgaagattattatactataacgaacaccccatctacaataagaactaatgttctaaatcacatcaaatttattctagaatcaatgggaaaagatatcaatgattatagcttagttaataattatataagtgataacgaaattgataaacaatataaagagattaatgaacaattagcaattgttgttagcgaagatgacatattagctgctaatttattaaatttgaaactataaaaatgcatttgacttaatattaaataaaattttcaacaatcaaactggccttttctttattgatggtcctggaggaacgggaaaaactttcttgtataagattattttggctccagttcgctcaaaaaaaatgatagcactagctgttgcatcttcaggtattgcaacttctattttacctggcggtcgaacaactcattctctatttaaaataccccttcacttagataattatagttcttgtgcagttagtaaacaattaggtttaagttaattattacaactagtaaaacttattatttgggatgaggcaccaatgtcaaacaaagaagctattgaaagacataaataattctactcttctttttgctggtaaagttatagtttttggaggtgatttccgtcaagtatttgttgttcctaaaggtacaagagaacaaatgattaatgcaagtttagtaaaatctcagttatggcccttatttactaaaattaccattaacagacaacatgcgtgcctgacaagatcccttatttagtattatttattaaatattggcaatggaaccgaccaactatagatggaaagatacaactactctcatcgatgattttaccttatgaggatgatgatacttcgctaaacaacttaatagatttcgtatttccagatattaataactacacagaaaatatgaatataatactcaatcgcgtaattttaattccaaaaaatgagtatgttgaccatattaataaaattcttattaatcgatttgtgggtaattccataaaatattatagttttgatgaaaccatagacaaaaatgaacagggagtacaagaagactttatgaatagcttaacaccaagt

SEQ ID NO: 61911 - DNA, 2597 bp, Cannabis sativa
aagtccaagggcaaagccgttgctagtgctaaacggtctgcctttatccctcactctgttatggtgggagactctctcagaaacatcctcaaaagagctcgtgctggacctgtgatcaatgaagcttccaatgctgttgatccctcttttcaacaggcggggttgctaccccgcccagaaaaatgagtcttatgagttggaatgcccgtgggttagggagttcccgggcattccgtaatctctcccttgttgttaagaatcatagacctagtttactttttgttatggagtctaaactgttagctggtcactgtgacaactttagaactagactctcttttgatagtgcttttgaagtccctaggtgtggtcttagtggtggtcttttgttattttggactaatgatgttaatgtaaatattttaaattactcctccaatcatattgactgtattatcacctttgaggacaatgtaactactcatatttcctgtttttatggttctccttatgcccgtgataaaatacatacttggactctcttagataggctttttgataatgctcctcaacttccctggctagttttaggagattttaatgattacctatcggttaatgatagaagcagtacctcttctatacctcattatgctatggttaattttcaagcttttgttaataaatactccttagttcctatccactttgttggtaataaattcacctggaaacatggctcaatttatgaacggtcggattgggggattgctaatgataaatggtttcaccattatcctcaagctctcctccaccaccttggtttttatggttcggaccttagggttttaaaggttgttctgtctgatgatagtatgtacaaagttaaaaataaaaggttcctttttgaaaatcactggctcactgagccctcttttttctccacggttaatagttcctggtcttcctctaactccaatcctagtgcaaaccctttgttgaactttcttaataaacagagcagttgtatccatgccattaggaattggaacaaatcctataatagtttatcctataggattaatgaaatagatggtcaactcagtaacatttcttcctctcttcttgcctcccctgagcagttgcttgagatttctaaccttcaatctcagcttgatagccttctttataagcaggagatcttctggaaacagagatccaaagtccattggcttcgagctggtgataagaataccaagttcttccatcagaaagcttcctctcgaaagaaaactaactttattaggaagctcacccttgaagatggcaccattatctctaataattctgccattaaagctgaagtctgccgttttttctccaatctgttccagtctcagggcagcagtatagatgctgttaatctgcttctctccactatcaactcaaggcttacttctcagcagtttgcttttcttgatgcccctttcactgctgaggaagtcaagtctactttgtttcaaatttctggggataaagctcctggctctgatgggctcaatgcctatttttatcaaaaaaattggagcattttaggggggtgatttgtgtgatgcaattctgaatattcttaacaacaatgctagcatggtttgtatcaataaaaccctcattgtgcttatccccaaaaaacaaaatgcttcttctttgaaagacttcagacctattagcctttgcacaaccctttataaaattgtttccaaaaccattgctaatagactcaagtctatcatggaggatgtcatttctcccacgcaaagtgcgttcctatctgatcgtcttatttttgataatattctgattgctcaagaaatgatccatgccattaatcataggaaaactggtaaaattgggtgggtaggcatcaagctagatatggagaaagcgtttgatcgtgtagaatggaatttcctttcggctatccttaaccatcttaactttcctaataaaattgtcactctcattcatcagtgcctttcctctgtgtctattaagtttagtattaatgggagtattactaaggaaatctttccttctcgcggtttaaggcaaggagatcctctttctccctatcttttccttttgtgttctgagggtcttgcagctgccctttgcattcaaaaacagcttggaaactttgatggtatttcaattgccagatctgccccggcagtttcccacttactctttgctgatgacactctcatttttgccaaggctacccattcttcttgcaatgctcttcaagctgccctccagctttataatcaagccactggtcaatgtgttaactttggtaaatcatccattttattctccccaaataccccccctcatgtctcggatcatttctaccagactcttgggatttccaacagacccttcatgtctaagtatcttggggttccccagtgttttggaaggtctaaaaaaaacagcttcagcttcattctggaccgtgtcagttccaatctcagggtttggagtcataagttcttctcgaaagctggcaaagaagtccttttaaagtccgttat

SEQ ID NO: 61912 - DNA, 587 bp, Cannabis sativa
tcctcgcagttttgcagccaaagctatgctgcagcatgattaccactatattttggacaaccataacaggtgtgataatcgtagaaaacaaagggaaaaaaagaagaaaaagcaaaagcccatttatcatcacaactttaaatgttatataggacatcaagaataggatcacacatttttcagttacaaaatatgcatgtgaaacacttaatgagcacagaacaaacctgctgtgggtgataacccctttagcagcctgattatcattgagtgaaaacacagcattgcaggcacctctgaacttaaaagctccactgcatagagatagagaggaaaagtttctatttttcagcttaaaagcaatgactaaaatgcatcaataaggacccaattaccaaacatcacttggaaactgtttctaccatcaaagcccctcaccccttttgataaagttcacatttgaagtaaagcctccttcctgaaagagcatctaaagattcagaggtaaaaacaggagttttgtgtatgaatgagctgatacgagcttgtgcttccttgattgagaaaatatcagcagcatatttttc

SEQ ID NO: 61913 - DNA, 1583 bp, Cannabis sativa
atcacaagttgaaaataagggcatggttagttgctatcatcattcatcaccatacttaattaattagtactcttgattcttgaaaagtttcgtgaatgaatggtcaatttttttcaggtatgttgggattggttcatgtactaaatcttatgcattgttatcacctttttttttatatagacactaaactaatatatgcactcctctctaagaatgtatgcataggtagttgggcacaagttaaaaagagagatttcttgaagcaaagaatggagaaggtcaaaaatattgattctcaaagaatatcacaaacttgtgtataggaattatgtttaggtaactttttaatttatcccattccctgttttgagatctacgacattaatccacatgtaacacttttatgttattatctcataacactacgaaaaatgttaataatcaacatttgaacactacgaaaaatgttaataaataaaaaaactaatatatttatgagtatgtataatagtcatcacttaacaattcagtaaaaaaagaataaaaacacctagtgacatttttacttatttgggttatggtacttatttgcttccaaaatctccaattgctgtaccacttcaatgatgttaggacgttcctctgcatcatttttcacacacaagccagccaattccaatacagattccaaacaatcttttgggtactgaccagaaaggcttagatcagcaatatctatcagatgatatttgtctttcattatggcttgtacctaagaaaaatcacaaaaacataacttaactaaggcatttttccaaagaaaaagaaaaaggtcattttggaaaaactctacatacccattgagtgagccatattatttgaccactacggctcctcctattgacgatggcttgatttccagtgatgagatgaagcaatagtactccaaagctataaatgtcagtcttagtggacaatgttctatttgcaatgtactctggagctgagtaaccaaaattagagcccatagccctattggatctagcccaactttggatattgatattaatacttggaagcccaaaatcagtgagctttgggttaaatccttggcccaataatacatttgatggtgttaggtttccatgaatcactggtcgatttgtgccattatgaagatattctaatcctttggctacacctaaagcaatcttcattctgttgttccaatctaagggcctccttcttcttggaaaacggtctgttgtaatcacttgtaaatattatggtatttttcaaaataatggcatatttagatatagttgaaaagaaaaacaagaagagtagtaagtgttaccaataaagagatggtcctttaaagagtataaaggcatgaattcataaacaagaagatgaatattcccttgagaaaaatagccaacgagagtgacaagattttgatggcttagaagtgaaagcatgtgagatttaactagatactcactctctccaacccttttaactgctacaacctttatcaattaaaccatatatatatatacttttaatttaattaatgtcaa

SEQ ID NO: 61914 - DNA, 11513 bp, Cannabis sativa
  modified_base (11487)..(11487): a, c, t, g, unknown or other
ctcccatgagaatttgctgatcacaattgagatcagtagaacggctgagattctgagcatgaggtgttaggtgatgtgttgctccagaatcaggatactagcaattgtctctaagaacttcaggatatgcatatgtgtgttgagcttcggcaagactagcactactagaaaatgattgagaaaattcaggcccttgataagttctatcaaacctgtagaatcattgctttactgtatgtcccaacttgtggcataactaacattgtaccttttgaccccagacagtgtattgtccccatccatgagagtagacacctctagaatttgatggattcccacacacatagggagttccacgaccttgagtaggtggtctaaaacctggtggagcatgtggaaccgaatattgtccaggattgggatagaccctttggacataagtgaaacattggagtgagtagatgatggatagtacggtgaggagaaagtacctcgtccaccagtaaaaggttttgtatgtgcaagattggcttttggcttggcaatgtccaaatcttgagtagccttcttgagtcaaacctcttgagccattaagagagctttgatttcagcaacagagtaggcttcaattctggtgttagcagaggtgataaagacattgtaatcccttgtcaagttgttgaagatagcttctctatgctctgcaggtgtgatttggtaaccaatcaaagcaagaagatcaaatctcttgaccttgaggagatagtcacttagtgatccctgtatcttggcatttcaaagcaaagttctatattggctgatgttttcacaattaagagcagagtagtactcatgcaatgtattccaaatctgagctgtagtgttgcaaccaaccattcaagttaagattttctcttacattgatgagaggagccaggagacaagaacactgtcttgttgatcccaatcttcgtattcaggactcaatcgattggcaagacgatctgcttttgtattgagtttcacaggagttgtgttgaatcaagaaatcgttgcaactatgctcctttgatcgttgcaaagacgatgtttccatggaaggtgattgtgttcatataatctaactgagagagaatatgagaagatagtaggagaggtttttggaagagaaggatttgtgttttttaacaacttgagacgaacctctagggccatgaacgaacgtcattgctaaatgaaatcaactctgataccatgtagaaactttagagagagagagaaagagtttgtattattgattttttgttgagaaattacaaactaaagccaactacatatgtatatatatagacaaagaggcataaagccttataactgaaagttagttaggatcgtaactaactaaccaacacataacaaacttaaagtaagcttaggtgatagttagactttctagactaggttccctaacactcccattgggtgaatagtgtaaaagggaatcaaaaatatatttttataatcttccccttctcctctctctattattttgtatatccatgctctgagttcttagctcgcagggtatgggtaccgagattgcttctcgatcgagaaacaattgattcatatacaaggagcttgataagtttgacttccaaaagtgagatcaaatatgaaggcattccttacaatatcaacacgaagagtccagtattggactcagaaatgggtttttctatattccttactagctaacttttatatagtatttagtttttcatactttgagtaattcttcaatttcaattttcctctattttgtagaatttaaaaaatatataactttttgctattgtagggtttgaaggaaatctattattgctttaataaaacaatcactcaatcaatttaagaaagggtaagacatagtggataggagcagaggaagaaggttggtcttgagtcttgacccattacatgggtatgatgcattcgatattaaaggtttatttaaagaagttttttgtttccaattcagaatgtgctaaggtcatcctcagggtttttcatcgtaatgatagccttattcacacccatcacatatgccgatgagtttagtaaagtaaccgccttttggtctaccaagctatgccaaaataatagtttctacattcttggcattatgagattttttagggtcaaacataatcgttattcgcataaaagacagttctgaccaatgtataaaatagggacttattcccagtttcaataaaaaaaattgagaaatataatcaatataagatagtctagcctcaactttcactttgttatttggtaatttgttttttctgttctaaaaatttgactttattgctcgttttgggtccattagtaaaaatgctttttttccatgagtgtaatttcaatggatcacttcagtagctactgcacgtacccaattctatattcggtttaattctttcctctctaatgttttagtaatcaaattagggtcaatgaactttttttcttctactatatatttgaagaattttgttactttcgtggtttttgatacttatagattgtttaatgttgtcggatgtagttcttatagctttgaaggtaactcttacatgtaaggattggccatcaccactttaaaatgattggccatcaccttagattcaatcttgtagaccatattacacaaagagattggccttaagtcccctatcttcatagggttcttattttttttttttggaataagaacaatattggtatcgttaatgccaactggaagctcactcgaagagaaaacttgttgaactaaccttaccatatccgccccataatatatcaatatttctgataaaacctcgaactcatcccattaagacctggagccttctcctaatgcatttgaaacaaagccctacgaacttcctcttctgaaacttgagaagctgaaccgaaacttgaatatgattaagcagtttaccccactcggcatcagaggcagtaaaaagaccttggaaatagtcttttactaactgaggaagcccatcatcccaagtaaaccaatcacccatgtcatcttgtaatttagaaatataatttgtccttttacgagcactcgccaccacatgaaaataactattattatcaccctctttcaactagaaatgcttcgccctttgcttccaaaaaatttctttttgagttagaatctcataaaacttatactgctcttcctcatacaacttttgtgaatcaacattagcttttttgatgaagctgccttaactgtctcttacactgcatcagcctctccttaaaacacccggtgacactcttaccctaatctcctaaaatcgccccacaactagagattttctcaaagagtttcgcttccaacctacccttctaaacacccctcacgaactgctcacacataggctcccgtaaccatgagtttttaaagttaaaatgcttaacacaccgagaaataacgtgaatacacatatctaagaaaatcaaagaagtgaaaaaggtattactttgcatgaaaaatggaaaaagagatacacaattgactcataaaaatctttataaaaaaaaaagaaaaaaaaattacataaaaataaataaataataaaagggaaaataataataggacccgaattccgaaggagtccacatctgatctcaccctaagactctctattttcatccctaaatttcccaaattcaccattaacaaccctctgctcgacctcatcttccacttcctcctcatcgtcttcacttgctagggtttctggagactctccttcgtctttcacattaggtatctgcttatttttaatatttttattctccgactttttatttatttggtatatgtatttttctgcagtaaaacctgatcgtccatctgattttcgcgtttctcttgatctttttgtgtttgagcttgaatttatgtgagttttgattagcatcgtccttcgacagaaatttagtttgcttcgggatcttgggttttgttacagtgattattagtgtagcgctttttgaaaatttcgacctcgttttctaaagggtttagggttctctggttataaggttgggggaaattttcgcaagtgtttattctattgattacccgagttccgtcgcattatttgaactttgtgttttcggttttggttgattaaaaatgattttatgtcatcatcttcttcagatgtagggttggtttccgggaattagtaattgttgattggagtgtgacaagatgacgatgaatgagcggaagaccattgatttagaacagggatgggagtttatgcagaagggaatcaccaagctgaagaacattctcgaagggttaccagaaccacagttcagctctgaggattacatgatgctttatacgtatccttttctatgatgtttgtattgtatttgtagtttgatataagatcgtactttgtttgttccaaagtacaattttttaattttattttatgggggtaattgcacttttgttgttcttaacattctctatagaacgatctataacatgtgcactcaaaagcctccacatgattactcccagcagctgtacgacaaataccgtgaatcatttgaggagtacattacatcaacagtgagaaaattttgatacctttgctttctttaattttgtttggacactttatttcaataaactttgattaatcgtctggaattatttgttcagaatctttagaagtttctaatatcaatttctgtagttaactttatgtcaaaacataatttgaaatgcttataaaatgcacataaacaaatatgtgatagcactcaccttatataaaaagttggagaagacgctcattatgaccactaaaatactcactaacatactattcctaccatgtcaaccttttttgttctttttaactcaggttttgccttcattaagagagaagcatgatgagtttatgttgagagaacttgtgaaaagatgggcaaaccataaaattatggttcggtggctctctcgtttctttcactatcttgaccgatactttattgctcggaggtcactcccaccacttaatgaagttggtctcacttgtttccgtgatctggtaattcatgacacaactttcttattatttttgtagattgttacaattacttattttttaaattgatcactgtgtacatatttgatacaagacaagatttttataattattatttatttaatttatatatatataaattttggacttttgaattctaaatagaagaattctgtttgttacttttatttcattttgactagtgaatattaaataacacctgatttcattgtgttattcacttttttggtagagatacctaatatcatgtggacatctattatggttttcaggtctaccaggagttaaattcaaaagttagggatgctgtgatttctctggtgtgtaataattttttcttaaactatttagttagttagttttttttttttttttttaataaactttgaagtgaggggtgatattttattttatgttttaaaaaaatcagattgatcaagaacgtgaaggagagcaaattgaccgagctttgctaaagaatgtcttggatatatttgttgagattgggatggggcaaatggatcactatgagaatgactttgaagcagccatgcttaaggacactgcagcatattattctcgaaaagcttcaaattggatcttagaagattcttgtccagattatatgcttaaagtaagctccattcatttgcattaaatctgtgcaaattttaaattttttatgttcatgtaaatagtttctgaagcactttgctggaaactccaggctgaagaatgtttaagacgggaaaaggatagggtttctcattacctgcactctagtagtgagccaaagctattggaggtttgtgattttatactttagttatataattatatttcttcttcaagtgaagaatgtcttaatagtctgtctaatttttaattgttatgaacttttgtttagaaagttcaacatgagctgctgtctgtatatgcgactcaattgcttgagaaagagcactctggatgccatgctttacttagagatgataaggtacttctttggctgaaccacttgttcctgttacttagttggagaaatcagttaaataaatgatttttgtctgtttaaggtggaggatctgtctagaatgttccggctcttttctaagataccccgaggcttggatccggtttcaaatatttttaaacaggttttcatgctgcactcatgacatttttaattttgtattcttgggtcgtcaaatatattgatagttgtaatttgttgtgagatgtatatgattttttctttatctatgatgcaattttagcatgttactgctgaaggaatggctctagtcaaacaggcggaagatgctgcaagtaacaagaaggtttgtctcttaattctcttctcgataactatatcacacaagatgatgcctaaagttgttacatacttttttccctctagcatatcatggcggattgaaagaattctcagtactttgacaaatctgccaaaagctgtgaaaactttatgaatattgctttatgcgttagctaattgatttggggtttagtctttacttttgagttagctagccttttcttttcatgctagctagatacctctttctttcttctgtaattttgtttatcagtgattttattccttactttagtttgtactgattagctgtattttccatggtcccaaccaattcattactgatgaattccaattattttgtatctctacaggcagagaagaaggatgtagttggtctgcaagaacaagtacgtagtatattatttagggtttgtttggtatccagtattacatcgcatcatatagtatagcgttatatgacatgtttttattacacatacaatacaagttaataccaaatatagtactgtataaaaacatgatacacacactataatactatacaatgtaatacagtgtaccaacagacaccttatagggttagactgtacacactttttcaagctaaaactaatgtgccttctgttattcaggtttttgtcagaaaagtcattgagctacatgacaaatatctagcatatgtgaacgactgtttccaaaaccatacactttttcacaaggtttgtgtattaacctgcttgaaggctatctggacactttttctgactcctgttcatattatctaattgttttattttttatttttgttctacaggcccttaaggaagcttttgagatattctgcaacaagggtgttgctggaagctcaagtgcagaacttcttgcgacattttgtgataacattctaaagaaaggtggaagtgagaaactaagtgacgaagccattgaggagacactggaaaaggtgtgctgcactgttcctttgctatattatttatcaacttgtctggacttgtagaattttgccattgatttattttttgaaaaccaaatctgcaggttgtgaagctgctagcatatattagtgacaaagacttgtttgccgagttttataggtattaattgctgtcaaactttgtcgttttattttaagtttgttcttttacgagaggggaggaagggctggattgcacttatataatgataatatttgatgattttccttagaatagatgttagatgactaatcctttatcatgttttacaggaaaaagcttgctcgacgtcttctttttgacaagagtgcaaatgatgatcatgagagatgtattttgactaaactgaagcagcaatgtggcggacagttcacttcaaagatggaaggaatggtaggttgcattagatgctcattgaagtatcttaagattggagcctctaaagtgctacttttctcttgtaggtgacggacttgactttggcaaaagaaaaccagacaaattttgaggagtatttaaagactaatactcaagcaaatccagggattgatttgactgttactgttttgaccacgggcttctggccaagttacaaatcttttgacctcaatcttccagctgagatggtatattgcaaatgctaacaacttctccctcactctcaaccttgtaagcttatttttctatgtgaattgctaaggttttatctgttttgtttttaggttaagtgtgttgaggttttcaaggaattttatcagacaaaaacgaagcacagaaaacttacatggatatactccctaggaatttgtaatattattgggaaatttgaaccaaaaaccatggagctgattgttacgacttatcaggtaagcttaataattcataaatccggtatatttctttgttatgttgtccagttggtaattttaattttcttctttcaggcttctgcgttgctgctattcaattcctcagatagattgagttactctgaaatcatgactcagttaaacttgaatgatgatgatgttgttagactgctccattccttgtcatgcgctaagtataagattctcaacaaggagccgagtacaaaaactatatctcctactgattactttgagttcaactccaagtttactgacaaaatgaggaggatcaaggttggtggatatcttttttctttccttcatctcttatttcattcttccgatccttatgatataacacacagatccctctcccacctgtggatgagaaaaagaaagtaatcgaggatgttgacaaggacagaagatatgccatcgatgcctcaattgtgcgcatcatgaagagtcgtaaagtattgggtcatcagcaactggtgatggagtgtgtcgagcagttgggtcgcatgttcaaggtcctttatttgtgcccctttctcccaccattattaacacactaacaacaccctctttttgtctatttttcttgagtttgtgcatgaatatttcttccggcattgattgaaatttcttttgcagcctgacttcaaggcaattaagaagaggatcgaagatctcatcacccgagattatctggaaagagataaagataaccctaacatgtttaggtacttggcgtgaatggcatcgataatccccttttgcctaatgaagttgtgcccattgcttctggaataagcagagagggtcgcctcattgcggaaatcacactcataatggttcttgcagcaatatatgagtgtccgtgatgagaaaaaatgcttcagaaaatgcttgtacatttttccccccttttggagctaggtatgggtgcaacaattatagattgtgcagccatggtggagagaattgtaattgattccataatgtggtctggtgcttcagtgggatcgtgttccttatataataactaaaaactgtgcttgctttgttaattttaatcttttgcccccccactgaatggaaatgttaatagtattccacaattgtcaattaaaatctgagttattggaaatgttttgtatttgaatgcattatgtgcactcatatttttatggctacaattcaattaagttatgtttggtatgaaagaaagataaattgtgagcgacagaaaattgaacagatgatgatgatgatgatgatgatggggtaatactttattttgtatttgatgatgtaattgtaaactacattgcaatagaggtttataaacttttcactttttggttcctgactctatttttcttcactctaaaacaaaagtgtgaccctctaatgtcgagtggttgatacaaatatcgccaccaaatctaaacaattattagtgtaaccaacgattgaaaacacttgaacttaattatgtagttcatgtagatgtttctgtaatattgtaactactaactattgtatttagtcaatttctgtttttaattgttattttgatgattgaacattttctgtcttttatctacaaatctatgtaagtagtggatacaaacacctcaaaaaagataaaagaaaaaaaaagattagtcgcattttacacttttaatggacatttactagattgcttgagccacttaaaaatcttcgtattatttaagtaattcacaatttatttttgagtcaattgtcattttacttgagtattcacttattgttaaaaattattaaatgagtattgctaactgctattaagtattagcggtactcaaaaccacctaagtatgttttttttttttttttttaaacagaattcgtttaatcaaaagcattacaatggataaggcgaatctcgccgaatagcttgactcgcacaaaggggaacaacccctacccacatggcactaactttgttaatcaaaacatcattggctaaaatatgcgcaacttggttggcttctctaaatacaaaagaaatccctgccacacattcattttgcagcagtcatttaatttgcgcaatgagcccatcgacatcccgacatccttccttctcatgcatcactaagtgtactgcttgaaggcaatcagactcaacagagaaggagggaagactgcgttgtataccagcctgcagacccatcaaaatcgcttgtagttcttcctgcaatggcataatgttcttttgcacatacctgttagcagccgcgacaacccgaccttcatcatcccgaacaactgaactaagcccagcaatgccttccccaaccttgacccctgcatccacattgatcttaaaagagtctcgcctaggtggagtccatcttgcctcttccctcggctgtccacgttgcttcgacacattactctctttaaattcatgaagaaacttgctacacctaaatatgttcagaactactacgaagtgcgctgttgtaatgattagtgattattttataataattaataaattaaaataaataaaattagatatttaattataatatattgtagtggtgcttgacactcttttaactttcttcatattaaatttgagtgttgctattacactaattgtggtgcttggccacctcatgaggtgatacttttataaatggtttaacaattttttataatcatttataaattaaaatatgaaaaatttgataaatttagttgaattttcattaaatgttttcttttctttgaaaattgtaatatttaattagtgatattatttgtggagcttgtaaatttttatgccaaattaactttttttttttttttacgagaaatagcaacttaattaatttagcattctgaatacaaaatagcaagaagatccgtaggaatagaagttctgagaatgctacgaccagataaggatcgagcgtgcctagccacaaagtgggtagctcaatttgttgatcgtttaacaaaacgtaaatgaacattagaaagagaggataaaattgttaggttttatgccctanataaaactctttacaatctgattagt

SEQ ID NO: 61915 - DNA, 1767 bp, Cannabis sativa
ggtatatttgcctgtttattgtttcatatccccgccaaacactcatctcgtgtgttgtcttttgtagatgaaccttggtgagttttggggaagcaaacacagaatttactaggacttgcttcaacttctgtacgaggattaacctcgtcttcccgccagtctgtcctttttgagtgacagactttctaactagagctttgaagattgggaggtgagtagtgattgttctcctactccagaacccatagtgcaataacattattattctgagcagctcgccagagaggggtacgattgctttatttgggaagtgaaaaaaggttagaggcgttatgttccgtccaactggacatacattgtccagccaggtgttgatgatacacttcttattggctgtccaatttgggtaacttcggcatcccaattgttgtccctgctgttacggttgcacgacatacacatcaatatctgtccaggaggaggataatggacaacacaaagtagacgatgcggaaggtcaacacatctgatcctcatgtggcccagcttgccacattgccaagtgccgaacaagatccgctcgccatggaggagggagatcatgaaggggacattgaggtccaggagattgaggagcaggacgatgtccgtcctagtagcccttccaagaccgaggaggaatgtgtgcctggtcaggtgctcacactaagcaaggggcgatggtgcctttgcacccgtacttcaagagggtgggggactatttttacctctgcctgacccagttcactcctaagggcattaagtacttgtctgccctgttcgtcctctacaccatttaaggatggggtgtgccgtctcgcgaggtcaattggttctttaacttgaagtctatccccaagcaaaccaggttggggtacttctacttctctcagccagactttaagtggttaacgggcaccgtggaaagagatgtcagcaagattgggggttttgttgacgagtattactttgttgaaggcatggattccacctatactcagtttcaacagatctcaatatattaccgtccacccctcacattggcacttagagacagggctcaaaggattgtccatttgccggatgatgctcggaatattactttgctgacctcggatgccaactttgtggagtacaagctttatccggaagactttataccccaacctgtgaaggggagaaagaagaagttcagtgctagccggactgagggagctgagcaagagaatgagctcattcaactcaagcgtgaggctaagttgaagggtggatccggagccaaacaatatgttcaggaatattcagagcaggagaaggaggctcatgaatattcagagtaggagaggccgctaataaagaagaaaaccctcccgacggggcagagaaccattgaacatactatccagatcagagagcttgatatatctgctcggccatccaccccagtagaaggaaaggggaaatccgtcctggaagagtaggcagattcttcggatgacgacgccccgtttgtgcttgttcgaccaaatgctcttgccagcatgcagagtactccatcttgaatttaactttcttgattctcatgccttcataattttatactttcttctaactgtaatttttttatttcgtgtagaaatgtctcagaaaatgattgaagctttgaagaagagagtggggggaagctcgggcttgtcccctccggccaagaaatccaaaggcagtgag

SEQ ID NO: 61916 - DNA, 1243 bp, Cannabis sativa
agaattgagccatatataagaacatgagttactccactcattgccaattagttttgagatggaaccccataattctcaataattctactgtagtttatattttaaatatcttttttatgttagctcaatattaccatgtcatcatcatttaataacaaagcatattaatgatttgtacatataattgcaacaaagtattaaattttttgtattacttccgccaataaaaattaagaattaaattgtaataaaatgttaattttttatattattatcaaaaaaaaaaatatttaagtattaaagatcatcaatcaaaaagatttaaacattattgttgcaaatatttctttttgtaatggtatctattgctcattctttatctttcatttttatcataacaattttcacagtccctttcccccccaaataataatgaaaaaacaaatttcgttttcttatgaaatgtggtaattattgtttattaatttgaaagggaaaaaaacaattgggtcaaccattaattatggtttctcagaagccaaaaactcaattattcggacacgaatccaaccatgttgtacaaaaatatcctaagctcaaactcgattaatattaatttaattaattaacaaatgtgttatattctatatattaattgtaactaaattacattattatataaacaaataaatggctgtgattgacattatgtggttggttcagatctaaaaaagttacaagatttataattaatttgttcaataattttgagtctttaaatagtgatcattctcaattgttttacatgattcatttcaataatttagaatatagtacatgcataaaaattcaaatacatattgtgaaaataaaatgtacacatgagtaccatagtcaactctacacgtcttataagatatataagatcaagattacttttatgcatgtatagagactaaatgaaattttgttttattttaatacaattatgagctgattaattaataatcactatttaaaaaaaaaaaaaaagaaatgaaaaaaaatacaggaaaatagtgattttttgttagggggctttctcacataagtatatatagatttgtttattacttagattgtactataaatataattcaatacgatggaccaataaaattgtgccacgtgtacacagtgtacacgtggacattccaccatggcagttaacaaccaaaaatggatggaaagggctaagtgctaa

SEQ ID NO: 61917 - DNA, 662 bp, Cannabis sativa
ttatttttatgatattctataaagattcgaaagaacgacaaaaaaaaaaaacacatcaaaataataataaaaaaaaacatcaaaataacattaaaacataaaatataatataaaaataagaacaattaacaacaaaataataaaaataacaaaaataaataaaaaaaagttgtattttaataaaattttaaaactttaaaatttttataattccgtataatcaatattttttgtaatgttttattaattttgaaaaaaaaaaaaaataacccaaacataaatacgtattctccactacatcattcggcaacttagaactggtgaaatccagcataggagggcctaagattagcccaatttacactcaggtattctttaaaggaaaactcaaaattttcaaaaataccattctatgtacaatattgtattaatatattatattttgcacaagacccctcaaagttcaggatcaaccctaaatatatttattagatttttttttgctaccttgcgaaaaaaaattaaaaaaataagtaattttttttttgaaagattcttcgatgtaagtttactaggtgattgttacgtgtcaagccacgtagtgttagttttatttaatattttagctttttattttaattaataattaaaatagtataatt

SEQ ID NO: 61918 - DNA, 1005 bp, Cannabis sativa
cggacccgaaacctgccccggacccaaaccacaacaggaacctagactcgaacccatgtcaggaccaaacccgaacctgggacccaaaatcagacccagacccagaatcaaacccaaacatgaacctgcacccggactcgaactcgaacccagatcgggatcggaacccaagacttagacccagaactaaacacggactcagatcgagatcaaaaccttggactcaaacccgaacctggacccagacccaggatcctaacccacacccggagcctaattcagacctagaccgagatctggacccgaacccaaacttggactaggactcgaacccagacccaagacccaaactcagacctggacccaaaccaagactgaaaccgagatctagacctcgacctagacccgaatctagactcataacaggaatcagaccccaacccggacccagacccaaactcgaaccccaacactaaatcaaaatcaaaaccgggacttcgacccaaacttcaacatggacccaaaccgggaccttagactcggaaatggatgggggacctggacttgggcctcagaaccctgacccaaatcggaactcgagacttggacccgacctagactcgaacccaggtttggacctagacagatatcagaacccaaacctgaactcgaataaggacttgaaccccgaccgggtccttgacccagaccttgacctaggatccagactgggtcctgggccctgaagtgcaactagactgggactcgagaccgtgaaccagatctagactcggggcttggacctgacccgtagtaagtttttggatctgggatccatacccggactctcaaaccaagactcggactcagacctagaccctcacccagacccagacccgtaacccatacctgggtccgagtctgagtctgggtttgagtctaagaactggaatctaggatgcagacccaaattaatactctgatcgggactcgggacacaaactc

SEQ ID NO: 61919 - DNA, 1077 bp, Cannabis sativa
  modified_base (1016)..(1034): a, c, t, g, unknown or other
aagccatgaaagctccccaatcatgcccaaccaagaaaattttttcgatcttcagaaagtccataagagcgacgatgtcgtcagtgatgttcttaacactgtaagactctggatcagcaggtacttggatttcggtttttccatagcccctgagatccggagctatacagtagtaaccctggggactcagatattgcatctggttggcccaggattgccaaacctcagggaagccatggagaaacacgatcgccggatcgtgtttcgaccccaatgtggccacattcattttgatgttgtttatctcatatatattttcagggatttcactacaatccatttttggacctacttgtttggcctttctattagaaaaaaaaaactttgatgactttttttggtggaagaaaagtgttattatgctcttatatatatagtgtgatctctcgactcgatcgatcaaattgtctagatattatattcaaagcttaattaaattatttttcattatttcacatgaaatacattattgattatttttttttctttgttgagcttgagctgggcaccgcgccaaagactttcatgcatgttagtagaaagaaattaaaattaaaataataaagacttgactttcttaattgatcaagtcatatatataaaagactagagtttatattagatatatcatgtgatccaccaaaagaggtaactgataaaatttagaatataatataataataaatttatagaaagcttcttcttaagtggggcattactttttgattaggagtgtttcttatttttcgtagtctattaaaaaattgtattcaatatattgtggttgtaataggaattttgtccattttttagaaattttgaatattttataatatttaaaataaagttaaattatcgcacacgttaattataagagttagttttacattgtttatgtgtagaaataattgtcatagataagggtgacgtgtggtaacacttttgttttttaattnnnnnnnnnnnnnnnnnnngtaaaatttttgtttttaaaaaaattatttttgaaaaacaaaa

SEQ ID NO: 61920 - DNA, 1468 bp, Cannabis sativa
gttggctatcggcatagattgagaaatagttgtattgacaacaccagttgatatgttaacccaattaccttgtgttgtgatgtttaaagggtactcgtcagtgttactagcttgtgtacggacagggttactgagagtctggaaactcgagatggaaatgaaagaaggtaagatgtggtattgtactaattgtaccttttgttctgcatttaagaagttgagtgttccgggttttaaagcggagaaagcgccgttagttggggctagaattgtcatgctgttggaagtgttgagttggttttcgatctgttcaattacttgggtgcttttgagtatgcggatgaagacactaaaggttccggctttgtcaagaatcttaaccacatcggttggctcgggtttggcttttcgcggtggagcttcaactagtggctctgctgagggagcttgtgcttctgatgaggtcggggctcgagctggggttgttgttggagttggtgttgctactttaggttttgtaggcgccacggctggggtggcgcctttagtagcggctatgtgggcagatggggctttagctggagcttgatgagttaaactcattgtggtgtgagataagatgagaagtatgaatgaaaaagatatgagagtttgcttcatctttgtatatagctagggtttaattatttatgtattattattatatatatatatatatttttttggttatgttgagagatttgtgagtgtttgatgatatggtgaatgggagaaatggggttttaatataagttaatatgttttgaagagagattaattaaatgtggtggttataatgattattgttattattatttagttgtgggaagtaccaaatgttatggtagctagttggaaaggtacattagatttgttactgatttgcttttcatcaatgcttatcgatcaacaatgacatttaatttgtatttagttgagattatatttaaattagctgttaatgaatttttattcatgattaataagcaatctttcatttcaagaagtgacacgtatagataggttaagtctataactagagttcacctagtttaagggctaaaaaatattcttctcaattttttttaaataattttaaaaaatgcatgtcacactatcttttaaataaaaatctaaaaatatttttattcttataaccaactaaattttaagatctctactcaataaatattggttaaaaaccaaagtggcacgggctaattaagctttaacataaggtggattgacacccatcaaaatgaaaattaaaaaggggagataatttctcactttatttcctatgatattatgttatgttctaattaaatcatttagggttcgtttggaacaccgtattaggtcgtattgtattgtattatattaaattgtattttatgcgatatttttacgtaaaactatatgtggtatt

SEQ ID NO: 61921 - DNA, 1673 bp, Cannabis sativa
agtggtaaaatgtaaacacacaaattatgtagtttgacaatttgcgtatttcaaagaaagtcgttgatattattaaactaagtagaaaatatccagaatatgaatacatatttcctagtaataatatctctaaactaagtgtttctcaaaatgtttctccaaactcactaaattatttttcaaatttggatatccaaatgctccctctctaagatttttcattgaacccgttgcactaagttgcaccccaatttgcaaatgctcttcaaagagctctatatttatatataataataagagataattcatcttccaaccatatgtaattaatgagaggtaactcaactttcaatcacatgtaataaatgagagagcataagtcaatagctattgtatagcttcattgacaaatgtgacaaataataagagcatccccaatgggaggcaacatctatagttgccaaaagtaacacatcatcacaaaaaatttagttatttttatttttatttttttttctcattcacataagatttggtacttttttctacaaaatctgctccaatagttgacaactccaaaagttgtcctacatattatatctaaaatattaaattaagggaaatttgcagtaaaactccctaaaaagttcatgttgatatagattaatcacaaatctccaaaaatagcagcaatagtcctcatggtgatattttttgtaagtccgctagtcctaaatttaactaatctgttaacttatttataacttctacgtgttgcaattggtccaactaataattttaaattaaaaaaaatacattttaaaatcaatttttttttcttttttaactttttttttcctccagtgacctctccctttactgatttttttctcaaatttaatcctcccatggctatggaagaagtgtggaaacacattaagtctttaagccctaactcttaacccctaagtcccaaatgtctctctgtgctgggatgttttcttactgctaacgaagtctcaccgttgaaaatggaggacaccatgggactcctcgttgttctctggagtcaaggccaccatggccttcttcgggtttcaaaccacgagctctgagttttttgaagctccctttgtcgcaattcccgttaagagctgtcggcatagaaacttttgggtccgatctaatcgtgttggagatccattgagtacaataatttttaaaaacgtgatctacttgcaaagatctttcagatctcatcgatggtttttgtaagcttcgtcgttgacaatagatggctaccatgcacggtggaacttcggtgagcttggggacaaaggtatggaaagggatgtgggtgtgggtgtggatgcgagtgcgggtcgaggtgtggctggagaaagaagatgaagtgggggtgatatggctggaagaagaaaattaagtgggggtgatgtggctggaggtagaagatgaagtgggggtagggatggtgtggctgaacgtagaagtcgatggagaaaaaaacgaaaaaagaaaaagaaaaaaaaatgattttcaactatatatattcttttaagttaaaattattatttggactaataatattttaacacgtggaaatttgaataagttaatattggaaatatttttaccaggacctagatttacta

SEQ ID NO: 61922 - DNA, 1010 bp, Cannabis sativa
atgtttggggaccaacgactacttcatccattggtgggaaacactactttgtgacttttatcgatgatcattctcggaaggtatgggtttactttctaaagcatgaatctgaagtgtttgaggctttcaagagatggaaagctatggttgaaaatgagacaggtttgaagattaaaaagttcagaactgacaatggtggcgaatatgaagagaacacattcaagaagttttgctatgagcacagaattagaatggagagaactgtgcctggcacacctcaacacaatggtgttgctgagcgtatgaaccgaacgtcgacagaaagagccagaagcattcgtatacagtcaggtttaccaaagcaattctgggccaaagcagtcaatacaacagcttacttaattaatcgaagcctttcaagtccactagagtacaaaataccagaggtggtatggagtggaaaagagatgaacctatcacatctaaaagtttctggttgtgtagcttatgtgcatattagtgatcaaggtaggaataagcttgatcctaaatctaaggaatgcacttttattggctatggtggggatgagtttggctaccatatttgggatgatgaaagaaaaaaggtcattcgtagtggagatgtgattttcaaggaaaaagtgatgtaaatggacaaacataaaattgacgccaaagacttagaatgtagagggccaatatttatagatggacattatgactcgaaaagttctatgacagagtcgattgagacaagtcctcagcaagaggaacttgttggacaaagcagcatgtgacaatctgacgcaacattacctcctaccctagctcttgtattgagaaggtcttctcgacctcatgtgcctaacaggagatacatgaactatttgttgttgactgatgaaggagagcctgaatgctatgacgaagcatgtcagacaagtgatgcaagaaagtgtgagcttaccatgaaagacgagatgcagtct

SEQ ID NO: 61923 - DNA, 980 bp, Cannabis sativa
catctctttaaggaatgtcctttcgatagagctatcttttttagttatcaatgggggattcaactggaagacattcctactactaacactagggagatggtttttttggttctttcagaagagtaaatccatcagaagccatgaaatgttatcttttgtggcttgtgctcagtcaaaaatctagaactctaggaatcttgtcctcttctaagattatttggcatatattcacacatctatgcacaaaattctgaagggggtgagagaattccttcagcaacatgttgaatattctgctcctaatatttctacatttcgaggctttccctagcctcattggaagcctagatggtgatatttatgggatttgtgtggacgggtcattttctaattcgagctctagtattggcgttgccttttttctcaatgaaacatgtattaaggtgacttctaatgtatctcttgttatttcttccccattatctgaagccaatgccatcctcttggctctctctttcactctggacaaggaatggtgtaaagtttctctatttttggactgcaaacctcttgtggatgttttgaatagcagctcttacaggttggatgcgagatgtattccagtttttcgtcaaatttttaagttgaaacaattgtttattcagtgtaattttacttttattttaggatctgttaatgttcttgctgactttatcgtcaaatggtctcattgctcgaatacctttgcctgttttgatttcagggagctgccccctttatggtagcctttgtttagtaattttttcaatgaagttttactttacaaagaaaaaaaaaagtattatattgtgcaacacttaatgtgagtgttcatatcttttaatattgttaggaaatatttaaagataataataataataataataataatgataatgataatgttaaatataccctttaacactataataatatttatc

SEQ ID NO: 61924 - DNA, 1333 bp, Cannabis sativa
taaagtcttgcggcatcaagaaaacgtgaggatgccgcattagatctgttgctcttagggaattcagctgctttccaccaaaaagagtaatccgcgaggactgcggtggcgccaatactaggtgctcgtctaggatcttggagcctcgagcacatcaagggtggaacagttctcccattgagagagtattacaaaaaattctataattatcttggaattgccccttttcatttgattccaagttcttacagggctctagtaggtttaaagggtttgtaccatattttaggctgggagtgccccactcctctcgagatagtctatttttattttgtcaaagttgttccctcgaggaagcgatgtttagggggcttttattatcttggtacccacacaaatgatcacaggatcattgtgaggttgccaaacaagaccgagttcaaggaaaacttcttttggactactggtctttctcctatcaacacgactgcatttcacattatgcgtaagtaatttctgtctcaaaaacttggttttgagttctttttatatttatgactctgaggtcatttacttattacacttattgtgttgaaagcggtcaccaaaagaccaatccccactcccgagatggctgagcgccataaaatcctgctgggtcttccattcaaattgcgatcagtagatttccttttgaacgaggccaatctgaggactgtcaacctccttggctcaaacgagtacagttgtgactacaaggttccaaaatactcttcgtgggagaaggtcccagtcccagccaatgaggaaagccaggattacattgctcgcgtctactatctccagagagtaaaccctcaggaagctgaagaagaagcatcctgaggtaatcaatgtggatggtcacctaccgtacttaggactgcacgtacctcactagtaacctttaaatatagccaatataatttttatacatgggacaatttctgtacagatcgcataacccataggtttgatagttggtattctcgattccatgttcagcttagttgcactagctcatattacgggattgccaagcagtatggtaccaacttggatagggcgagccatccagattcaaattgagatttaataaacccttatgatatgtacatgatcacagggtctacggagtttatttaattattatagttcttcctcgtcgtcttctaataattatggtaacttcctttaagtaggagttttattccccatttttctattatctgtctctgagtaagtgtctgatgtatcttttttgcctcacagatatggatctcgatttggaaga

SEQ ID NO: 61925 - DNA, 2390 bp, Cannabis sativa
  modified_base (52)..(52): a, c, t, g, unknown or other
atatatatgaatatgtattcatctcttttattatatttcggtcagttatatnataaatattatacttgcataatctttaggatatatgcaagattgttttgaggatgcataatcttcaagatatatgtaatattttatcgaggatacataatcttctagatatatgtataatttatataaattttttctatcatatcgttaataaacaataagagatacagtatatgtatatttatataaattcaataataaacatataaaaatatatacatacataaataatttatagatatataaataaaagaaaaagaaaaaagaattcttgaaattgtttcagtcagataagatatatatatagatatatatttagtgaatcgtgatcttgaaataactcaagaacttcaacaaaatatttaccttgaagcttggtcagagactcgtgctgataagtgataacgtattattataaaataatataaaatagataagaagaaaaaagaagaagaagatgaagagaaaaagggaaactgaatgagaatttctcagttatttattctaatagggtgaactcctatttatacaaaaatatgactaaaaaaatgtgaaactaaatcaatataacaaagagaaatacaatcaagtatcaatgatgataattaatttggtgatttggacatccatatataaatacaaaaagttgttacctttagtgttaattttttagtcacaacataatttttttgtgactaaatgtgatttctagtcacaacaaaaaattatttgtgactaaaatataccatttagacacaagttgtcactaatttatttttagtcacaatacttaaaatacatttagtcacaacaaattgtaatttttgtaactaatacctttagccaatgaacttttagtcacaacataaaaataataatttataattagtcacaatctttttacttttagtcacaaattttatgtgactaaaagtaaaaaaaaattgtagtgtataatatttcataataaatgtaacacaatatacgagtatataatataatattagagagagctagagattgagagaattatttaataattagtaaaattattaagttaatagaggtgaatcgattcctttgaaataaattaatgggcggagcccctttattcttaaaattacaacaaacaacaaaattccttccttacaatacataatattataaatctagttaattaaagtataatatggaactagtcatgtcatgtgtaactgtattaccagaaaagtttaattcctctttaaagcttttacacatgacatatatatacacaaaataattaatgtgagagtaatactattaaagaatatatagaaaacttcatgagtggcctcaatttgatgccatattcttctttaatttattcatcgacaaactactgttcacgaatagatttttaccttcttgttttttaaatactatctatatggccttctttataagtgtttaaaagcatggtagctctagttaaggattaagtctcaatcccacctctaatatcaacatctatctataaatatatatataaatatattaagaaaattataaatataattagtatcatcatggtgaagatcaaataccttgtttggctcttcttcataattatgatccttgcttcttcatgcaaatctgatgatcaagatcagaacaaacaacacaagtgtaagcatatatatcttattattatttgtcccatgttattatttcttcattattaataacaataataatctcctttttttgtagatgatgatgagaatggttctgaattatcaagaagagaaaagtactacaaccatattcatggtgatggtaaattgagtactattagaaaagcaaaggcagtgtatggtggatctaatgaccttgtgaggcgccctaagaacagccaaagtgcaccattaataatttcaagccctaaacaactctttcttcttggatttcttccctgtcttataatgttctttccactaatttgagactagcttttggggattatatatacatatatattatgtgtatatgtacttttatgatcactttgaaaatttgtatgatgaaagttgtcctttcccttgttctacacttttttattaattgcttatagtttcatgcaaccatatatgtgtaattaaatatatatgtgcaagtaatatataaatatatatgcccttaattgtaagtaatattatctctctcaattacttttttattttttatcgtgtgattaatttatagtctgatatatatattgcaatgaaaataattattgcagcaaaattttattcataataattgacaaaattatatatttaatttgaaactaaacacta

SEQ ID NO: 61926 - DNA, 789 bp, Cannabis sativa
ggcacgtgccccaggcgcgtgggtgctatttatcaccatcatcattggcttttgtttcttttgcaggcaacgattcacttctcgcctatttacagacccttccatcaatgctggtgtcaaaaaggtactcaagcgtttcaactgccctttctcttcgtcatacccgttcaacccattcgttggattgtggaatttgaaccgttgtgaatccttaccgtacgatggtgcctgatcgacactgcctcgtatcttaaatagtctataaaagccaacactttccccaactgggtaattttcaccaccctttactttccagattatcaaacccattcgacaaaatttcagacgcctctaactttcttctatttcttttacctgttagggtaagtagtgatgataaaatgtgttttcgtttcacttgcttggtttcctcaaaacggctgtcatggtcgttgttgatgtgacgcccccttcgtcaggcgtctgatgacttatgccctttatacattttattttatttactattttcattgtgtgtgcgttatttctctcttttcttagaaaaaggttgaaaatgagggtttttcgtgcaaccttttctggttgttcaaaatgattttcgtactcccacatttcctttcctttgttgcttggatattttgtacccgatgtttgcctttgtgaatcggtgggttccttttggcagacattcggagggggcctctttccagtggttaggggacccccattcccctttttgactttagggtttgatgtggggggctaact

SEQ ID NO: 61927 - DNA, 5102 bp, Cannabis sativa
tatatatatataaatgattataacttcgttacacatatatttatagagtggagagcttcatcgaacaccaagatgcatgtaccatggggcgtctgaggtcagaatcacatactttgcaaccagcagcatgcttgtcccgtacagcttcaagtcccagtccttcaagcaccgacaccaatttggctgtgcccatcaatactactactacttctagtattaacaatattaatccttcagaaacaacgacaactactactactgctcctgccctagtaatcctcacaagtagtagtacccgttctcctactcaaaatccaatcctatccaaaaccaccagcactcctaatccacgcttccataacttagaccttcagctctccaccacaaccgtttcaaatcctgaaaaccacccaatactattatcccctaataataagacagaccccaacagtacccatgatcgagaaattaatcatcagtactctactcagttgcaactctcaataggttcatcagattttggtggggaaaagaaccataatagtaacaataataatgttgaatcgaatgctaataataataataataatcacaaaaactccccaagagagagcatgatgagtagtactactactactaatactactgtggagaagacgaggttgatgaaagaagaagcgagagagcagctgagagtggcgatggcggagaaatgctatgccgaggaggctaggcagcaagcgaaacggcagattgagttggctgagaaagaatttgctaatgcaaagaggattagacaacaggcgcaatcggaattggataaggcacaagctcttaaggaacacgccatgaagcaactcaactctactcttctccaactcacttgccatgcttgtaagcaccactttcataataatagtaatactaataataatagtaatgcaagaactactctctcttacatcatagccagtactacctcctcggattgtgctcaaacgcttgacaataacgatcgtaatactactcatctttttgcaagatcagataatcatcgtcttggaaaatcggccactattaataacccatcgtaggtttttcatttttttgcccttttagctctacgattatatatcatatgttgatgacctttttttcttttcttttttaatcttttttggttatttaatttctatatttttacagtaatcatcatgaaatgtgggtataatttgtagtagttgatcgatcgagtgtacgtactgtacttctcttgtatccatctctagcaagtgcttcatatatatatgtatatcaactctatgatattgtttaattaattagctcattacttcatgatatatccgtataaaatattccttcacatatatagctcatccatacatatatttatataggtctcgtgatgatcatatatattatatattttgtgtatcttcttacagagattaataacgtgtaaatatattttctgcaaatatgagatcagtttgctttatcgtacgctgtttggatgaataaagtaaattagctaggcttttcatgtatacatatttatatatatacacacgtaactttgtataaatactatacttggttaaggaatctggttcccaaactagtgcaatcaataaaaagatcaacaacacccaccagaattactactttacatgcattatagaataatatataacataaatacctagctaaaatttgaaatatatacataataataaatttgaaattgagagaaagagataaggtggggaataggggttgcagaggggaggcagagagagcagggagtcaaacataaatgtgaatttagtggaaaaagcaaccaaaaagaaaaaagaaaaagaaaatcagggtgatgaaggcatatgagaatgcatggttttcagtgccaattaactcagacaactacgtatcagtactctcttacactagctagtccaccaccaccactactaccactatcaaacatattaaactctctggcctagctcaagtcacaataatgaaatcaaactacctatgatctctctaactctactctacatcactacttcataaacacatatatagatttagatagactaataagtaataataatagaaaaaaaaataaaaaaaattaagacttctatccctctctctctctctctatctcttttattcgtctgatggaaatagatgcataagaatcagagccaatatatgacagagatgaaaagcagcgcatctttccttatatgttcagaccattcaaagccttttagggctccaattccaaataacttcaattgtacaaactcttcttaactccctcttttatttttaatttatttttctctctcatacgactgaaaccaaacaacaggccaacggaaaatctttttcactcatcgatcactatccatctcgtcttgtttacttcactatcctttgtttgcttttttcacttcttatataactacccctgacctctcactgacaacctttctttttctttttctcttaattaattatttttatattaatttttcatatgctatatatatatatataaaaaaaaaaaagatatttacataaattctaatttctataacccccatgatttgatggctgctggttgggtagtgttgttcaccatctccgcaaaaataagtagtgttatatatgtaccattgtgagatgaaatcaagtgttgaggttagaatgtgcactacgaatatcctctagtttactcactataagaataagaaaagcaaaataaagttgtcactaaaagtaggagtataactgacttaggatactttagtgataatatatttgtcgtcattaaagattttgttttttgtttttcaaaattagatcatttggtagaggcaggatattcccctcgtaaatatatatcagtgacgacattatcatcactgatgttggacattaattaattactaaactataattcttgccttccccattaactattctcactctgaaaaacactcaatttctcattaaaaattgacagttagaccaccacctcaccctatcgacttctcctccatagccttccattttgattctcgactccatggtaaacaccacgaccttctttgtcgaaaaaaactaaggcaaggttacgataaggtaacttcttatatatatatatatattttactttctctttcttggaaggctactcgttctcattctcagctctcacacactttaattattttctagttttgcttgaataattttagcgaagccaagtgttagaataatatgaatctaaattcatataaactattccatatatatactgaataaatttatagattgaacatatacaaaataaggatcttagtttaccaaccattgataaatgtcactctatttcttcataccattgagaatttctcctagtttaccaaactcacccaaaaactcacgtctctaactaaaaattccatctataatttatttttgacactctttgatagaattcacttctacacaaattagagccaactttacacttggaaactggatcttagacaaaaaaaaaaaaattatgtatataaataatgataaaaatataattaacaaaatacaaaataaaataaatttaacataagaaactgcttttcaataccttcacttcatcatcaacctcatcagaatacaaagcatcaccaaatcctcttgggaatgtattggggatcaaacttaaaattcttgaagagatcactttgagaattctcaccatgcaaaacaacaaaatcttttataataatctgaaaagataaaattaaagatacaatttaaaaaaccaaaatatatatatatatatataacaatcaataaacaaaaaataaaatttgaagaaaataattaccttcggattgttaaacaccttttgaattaactcactgaattatgaggtagggttatcctcccaattcaaaatgcgaggaatcttgttaccaattcttttacaatcgaggtgacaaagatggaatgatctcgtacagccaaattaagaacgcaataggatatcctttaagcttataacccttctcaatcttccttttcttagcaagctattcaaaaatattattaccatccttcaatgcaatcttgaggtgctataatgtcttctcccactttctccatccaaacctattcaacacttcaatataatcatccccatcaaccatagcaaaaataaagttgtcaatcttcttgccttggggataaccatataaataaccagaaaagaagtacacaagagctatcttagaatatcttcatcatctttcaatgcattgctaaagaaaaaactagcaacatccctcacagtaaccttttcagttgttccatgcataaaaaaaatatcctccttgaaaccaagtaacttctttgatttgaaaagatcaacatcataagatttcttacaattcaaaccagtcattagtgaaaactcttcaataccaaatctaacagccttgtttcccaatttaaaccacacctcaacaccatccctttcagtgtgaatttgacgtaaaagaacaagatgaatgagttgtatctgataattgaagttactgacatcaagaaagtgaccaaaaggagacttctgaaacaattccttatgttccgctgaaagattttcattgagatctttgatgacactataaggattgtaaagttgaggtttccctacaaacatcttcttaacatcaactttgaaataatattcccgcaagaaaaaaagaacacaaacaaaaaatataaaattagataaaaaaaaaaacaaaatatttaaaaactggttacacaaaacaaaacaaacttaaaactaaacaactaataaaatatagattaaagaaaccagtttcaaataatttaaaaatagcctaataaaaaacaataaaagatacaaaagaacaaaaggatttcacaaaacaaaaataacatatgaaaaataaaactataaaaaaaaaaccttaaacaagaaaaatcataaaagaagaaaccagtttaatttgataggaaaaattaccaag

SEQ ID NO: 61928 - DNA, 850 bp, Cannabis sativa
gggcatacccattcacttctcgggtatcaacaaagttgtttggctagagctaaaatatgagaatcttcctgacatttgcttcttctgtggccgaatgggacatagctacaacaaagggtgcatggactatatgaaggcatgtgatgaagctccctttcccccggagctcaggtatgacatcaaaaccattactggcaaagtcaaagtttctactaacgctatgttatgccctgaacagctgaactttgccaatcctccggtagctcccttcatgacttccaacccggctagtgtggtttgtgttgctcccccggagatcatgccaccgtttcccacttatggctcccaagacatcaacccttcccatggccaaacacaacaagtgggactcttcaaatctggcccatccaccctcccacaaaacttcccacaatggaaccaacccgatcccacaaacaacacaccaacccacaaccatcctcataaccctcccgagacaattacaccgacatacactgccctcatgaacgccactatgagcaactctagtgtccaaaaagcctccccaacccccacaccgaaccaagccgtcacctcccaacattcaagtggctccaattccacaagctcaaaacactgccatgtaccattacccgagaacatccctctccttgacactagcaagagacttgaagccatgaacctcacctaccaacccggaattgctaccccttcgagatcaaaagcctcaaggaaaaggaacaagcctgattcaaaggacaagttcaaaaggcaaactgaaatggtcaatggagagctccgtcatcaaatcaaacgctcccgctctgac

SEQ ID NO: 61929 - DNA, 1658 bp, Cannabis sativa
  modified_base (491)..(493): a, c, t, g, unknown or other
tagaactaagtcaatttgacattagatacaagccaagatcggcaataagggacaagccctcactaattatattctcaagtttgcaagtgatgaggtggcaataattacaaaagagcaagtcgaccctgatgtaccatcaggcgaaggttggactttgtaagttgatggggcatccaatagcgagggatcaggtggtagaatatttcttataagccccaataaattcaaggtgcacgttgccctgaggtttgaatttcctgcatcgaataacaaagccgaatatgaagccttgatcgcaaggttaaagcttgctctcgaaatgaaagttgaatacctcgaagcattcagcgactcgcaaatcgtagtttgccaagtcaacggaaaatatcttgctagaggagggaatttggccagataactttcctacacttgtgagttattacccaaatttaaaaagataattgttagtagaatacctcgtgcttacaatnnncatgcagatgctttggcccgattggcctcgacaagagaagcaaaatttgtagatgtaattcctgttgatgtcttaacccatccaactattcatcaagaagaggtgatggaggtcgatacgatcaagaaggtcacccggatgaccccaatcgttaactacttaacaacaggagtgctcctcgatgataagaccaaagctaaaaaaactacgatatcgagctgcctgatatgtcatttatgatgacaagctatatcgcagaagtttttatcaactgttacttaaatgcatcgatggaagtgaatgctactttatactccatgaagtgcatggtgggatacgctgcaaccacgccggaggtaattcccttgctttaaaaattataaggcgaggatattactggccgactttccaagcagatgaaactagctttgccaagaaatacgacaagtactagtgtgaatagcgacctatgtaaataggccacctagccaattaaactctatcactagtcctcggccatttgcagtttggggcatagatttaattggtgaattgccaaaaggaaaaggaggagtaaagtatgtcatagttgcagtggaatacttcacaaagtgggtcgaagctaagcctctaacaaccataatgacctcaaaattatgcgagtttgtctatagtgctatcatctgcaggtttggcatcccttataaactaatttctaacaatggtaagcaatttgattgtaaggagatgtgtcaactatgtgatgacttggggattaaaaaagattttctagcagtcaaatatcctcaaagtaatggagaaattgaagcagtcgacaaaatcatcaagcataccataaaaggtaagctcgaagaaaagaaaggtacgtggccagaggaacttccacaagttttatagtcatataataaaactcctcgctcaacgaccggtgatacccccttcacgctttcttatgggtgcgaagccatggtaccagttgaagttggagcaggatctttgagaagagacgtcttcaatatcgacaacaatacaaaaaatcagttgctacaacttgattttctggaggaaaaacgtgatccagctcatttgaaaaatgtagcctatcaacagcaaacatctagctatttcaattcaaaggttaaag

SEQ ID NO: 61930 - DNA, 1912 bp, Cannabis sativa
ttgaaaaaaaattccgccccacagtataaaagtaaaaaaatttaaaatttccatatgtggtgtaaataattctaaaaaaatgtgcatttgtaccatgtgtatgtgttttgataattagataaattttgtgtgattttataaatatatatatatttggagcaaaaatttctatgtagtttatgttattgcacttaaatatttatataaattttttggcggtaaaaatttttatatagttcatcttgttacacttaaatttctttgtaaatattttagcggcaaaaattcttctataattcatatttcacagtaaaaatcatagatgtaactttagtctctcatttggtaacagagaaaggattaatattgtaataaaatgactacatagtaatttttgtagctaaaaaatttatataggtatttaagtgcaacaaaatgaactatataaaaaattttgccaagtatttagctgcaacaaagtgaaatgcaaaaaacaaaaaaaaaaaaaaaaatcaagcctttatgttaagatacttacagtgttagcaattgtgtaccagagccaagagatgcagcaagcaaggacttatgagatgggattctaaacacatcatcttggatgcatttccaacctctttctccttggttagatcccgattcttcgtcatgcgaaccccttttcgaatcatcgatcgaatcgaattagaaaaacaaaaagatagttataataaatgatcatatttgaatttgatgaaagattgcttactcaggaaattctttcttgaagacacgaatgtacaacttcacaaaaagaccaatcaagacaagagctatagcacaagaattcaataatgaaaaccaatgaatgtccatgtattttgaagactttgagtacttaattttcgtgcttttcactaatggaatatacactttaacccattcaacagagtaaccaaactccacataagtctccttatcttcaatcaaatcaacttcatcttcataatgatgtggaacaactttgatcttgactatttggttctcatacacaaagacttgaaaatgaatgtgattatgaagtaaatatctcccttttttgtcaactctaccaatgaatagaaacaatggcatgtcatcatggtagatttgaagatagtaatttctttctattgctgttcgaaatcgaaaaacttgttctttagacaagttttttgagcatgtcactatggattttttctctactagaaattcaatctcatatggtgcattgattagatgatccccatttaatatctcaccaaaagtttgctttttttcattgaaataatctgtcattaggataagagttataagaaaatggtatagaaatgatattagaggaaaagaaaagcttattgattatacctggtttacataatggaagatcaaaatagtggtatttttcactgaaaataatatgaacaaaaatagaatatagcattaaagatcataatattaaattattaatatcaattcaaaaattggaacagagaagtaaattcaccttggattttgaaagggtcccaatttagtaacatataaaggaacagagtctccagctttataggttgtgtagttaagagaatcagatctaatttgggttctattagtatttccataacaacccaaaattagaagacaaaatataataagaaggaattccaattccattgttttgtttttcagatgtgaatgaagagactcttttttatttcttagtgtaaatgaaatgagtgatatagaagaagagaatggagatttagatcagatttagtcaatcaaatttaaataaggagaagatagattatggatataagaaatctgattaagattcagtcagaacgttgactttttatgagagagagagagagag

SEQ ID NO: 61931 - DNA, 1602 bp, Cannabis sativa
caacatcttacctgcctctgatgtttttgattggtgtattaattatttttttaaatacttagatgcacagcaggctaatcagcttcctagtgcttcagttcagttgcgaagcaaggttttggatactgtggaggagggatctttataggtttacactgatgctgctatatatcctcacagtaagaagcacatctacggtattgttcttattgatgagtttgatcaagtgaaagccggcatagccaagccttgtgtttggagtgctcctgctgtcattgctgaagccaaggcaattcatcttgctatccaatagattcaattgcttcatcttccaatggatatattaaagatagattgtaaaaccatagttgataaacttaagtcttgtaaatggaatgctagtccactggatgacatattaattagcattaaaaacttgttatctttcagtcctaatcttaagattgttcgtgtgtatagggattttaatcaaatggcccataaggttgccagggtgggattatgattagataatgagttggtttggaattgtcctttaccttctatgtaacttgtttgctttgtactttctttgcctattctaatgaagcacaagtttaaaataaaaaaaaaaaaaaacaaccaccatctcttcatggcctcctctgcaacactaccataatctcctcattgtttcgtcgctcctctactcctcttttcatgaacgctagctgccaatttttctttctttcacccactctactctccatgtgtctctgcttcttcccctctctccctgtctggtcctcttcatcttctttagtatttgtatcttacacaaaattggtaatccatataaatatgtattcccaaatctgattcactaattttggtatggttattatttttcaactcttttgatttcttcttcttattctaattgtatctaagttcttcttcttcttcttcttttaaaaaaacaaacttcattttcttgacttaacccttttagtcttttattgatttcttctaagaatctaactttatttgtttatttattttgtttgatttgttttattacaagggttatatatggtcataatttggatctctttttaatgtttacagattggagaaagcctaaaccaactattcatacatgaggtatcaatatattcaatattcgagagtttttaggagttaatatagcagcctaattatcattattttctaatctctcatctcctaattttttaatttattcttattttttctaatttatttaaattttgattctatttcagtgttttaaattgtaattactattgtttaaactcattaattgattttaatcagtagaagacgaagaagatatcttacaataatttgagagcttagaaattagatgttaccataaattttctctcttgaatttgcattttaactataattttatttgtattttacgtatgttgatgtgtgaggcttactttcaattatattcacctaaatcgtcatctataatttcaatgcaggctataaaaatactaaacgatgaaatgcagttgaatattatcaagattagaaatttggttccgatca

SEQ ID NO: 61932 - DNA, 812 bp, Cannabis sativa
cagaagtcttggaagggagcttagccgactcaactgactccttagtgataaagcgatctccaaacaatgagaacatgttgagccaaggaccaaaaagagtaaactgagaaccactaacatcgagaatggtatccgaagcatcttgtgaacagctgctacaaatgtgacccaaatagccacaaaaataatagaactttccaattttctcatatttatattgcacccaagatttaataccattcttttactcaacaaagcaacccgagtacgaaggagaagaaacgttaaactcaatttgaactctcagatattttgaccaacttgttggcttctcctcatctagcttaaccaaaatgacttttcagaactattacctagacagagctcatgaggcaactggtgaagttgcacccacaaacgaatcgaattgaatgacagtagacaagcatcacttgaagcccatgtttgaagtaagaaagtaaagcctctaacactccatgggccattgtccaaagcccactctctatcctcctcacgctcgaagccattttgaacaaattccttctgcttgcattaaagacaagttcaatcaccattacggggaattttcaagcattcaatggacattcttttatggtatatttatttatagttttaggtgacaacactttgccataaagacagagcttagttaaggctaggactgaagattcactaggaatcaaagaaaaagtagcctctttaaaggaaacacacctacttttagttaccaaacggggggcattgatcaactccataaaaaccccccaaga

SEQ ID NO: 61933 - DNA, 973 bp, Cannabis sativa
ccataaaaccattacacccttttgtttccttttaaaattatgcaacacctcaaaggaaagcaaaatgctagaatgaatgcactttgaatagtttgttaaattaaatgttaaatttgaatgaaattattttttttttttagataaaatgatgttggttaactgtattttgaaagagcttattcatattaaaaaatatttttccaaaggacatatataaaataattttaatttattagtatcaattaaataatagttgaaaattaaaagatcaactaaatatatatatatttttgaaacaatcaacctaaatataattaaaaatttgaaaataaaattatagggcgtaaattaatgttaagtaacgtcgtttattttgacctttggaacaagttttgagtattaagcaatgctggtttaccatcttccacgtgtgcatctacctagtcaattgccatctaccacttcggcacttcctcaattctcatttcttagactctctcccttttcaaaataaaaatatgtataattatgcaaaacccatatttacatgttcattcgtattgttttataattaggctatgtttggtgagagggacggggagtgagcgggatggaaagaattgttaatctcttttgtattgtttggaattagatgtgaattgagaagaatggagaaaaaattaattagtaaaattatataattgtcattttaaatataaatttttttattgttttttaagaatagttattgtatttgtaaaatgtattttgtcttttttctatcattttttcaaatttagagggattaaattttgaaagtttagaaggagaatgtctccctctatctctcattttcctttttctctccctcttgtcaaataggtgatttaatgtctttttccatcactctccctccacccctcaccccctccgaccaaaaatagtgttaatattgcggaagagagaattgatg

SEQ ID NO: 61934 - DNA, 1694 bp, Cannabis sativa
aaaataaatattaaacttacaatattatttagtctaatacaaatatatattattttttaaattggtatattaaatattttatatatatcttttgtctttctcttaaattttttcatatttaaagggattgatatttttatgtttagagagagatcccccttcctctcttcctctctccctctccatccctcctcctctctcctctaccacatgtttaactttacaatttgattttgtcaatttattcttacatattatatactatacctttgtttcttgcacacatacatacacacataccttatttgttttgatcacacttccaatatataagcatcacatcatcatcatcataaatgtttgcccatagtatccaagagctaggaaagttgcttatatgaagaagattatgtttgagaaatgatatgattggttataaaggtagtagctagtcctttgatgatttcaacaagattgttcattcttggtaaacatgggagagttggctttgcattttgttatcaaaaataggatttgtgaggataacaaatgcatatatgctcatattttagagcactcaaaacaattttattttttttttaaaataaagtagctttaaaaaaaaaaaattaaaaaaaaacgtactaaaaataagctacagcaaatattctaaaatttttattcattttaattaaagtttatttaaaatattatttatttataaaatattattcattattctaaacatattttattaattatttttgtacggggatatgtgtatacattaatattacatatttacaataaataaaatataaaaacatttaaaaaaatatataggatttgaatgatgtattttaaataagttgatgcatatagtgtaatacaaagtgtgttgtaaaaaaaaaaaataagattttgacgatatattttaaatgataaaatagaaaagttgttaaaagtgctcttagcctctataataatgtcaagttcttataattattttgctaagacggtcaaaattgaaaggctcaaatcaaagcactttggaaaattttatttctttctttagcaaggccgacgttgagttaattttagatttagaaaaacaatttttttttaattttttattttttctttatttttttatataaaaaaaaatataaaaacaaatgacatttttaaaaaaattgttgatccatatttttcgcacaatgtttgaagatctaatttgcagtgttaacccaccaaaattaatttgaagtaggaattggaattagaagtaagtagtcaaaatttatttgtattatatttgttctaatttaatgatatatattaatattaattaatatttgctttggaaagcgtttaggaatatatcgtataactcaaaccataaagttgtctactaactgcatctacatttctaatctttttccttttatgtgttaatcaaatatttagagatttgcacgaagttattagggctcatcataatgtcatataataatgtatttaatcatcaaaaaaatatatattattattaattttagtgtcaaggccggtcctgaaatatagtgagtcattaaaaatagaatttgatctttatttaaaaaaggttaattagtaatttttccccccgaagtttgacatgtattaaatcatgcccttgaactttttttgctgttaaa

SEQ ID NO: 61935 - DNA, 1131 bp, Cannabis sativa
  modified_base (1079)..(1079): a, c, t, g, unknown or other
attgatctcgggtgagaaaggggttccacgtgctcggtccaactcgagatcattatttctctgatcggccagcccttggaacatactctttagttcattcagttgtgcctgcacttctggactaacctgttcgacattttggctgatttgagtcacgtcagtatctttctaagcgagaatttgagcacgggttctgagctgcacgattggcgtgtcaagctgatcgtccactcctctcctcctatttagatcgtttgtgagatcatgagttttccccaacctatcaaatacaaaaattcctggctgtctcaatgactggttggtttcgctaatgtgttggcaggcaccattaacctggttggaattgttgggtgtgacttctcccgatgaataactagacaaggtctgcccacctaccacttgtcccacaggttgaacctataaccaaggatttggaggctgaccatatatagtctgagaggtattcatcgctagatctttgtctgtttcacccaaggggatgacattcgcgggttgctgcccgacagtctgataggcttttcgtatcagcacagtagcttgtcgaatatgagcctttaacgattccatctctgtgtccctccattcggtaaacatgcgcctctgctcttcaaacgcgagatttacggcagcactgtgttcttcctgatcatgatgtagggtgttagtatgacactgcattagtccaagagcaacatgaaggttcaggatctcagtgtcatctcaaatggttgtttgaacattggtagcgggcataacggctttgttatgagtgccttgttcggctgctgaactggcacgatctcatccacaggagtcgtcacaccgtgacccgcagttgatgactgtccgagatttatggctggcagaagccttgtgtttcttggattttgcagtgtaggacccactgcctgtggatttgctggatcaaccatgcccctacgagtctgtaccaccatcatacttgtgattatatttgcactaaagagccacccttgagttcaactctcaatgagagcaccaaaatgttgacctcgctnttagccaacgacagtgagtctaattttgtaagcgacaagtagtttattacga

SEQ ID NO: 61936 - DNA, 917 bp, Cannabis sativa
gaccctgtgttttgttaaatgacaataaggaccatgtattttctaacattatacaaataggaccttgaactgattttttgtcaaaataaaacttaataataacctgatctggaaatgttatgacaaaattggttgtattttttgtatctgctcgtgttagaaattgtcttaaagttggttatattaaaaaatgaaattgttaaaaattgagctcagtgttttatttttactattttggaaaatatagggtctattttttttcatttaacaaaacagaggattcaattagtaatttttgcaaaacataaaattcaaaatggtatttgcccaattataaacaaaaaatatatcacattatttaaaatctcatatttatcaaatttagtgagacaaacaaataaatgatgtgcacaataaattaataaaaaatatacattttatgagtttttatgtgtgtgaaaatataattttttcttttaaaaaatattattttatgggaaaaattaaaaaaaatatatataaatataggataaaaagtttagggtaaccaattattcttaaaggtcattaaggtaacccctaaccaatttttcctatattttcttcaatttttcatatattttttcataaaagaaaaaaaaaacaatatttttgtaaaattgttgataagtaaatatatatatttgtagaagattttgcaatgaaaatttatggtgagttttctacaaccttcttccaattataggcccatatgtggaggccttagaggctgagtcaaagcccatgtaacaagaagtcaatctaccgtctaaaccatgttcacagattaaataacaatcatttcaatcaaataataatattaatataaataaattaggaaaacttacaaataaaatactgaaatttgggttaatttt

SEQ ID NO: 61937 - DNA, 1572 bp, Cannabis sativa
ttatttattttcaaaaactaattaattaatgaatttagttaagttttggtgtaccaaacgaaaattagctatgtatgtatctatcagtttttttaaaattaaaaaaaaaaaaaatcacacgtatatgaatacataatttaggtgtagttttcttttcttcctagtatcaactcatgcttttcaccaaatcttgataagttgttgcgttatataatattcttttagccaagtatagagtattgagtaacaaaatgtgtatttgtcttttttaagatttagaatttttaattaatgcatattggattttcaaaaaattaatgcatattggaataataaaatattatttttaaacttaaatattaaaatatttaaactatttactattttcacatgtgaatgtattttattctatttttaattatatattattaacaaatttattaaattatattttatttaaaaaaatattcaaatatttaaatacaaaacataattaatatattaatttaaaaaaaattatgtttcaagtattttaaacatgtttaaattacatacaaacagataatacaaaggtttttttttttttttatataaatccagattttttttttatacaatgaattaggaaaatatggatatttaaggatataacttaaaagctaaaaaaaagaataaaaaacttataaaatgaaaataataatatactttttccatatttagattttaataatctaaattaaccctaacagctaataattttctctcttcttctgcaattgttttctcacttttcctctaatttcttttggcgcaattgtcattctcctcaaaaaaatttagtgcgattatcattctcctttaattttttttggtgttgttgtacatttttctccctcatcttcatgttctttctacctgatgaagtaaatcaataaatatttatttgatctgattaaaaaataggaaaaggtaatttattgattgatttcttcaactaattgtaattttaaattctattgttatttccactattgacactcatacatatattttaattatatccttaacttaattaacatgtcatttgaaaaaaatgacaaggttattttaattttaagctgtcatttcgctttttaaagtaatttggtaccttcacatgagtatgttgagttatgattgcatttttttttaatgaaaaccccttatattttgaaaaaataacctgatcgtttaattttaagcttttattttacttttgaaagtaatatggtacatcacttttgaatatggtttagtgtattgagttgtgacaacattttttattgaagaacccgaatattttgaaaagtcacctggtaatttaattttaggtttttcttttgcttctataaaattgacctgatacttttactttggattttggtatagtttattaagttttaattgcatttttgcacaaagtgacatagttgttaaattttagatttcgtttttgcttcaaattgtaacttggtactttttacctataatttttgtatagtttgttaattttgattttatttttgcataaag

SEQ ID NO: 61938 - DNA, 774 bp, Cannabis sativa
tatagtagtgattgatgctaaggatgaattattttggaaaactgtctttgatagttccttttcagttaggaaaacatacttggcatgtatttgcaatcgctgctagaatgctggggaattgttagagctcatattgatgagtaaggtccatgaaagggtaaaaattttctcgtggcatctagctagagatattctaccttttgcagtagaattcaatttttttttttttttttataatggttctcaatctgtgttttgcaattcaggtgaggattcccctcttcatttattttttcattgcgatattgctgtccacttagggagatctggacactgtagttttttctcagaatatttgcagtttaatgataataaagacatggtgaattggctattgatcccctcttgtacccctttgattttggaaagggataaaacctctttctctattttgttctttggagggctaggatcactacattccatgaaggttccccccttctgtaatgaagttaagcaagaaatcttggatgatgttgatggctgttcaatgggagatattgctaaggtgctgctgcatcctgagtagggatgcacacggggcggggaattagtggggagtgctctccccatccccattaaggattttaatctctatccccgccccatccccgcttattccccattggggacggggcgggatatcccctaatggagcgaggacggggcggagaatctcctattgtaaaaataaaatttattttaaaaaattaa

SEQ ID NO: 61939 - DNA, 1306 bp, Cannabis sativa
  modified_base (423)..(448): a, c, t, g, unknown or other
ccatataatttaatcataaccctaggtgaaatagtttaaaaggaataagatggtctcattatccaataatctctaataacctagtttacaatctgtcagacaactagagctcttgagatctccttcttccttcttctattttgaaatctccttcattgttcttcattaaatttcgagcctatagtgagtgagtgcatgctcacccatagcaagtctagtactcaatcatagtgcctaagactatgaagaatccaacacttgaaggagaatcggactaagatcttgataatacctagcgacaaaaagtaacaagggttagagatctgagtgggaggagacatatattccgctgcaatcaatgtaaggttacttaaactttatatgtgtttaaattctactattttagaaattcatatttaggannnnnnnnnnnnnnnnnnnnnnnnnntctagatcctggtaaaatatatcccaacaataaacgtataaataaacaaataaatgaaatcaaagcttcgaaaagtaaaaaacaaaagaaaaaaaaatctcgaatgaatcaaaaaataataaatgtattgattataaattttgaatgtaaaaagaataaataagtaagtaatacacaatatttacttatcaaatataactcacaatcaattattaatatttctaatacaaaaataaaataaaaaattatttgaactccagaattgttatgaaatgtaaatgttaatgatatataaaatgggaattttttttcatacagctttattttggtaaaaatttacttattttgctctcatatacaaaattaaaaaaaaaaaaaaactcaattttttttcttcaaaaatacaatctctacaataaccttttcaaaatggcttttccaaatatttatatctgaaatcaccatgaactcacccaaataattcaagatctactccataatcgacgtagcttctccaaacaacaccactaacaatgtagaagctttttttgatcaccatgaatgtcgacgagaagcttttaccgaccaccatgaactccggcaagaagctttttccgatcagccatgacagcacgaccaacgatagagatttccatgaaaagttgacgagagaagatcacgattgaggcagatctccctgaacgcttaattacttgccaaattttctaggtttttcttagttaaaacaaatttaatattgattagtatgtttgctttaattattttcttaatcaattattgttgtttagttgattcacatatattggtggttttagttcatagattttagtatttttt

SEQ ID NO: 61940 - DNA, 788 bp, Cannabis sativa
  modified_base (39)..(44): a, c, t, g, unknown or other
  modified_base (761)..(762): a, c, t, g, unknown or other
ttaggttgttaatccaacacacttgttagtaaatctagnnnnnngtaaaataatttccaacatgcccatggctgaccgttggatgagatgaccttaggcatatctgctgccacgtgtctcaatcccaatttatgagggctatcagtatttaagccccatgatacaaagcaaatcttttattttccctctcatttccaactcctcctttccccttctctctggaatttcaaagacttacgcccttcatccatatctccgccttttcttcttgaatctcttaagtttcagaagtaatcgagaccaatcacaggaagaatcgtcaaaactaaaggttagtttttcaaatcttcttctgaatttggtttctgggtttgagaaaaaaccttgcttttctgaatgttttgaattttggaaaagaggttgaaaatgcatgtttagttgtagggaatacacgtagggttttattcccttgttagaactgggtaatccctaggagaaaacagacctgtaattggcataactgccaatttaggaagaatattttgaatattcgcatctttttgattgcttatctcttgaatactcgcgggtatttagatgagcatctctaatactcgcgtatctgcttcctttaggaattctggagactttatcacttttgcccgttgtttataacttagggatttatttatattctctgtatattttgttgtggggatactggttaagtctctcaaatggtgggtgtgtcgccgtattcnnatgctcatgcgtgcgatcgcatgttc

SEQ ID NO: 61941 - DNA, 1401 bp, Cannabis sativa
ctaagcgggctttacagttagggtggttctgaaacctaatatacttacctagaatgtcccaactgtaagaagcatcatctgggagagtgtaaaggatgaggatgtttttagtgtttttttcttggtcactacaagagggattgcccacaactcaagaaagaagagcagaagacagtagcaaagcccgctctagcaacggtgtttgctgttactcaggtcggtacagaagctagcccatcagttgttacaggtcagctctcggtcaataaatcttatttctctgtattgtttgaatggggccactcattcatatgtggtggctagaatttttgataaattatgtaaatcgtttgatagttatgataagggctttggaaacctactgcctggcggagaattagttatctccaaaaggtgaattaggtctatgccgatcaaaattgaggatagagatttgaatgactaatgtacctaagattcattgacaaggaactaagaaacttctcaacccgaatatacacttagagaaggaaacttttttctttttctaccactaacagtgaagataaaataagctttaatggctgttgtgtgtgactttttttaaaaaactattttataaaagtaattaacattttctatttcataacaatttcttacataattttggttatgagagactaacgctaacactaaactcctcaagacgaatatacacttaaacaagtaaacttttttctttttctaacactaatagtgaagttaaaataaggtttaatggctgctctgtatgaatttattttaagaaaatattttaaaagtacttaacattttctatttcataacaaaataaaacagttttccctatgttaagtctttaatggaatcactagctacaatagtctaaaattttagtatatccctatgcttaatttacatatatccagtgaaaaagaagagcaagttccaatctttatacttgtatcagtagtactatatgagtccacgccaaaattagagataaatctaccacatttacacctaaaatagaaactcctaatcattcgtttccacaaatgtagaaacacatatagatgaaaatcaagttttcaatatactaattaaaaacccaaacttttgtttctcctaaactcaagcaaatattgatcaacccaactccattcatccaatacccaaaaattaaaaatccaaccaaatcaacaaacagagatttcttcaatcaaattaaacaatgcaagtctttcattgcaccaaaaatacataaatcaaaatacaaaatgacatcttcgttcttcattgtgggtaatcaaaaattataaaatacagtacaatgcacacttcagaatcagtacacatgcacggggagagagagagagagag

SEQ ID NO: 61942 - DNA, 1329 bp, Cannabis sativa
acagaataaaataataataacttgtaaccaagcgctcctttaactcgtgaaaacttttttcacaccgatcagtccaaacaaacttcagttcttttgggtcagcttcgttaggggtgttgctatttttaagaaaccctcaacgaaatgacgatagtaaccagctaaacccaaaaggcttctaacttcagtagccaattttggtgttggccaatcccgaacagtttcaattttggccagatcaactatgaacccatctgtatccactatgtgccctaagaaagggacatgtgacaaccagaactcacacttcttgaacttagcgtaaagcttgtgctcccgtcatcgttgcaataatgatttgagatgcagttgatgttcttcttcttattcagaatgaaccagaatatcatcaataaacactatcacacacttgtccaggtaatccttgaatacctggttcataagatcgataaatgcagatggagcattggtgagttccaaagacatcactaaaaactcataatgtccataccaagtacggaacgcagtctttgagatattctctttctgaattctcagttgatggtgacctaagcgaagatcaatgtttgaaaagatcgtcttaccctttaattgctcaaacatgtcgtcaattcggggtaaaggatatttattcttgatagtgagtttattcagttcccgatagttgatacatattcgaagcgacctgtctttctttttcacaaacaacactggagcaccccagggagaataacttggtcatataaatcccaagttaagtcactcctagagttggattttcagctctttcaattctgttggagccattcaataaggtgcctttgatactggttccgctcccaaaaataactctattacaaactcaatttctcgggaaggtggtaatccaggtaaatcctctagaaatacatctagaaattcgcacaccaatctcgtattttcaggttagtgacatagtggctagtatccactgtagttaataggaatcctagacaacctttgcgcattggatctttagcttttaggagtgttattctaggtctacgcgatccttgtactttaaccacaaacactgctagattgtcactgtcaggttcaaacaccaccatctgtcgcttacagtcaattgttgccccatatttagacaagaaatcaattcccaggatcatatcgaaatcaaacaattgtagctcaattaggttggcagttaactcataaccgtcaatccaaaaatataaagacctaatccatcgagtagatacgattaggtctcccgagggtaacagg

SEQ ID NO: 61943 - DNA, 571 bp, Cannabis sativa
agacttcattgattaaattatgtaaacggaatagagtagcaaagacttttttacaaaggaactaatattttcatgtggcacattttccacccgaaaaaatggactgcactttcttttggccaggaaagaacaagaagtgatttagctcaccaattgaactatgagaaaataagttacccgaaggagagaaaataaaaaggcaaacaaatgctgtcgctaagctactagacaaagcatgaaataaggagtcaacccctatctgtgtgaagtcacacttgaagttgcaaactatgtttatttaagagtttaaagtttccaaagccaatacagttaaaatttctcatcccagacgctgtcatttctatctgtctactaaataaattttgaattgccaaactatttgaggtcctctctcccccaaaggtaccttgttttaattatgtaaacatcagatcatttttctttcgaacaatttcattatgtagaattgctaagggatctttcaatttcagagcttgatgctcctaaattttcacaatgtagtacaatactttcactatcttatcattgt

SEQ ID NO: 61944 - DNA, 795 bp, Cannabis sativa
tctaatacaaactagggttcttttctctcaaagatttttcgtccctttttcagtacattctgccctatttatagttacatagggtggcacttaattacaatcagattcatatcctataacagggattttattacgtccccctagaataaatgcagctatatttgaaacccacatagctttgatttattcgcttttaacgggtcaatgctgacaggggtttaatcacgctgcaaggtgtatctcactagggcatctcactgggatagaaacaataaccttgatagcgagctggagcttttcccatgtcttccgaggtggacaatgtaaatctcatcgtttctgatattgaagacataacgctccatctaacaattgcagttcttgatgacaaggtgaacttcagcagtcaacatcatttgaatgtcaacttctatctgagagagttgactcaacggagaagtggatctcattgaaagatgtctggacctaattagtgaaggtaccacgagtatgccttcctatagtgagatggatgcctcgctatttgttgttcagatttgtccaactgttatgcttagtttgtataatgtaaattatacgctaagtgttctaacagtcaatcatatcttatcaccacttttttatacgtagcgaggttggtgcctcgctttgtattactaatgcctaccttatgattgcgtcttctaatgcggaaaagtttctcgtcaatgcatgagtcaatagtttgtacatccttatctcacttaagtatttacagtcagcgagttataaata

SEQ ID NO: 61945 - DNA, 1279 bp, Cannabis sativa
catatataatatgtgtgtgattgaaatcttccaaaaaaaaaaataaatacttaatattattatttttgtaattgttttagttttgctggtattattgtatttttttttcttatttttttgtatagagcattattattgggcacctccaataccagactaatgtgacgtattgtgatttgttaataatttttcatattatttatttaattaaaatgtgtggaatttgatattaaatcaccaataacaatatgccaccttttattgtgcttgataccttaacttagtattttttttttatactattaaaaatattctcacattaataatacgcgcaactataatacaattgactgaaaaaatttaaattattattaattaatagtatgagttctaatagcagatctaatattctcaaataaggaaatatttttttatgaaactgattatttaaatgaggatatggaatgattgcttattctttatccatttttttatgagtgagtttatactttttttttaacaacaaactttattaaaagacccaaaccaaccaaagcagaaacaaattctacttggaaataagaggtggcaactcctcaacattgaaaaaactaaacagggaaaaattaaaaacaagtttagagagacggtgagccgtctcatttctagaccgagggatccaagtgatcaccgactttgggggatgatctaaccccatcaacatatgtccgaacacataagctatcttctaatcgggagccttacgagatttgattcaaagcaccaaagtttgacattctgaagcaaaattgacattaaaccaaccatgaatttatagcattgcaccgcgtggaagagagcccaggtctcaacttccagaggggacttagcctcgagacgcactgaaaagcttccataaccacgccatctgaatcggtgatcacaattctagtagcagagcacaagcctttgctggctgctttaataaacaccacatggtcgccgtgtagcagaaaatcattaggggcattaagagaatgaccaacatctgactgagcaggccacgccaaggcaagatcagcggccatggacctaattcgatcaagaacccaccacagaaaatggtcgaatccgatcatggtaggcttggtttctaaattaatcccaatccaactaaaggatcaatagggcatgctaaagatctatgcttctcccattaggaacaaggaagcaagactctttacgaatgaaatcacgagtagcaaagatacttctagca

SEQ ID NO: 61946 - DNA, 1206 bp, Cannabis sativa
acaaatattaagtgtgtaaaaggtactgttatacattttaatttgaaattcttaatattataggagttatggtgtgtgcatgagttacataatatccatccatgggggttatgagtttaaattttaaagtgtgtgatcttaaacactataaatagaggtctttggttcacttgtgaagacacattttttgtgagtttctatcaaagagagcatcttgctagaaactacaagcttgataaatccagaaatctatttccattctttccttttcccttagttcttgtggtaggagaaaataagcttttggacaaaggtgtaatagtccttgtgtgattcccctattatacacttgtggtgtatgtggtgttgagattgctctcacatctcttatatatatgctatttatatatattgtgttttaagtgtagcttattgctttgagttattattcttttcttcatctctattctctattttatgtgtatattttgtttagtactgtcagtgacggacccagaatttttattatgtgggggcttaattgttattaaaaaaaatttaggtctactttatttaatttgtttatttttgtggggtttttttaaatttttttgtgctataattatcaaataaaaagaaaaatatttaattttttttaatgtatttttttttcactgggggctggagcccccacaccaatgtgagtgtgtccgtccctgagtactgttgtaatattatttaatctatgattttgtcctttgtatttattatagagttataattttgttggtttggtatttctattggagcacactaatttctaacagaaactccacaatacattcggtaaaattcaaagtattggccatactttaaggtattaagttaaatatattttttttttttcaattcgtgtaaattatatttataaattatttttttttttcaaattttatttaatgtactattatactttaatagacttatatttttgcatcgctaccgatggacaaacaaattctattcattggtagaaagggtattccaactcaaaatataatggcagcatgtgattttaacatgttatttacatttgtgtggtctgaatgaaatggaactgcacatatacttgtatatttttgaaaacattaaaaaataatgagatgcggcaatgtcctccaaaaatcgagagcaaaaaaaaaaaaa

SEQ ID NO: 61947 - DNA, 977 bp, Cannabis sativa
  modified_base (28)..(48): a, c, t, g, unknown or other
ttcgtatttaggatgttaaacaacatannnnnnnnnnnnnnnnnnnnntggtaaaacatattccaacaattatctcaaataatttcagattttttaacaataaataaaatgccaataaataatcccctaattatatttcggccctgaactcggttcgattcgaaatacccggttgtaactatactgcgccaacttttcagaacacacttgaaaaaggacaacacatgcatactatataataatatagtccatgagcacgtaaataaattaaattcacagttttacccctctcgggtcaaaattactaaaatgccctggctcacaaatggggtcttaacttgtcatatctcatattaattcacatataataaattatattagaatataattccatattaatacacaattaactagttagggttttgctaatccattctcttaatcttaggctattacagactccttctggatgacaagttagacttctgagaacgcccttccggatgacatctcacatttcataaatgaattacttccaaagtggacaagctagactttcaaaactcctctctagatgacatctagctttccacgagacttcttccgatgatcttttaatttggaagaactataccacaaattccacctagttccttaaaactaaaataagatgatgatgaagaaagaatgcaaccatcagggttggtgttccagatatctcagtatactaacttctgagattgatcaagtccaaacaatgcttgaacttatttattgctaagaccttagtcccaatgtcaataagattatcttgccattcttcatgataagtcaggttcttggaaagatggatggatgactggttgtccgagcacacagtcactccttctttcatttgtttcaattcatacagaattctctagagccatagagcttccttgaacgcttctgtaatagccataaattctacttccatg

SEQ ID NO: 61948 - DNA, 848 bp, Cannabis sativa
tttctttccaacaattcagtcagcaaagacagctgcttgtacaagaggatcttaaaaaagtagaaccgaaaaaaaaaactctagaaaaggtgatatatatatataaataaataatttcatagatatatagctagcatagcctcttgctctaaaataagataaatgcttagttgtattcaatcaaagtttgtccatatgtaacaagtgtttctctcttgctttgaaacactagagcaaaaaatcattttagtcattcaagcagcctagacataaaaagtactctttcgtgtcctttttatattagacatgatattagtgtccagccaaattaaaaaatgacaaatatatcatgttttagcgagattagttaaagcttcaatcactacaatttatcgatcccacgataattattttttttttcaaatgtatgagttttaaaaattttagaccatctaaccttttaattctttatgcacaaaagttattgtgcaaaatatcttatgcacctacataagaaatttcgttcaatttcaaatgtgaaaaagataccattatttatagggtaaatagtgacataagtacctaaagttttaaatttgtaagtgacataatctcaatatttatttttagcggcataagtaccaaatatttgtaaaactgtaatttttttctaatttcgtctgtgcaaactctattattttcttaaacaagccacatataaggttcatattcttgatcatttgttctagacagaaatatgtagtattagttacttccaaatattcttttaataaattcaaaacggagtctatgataaagctgggggaaaattacagttttacaaacat

SEQ ID NO: 61949 - DNA, 733 bp, Cannabis sativa
gaaaaagataaggttgaagaagctgactcactagacggagcttgggcaaggcctaaacggtaataagaaggttgttggttttcttttgtacggtggaaggtcgatgaaagaatacgaggaaaagttctgagttttccttgagtttttctctctggaatttttctagaagaaaagaaaatgaagtagggggattaagaagaaaacagggcttcatataggcctctcttattcaattcctctccccccacccaaaaaaaaaaaaaattaaatgggaaatgtattccctgtaaaattgttatggggaagtggaagagcaaaaaatacatttatggaagagtgcagccatcaacgcgatctcctataaagtatgatttgtaactgccatcatgacagctaatatttaatggacaatcaaagagactgaaagctaaccgttcacttctacactgaacagtcgccagagtccgatcacatagagctcatgtgcctgctagtatctgtacaagtgtcaaaatttcccatccagacagatgtccgtacggaaacttaggggcaaatgttatctcaaagtttgcaaatctgacgtggtacttacacgtggtatgatctagctgacctttcatgtgaaagggactttcgggcaagaatgtgcctggcagctcccatttgaggctagtattcatggactgtggatagccttccaggtagaatctggtcgggccatcagtatgcc

SEQ ID NO: 61950 - DNA, 918 bp, Cannabis sativa
aaattagttcaaataatgaattgagggttaaatttgttagagtatatatttatttaaaattatcattttaatattctaaaaataataataacaataataatttgaataaataattagtgagatttttaatttgaaatttaaacttattatacggttggtacctgatatacgatacattttttttttcgaagccctagcaaccatatacctatcatattcttcttttctctaaaagtataaccatctttatgtcaccaaatagataatcctgaaagctttggagtcaacaattagccacacgtatctgtataccagtattttgtgtcttttgaacagagaaactcgaaatcttgaggtaatttatttgggtattaacgataatataaactaaattcgtagttgtatttttattttcgttttcaaagagatagcatttcataaaactacaatatctctctccttgtgtgttcgtttttagtgatctaggtaccgttttaaagataatttaatgatctacatttttcatgaaaagacttttacctaattctgattattttggtgtaaaaaaattcatgttttcatgctggctgtcgaattacagttttttcagatttccttctgatattacctcagtataagtacgatatctctctcgatatctattcttttccagcgattctagtaccgttagaaagattcaataatccatattttctttgaagaaacctttccctaattcgtggttcttacttatcagaaattagtatttttactcggttaggatatctcgttttaagttttatttcagaaaaagtatccttggcaaaaactcaatatctctctcaattttgatccattttaaaagatctttatctcgttttaaagcttagaaaaatagctacattttttatgaagaaa

SEQ ID NO: 61951 - DNA, 1195 bp, Cannabis sativa
ttttcacatacgtgattcctcgcggcttctccaatgggattgtaaaatgctaaatatggtggagttattgacacaatattattttatctagtgcggtgaatataagttgagtccttagacacgataacaaatagtactttttttatatttattaatcaaaaatatttttatattatattttattaaaatatatttcataaaatgagtgggttgtctaatatacattcattatatatttaagtctagcatatactttacattaatttaaggaatctaataagcacattatatataaaagtgtgtatatcttaaagaatataaaaatggagaaaaaaattaaaataaataaagtgcggtgggtatacaatgcaattttctcataaaaaacagatacgaatccaaaaggcaagagcacgattagataccaaaaaaatacgagcttggacacgacacgacacgatgctacaaataagcatgacatggcataaaaaaaatatgtcttcaagtacgacacaacgcgagaagcacgaaagccacgacacgtatatatgaatagactagcccgaaaaacacgacacacaataagcttaaaaagtacggcacaacatattaaaaaacttataatttattaataatattaaaatatgaatttattgattataaattataaataaggtaaaataataaaaaaaacttaaatattatatttatttataaatgtgatataaaaatattgagtgtttataagtaaatatttaaattctaatgatgttgataattttttatatgattatctgtaaaatattgtttaaaagttatataaatagaactagaattttgaaatatacatttattttagtaattgtaaaaaaaatatatgaaaaagtaaagcacgaatttaagtctaaatatgaaaacagactgacctgtttaagaaatacgagtcggcacgagcaaagcacgtcacgaaaatattgaacctatagggcgtgtcgggcctaccctttaaaatattggcacgacacgacacggcccatatttttttatgggaagacacgacacatcctattttttaaaaagcacgaataaaaacgagtcgggccagtacggcacgcacaaacttacagcactagttccaaccaaacactaaatatcacaagagtctacagtatctcactactaatagtgggataca

SEQ ID NO: 61952 - DNA, 1048 bp, Cannabis sativa
cagtggtatttcaagttaccacaaagaaggttcaattcctggaaagctttctcctcagagtttcatgcacggttctctttttctcgccaactcccattgcatttagaagacctggtcaaagtgaagtaaagactaggatagcctttctgagcctacataagcatattcatgatagaggctataaatgtagcatgattaactaaagaggggaggatggccgcaatactggggggcatcgaagtgctcagagaactgttgaaagaaatgaagaagagtgatcatgtagactctatggtggattttcttgaccgagcatatggtttcatcaaacttgaacaggcaatccaacgggcggatgtcgagcccagattgggctaaccacagaccccctcggtaggagcatctgctctaaacccccaataccctaacagttcaaatacgagcggcaagagatccaacaacaacggtagacaaggcaatggaaaaaagggaaagttcgcaatcaaaaccaaacagacccctagagaaaatccttccaagttcactaccttctctatcttaactgacgacctagagaccatctatatggcaacacagtttgtagtcctgtataaaaaacctgctcccatgaaaaaggacataagcaagcgggacatgtccaaattttttcgctttcatggagactatggccatgacactaatgactgaaacaacctgaagtgagaaattgaattcctgataaggaaaaataacccgcacgtgcagaaatactcaagggcaaccagaatcaacgggctgcccaagcagataacaaccaagatctgttaatgctaccacctgtggacgggcatttacaattcatcatcgggggcccacatattgctagagatttgggcaaagctcgagaaaggtatgctcgaaatttacaacattaaccaaaggaagtaattctggccgtagaagaaaggaagccaaaaattccacgagtaggggaacccactataaccttcactgaagaagatgctatcaatgttcactttccgcataa

SEQ ID NO: 61953 - DNA, 1778 bp, Cannabis sativa
ttaatttttgaattatgaatgagagatattaaaaagtaccaaagatacatattactatccgagtattatattactattggtgtaaacatattagagctcatataatttaatgtaataacttcaataaaatatcgtcaaccattcataaaatggtgcctcgcataataataatattcattataaatgttaaaatgcaagtagtacctaacacttcctactatattatattattggtgtaatttaatatatatcaactcccatataatttaatttaatttaagtaccttatagcaattatcattttcaaaccaaattttattaattgctgccacatttatctcggaacaactcttcaattaatgagttgtccaaacttaatatatatgccataattttaatattggaaatataattagataaataacaaattattaaaattatgttcatagctaattaaaaaagttataatttatttgttgtgttaacaattttattgttacacatataaatgaatcaagcccccaatgatatatgcaatgcaagtgatgagaaatttcatttccatttccatttctaattatattttattttaataagaaaatattaattaatattatgtaattataatcatcaaatattaaacataactgtacggcctcacaaaatttctgtcatagccctcattcggcgatattgcaggccggcggagactgtgaaccacatttaatcactcatttaacaacgtcaaatatttacacacacactacactacacttactcttgaaatgaccaaaatacccttcaattcaaatagtcaactcctcttctctcctctcctacaaataaatatatttaaataaattgcacgtcatttaagaaattaacaccacggttggtcccccattgttttaattaaattttattaatactggtttttggctaaatttaatttttgaaaaattaaataaaaattataaaaagtacgaggagaggtggcgctgtgttcccttatatgaccacaatttaaacaaaaggggtatgatttaatttttatttatttacaaattcgatgaaaaatacgcctctttttcactgcccgaatctctctacctcaataaactaatcccaattagtttaattaattaatttttattttattagcttataaattttcaaaattgcatccacgcatacacaaatgtccgtatcaaagataatatatttaaattctaaaaaaaattaattaaataaaaaatgtaattccctttgacaaaaagaaaatgtggttacacttagctactgtcactatataaaatataattaattgaaatatgagtatttattggaaattaataataataataagagaagggtcattaaaggagaaggagtgtgacagaaaagtagcgggttttccggtgcaaaggacgaagaagcaaaagctggtgcggcgacacgtggcgcaaggaaaaccgtgagattagcatgcgagggatttagttagcggttgatcattcccatttggagatgtgaaaacaacacacacacagatagcttagccaaaccaaaagagaaagttagagagagagagagagaaagacaagttaggggagagacttaaatttggggttcattgcagctgtgcagagcagtagagagagaaagaaaaagagaaagagaaagtgagagaggcatggcggcgttgcagagagagaaacttaattgtggtgcttccttaaataaatgccacaacttaaatttaagtctctcataaaaaa

SEQ ID NO: 61954 - DNA, 2308 bp, Cannabis sativa
atcactgaaattaattatattaattgacactatagtaaaactcaataaatataattttataattactaagagtttaattttatatttatagtcgagtaagcatgaaattaataaacaagattatttcattgatgagatttaataaataatatagtttattggagcttcaattataggtccatagtctctggattgccacattgaaatactgtcaacggtaggaataaaagttgtatattaaagtttggaaatatatatatatatattgatttgtcaaaatagtatttatttattttataataaataatttaattttcaaatttattaattaataaattggaaaaaagataatagttgtctggacaaaagacaccaccaatgcctcattaagacataaatgaggccactatcactgtgtcttaacaaagtgatagacgcctataatgtatggttgttcccactggatttatttttagatatttaattaattaaataattttaaaaaataaatatttatttaaatttaaatttaaaaagtagttataaatatttttggtggttgagatattccctcaagtggttgagagattccctcaatcggttataagaaataaatatctataagaaaatcttgttatattattgggaaatcaccccatatactattttttatttttcatttttcaactttttttttttttcatttttatggtttgagttgctccaacaatttctatgtgggttgctatgtgaatttgggttgtaatttaggttgctccgttggttgttatatggatttacgtaagatgcaaaaaaaatctatttgaaatgtaaaataaaaaaaaaaatcttatattatttattcaagtaattaaatttgatttaataaataatttgaatttaaataaataaaacctttattggttttaatctagatataccattaaaaccaaaaattgagacaatgtattatttttggtaagcctatcactatagaatagttcttactcattgttgagaattcaatgagaacttcatatacattttatcctactagctcactctagtctttgtgtgcggtggaagatctggaagattacagtgtgagtatttcgagatcaactaaggatacaacatatagaatgaatcgaggacatcttgataggcttcaagaggtatattatattttcgtctacttactttcagatataatatatatacatatggtgatcctaaagatgtggtacgatgatttagaaacttttattccactgcgtacctgatttggtactataaaactaacataattaacacatgccaaatgacaaatcgaagtcccccacgccattctttcctctgcttcaattactggacacagaccttcacttaggggtacacatcgggtgagttttctcgggttttaagtttttgggttcgggttttcaggtttgggtttgtgttttataggtactgaacctgtccgtgtgagggactagtaggttttcgggtgtcaagtttaggtgggttgggtgtgggctgggacgggtccgagtgggttggggactgggttttgagttgggctgagctttcagttttttttttgttttacattattacataaaagtgcacataatttcacccttatttttttttttttgaaaaaatcacttttttttaacattttttttgaaaacatcaccttttttttttacatttttttttcagatatcacttttttttttttacattattttttatttttaaaaggaggtctagggtctaattgtatatatataaacgagtttaatcagctagctcaagtggtcataagagagtgcgtgtgtgttggacgtcctgagtttgagtcccaaattatgcattgtgtaatatataaaccctaaactaaaaaaaaataatttttttgggtgggtccgggtttgacctgggttttggggtgttataatttcagaacctgaacccagcctgatgagtaatcgagtgtaacccgaacccgccctataatttttgaaaccatcaaatccaaaagatgaaagtcatgcccccacacactgtcaaaaaccatcagatccacacccttgagccgaatcagacaccattgacgaccaaagccgcctaacaacaacccctcgaccatagaagaaagccccactagaaggaagcacgagaaccactccgagaaagccatgtccctcatgaatatttccaaccagagccacacccaaggccaaaaaaggccagcaaaccttggtcaggagaagaaatatggcggcagctttagatgtctaag

SEQ ID NO: 61955 - DNA, 1042 bp, Cannabis sativa
ttttaaaaagttcatatttacggtgttaaacaacatacttgtgagtagatctaagatcccggcaaaataatttccaacaagcctctgtttatgttttttggggttttactctgtggcatctgatctctcacacttaactcttttttcttattttgccagatcgctgcagagaccggtcccctctcaaagactttaattgatcatgggtacgtcatgtccgagttcgagggcatggacgaggccatgaagagtgtgagagatctggcagctgagaggaaggtgttccgggaggaagcccaacagtgggaggctcaggcagagaggaggcctcaggaggcgttgaaagccaaggcagaggagctgaagacccgagatgaggtcgtggctaaggcgaggcacgagctgaaggaggccaaggaggcagctgaagatctgactgccaggctgaagtcaatggaggatttggatcatgctgacttgcagacgacggccaacttgaccgttgaggtgaaggagctcagggatttcaaagatgaggccctaaagaaggcgaaaaaggatgagctcctggcccttgttgtctgcaagcactgcaccaagcgctttgatgatggcatctttatggcctggcagattaatggccaaaacctcaagctcgatttctattcaaattatgaggaggttctcgtccgcttttgggagaagaaaaagagacttgatgccctgttggaggagcgcagggggcctcgtcttccaccacgcattgattaagccaaccgttaaccactactgctattatcactatctctttttttctttctttctatttatagtccttttccccctttctaagacaatttatgttttttcttaaggggagacaattaaggcctgtccccaggcccttactattttttttagagcttatttgctaggttcgaacactttatatttatgtttaaatacatactttgctttttaacttcgttaaacttttggcctgttttacatttgtcaacgtggtatgccttactacccccct

SEQ ID NO: 61956 - DNA, 2191 bp, Cannabis sativa
  modified_base (2160)..(2166): a, c, t, g, unknown or other
taatacttaacaaatgtaagttactcttaactaaccacacatacaagaccaataaatgaataaagcgattaattatcattcaaatcatgtcaattattaagtacttgcacttagtgagtttcatatcaataatttgtctaacatgtgtacaaacaggtttgcctagttatagaggccaagacagactactgtgatataccctggatgcaagtaaccaggaagatttcagtcaactctattacttgggaggcacctacacgcagtacgacaaacacaaaatggcacgtgaaaatacttaagcaaaaatttaagacttaagtatgtgcataataaaggttttatcagatatcaaagactatggttaagattcaaggttaagacttggtcgcatgtctgcataaaaaataatgaaaaagatgagctaaaaagctgcttagttggctgaatagtgtaaggcctttgaggccgaataacaaaaaagttgtttggtcggctaaattgtacaaggcacacctaccaacacctttactattattctctctaacttctttttgcttcttttcagcttactccttagcacaaaagtctaccaagacagagaaaaattgcctctgattcctttatgactccagaaggtgacggtaaaaactttcactgtcgaccttgttggtatattgatcgtattagaaggaaaaagctctgaagattcacataatgcaaagatttgggacgaaaaaagattttttatgcgacacctatactagacggttcatccaagtaaagccatgcgtcacttgactagtcaaaggaagaagccaagaagtccccgtgcaactggaagtctgtacacagactttggggaaaatgttatcctaatttttgccttgacgatgtggtatgatgttatatgacactcggcaagcataatcaacaatgagtggatgaaggatgaagaaatagtctactcagacaaggccaaatggaacatccacagaacatatttgcccagtgaacgtatgagtaacatcccaatcatgatgtatgccccttcgtatagttggaaaggcattactagaagaatatacagacagaaacaagctctctagatgaatcgtccgaactgaacgatacactttttgaaagtacattttgtgacctggacggaccttacattcttcgatatgtcgtctagagtgagttattatccaaaaataactcatttgaagaataagctgaaacattcggacagggtaaatgatgccatccgatgagcatcaatctcgcatattagctcgcatacaccaaccagggtgaatgcgactaacagatctttaaagatacttttcttatttattttatttattaaattcttattttaataggatttccacacgtaattgctgtaaattaggaaagtaaacatgttttccattttattttttatttgttttaggaaacctaattgatgtaatttttatctataaatagtggagttatttcactattgagggattcaaattttgattcaagagagctcttatgctgtaaaaaattgtaagctttcaagagagatcaagatcttacttgcttctcttctcacaagtattacaagtaaaagggaagtaggctgttaccactatcacgtggccaaatctctataacaactttgtgttcttattgctcaactttattcaattattattgttcattctaatcactttaattgacttaacgttgttggcgacaagtgatgtcaataaactaatatctaaaaaatgataattaatttttatgttgaagactaaatgttatgtatattataattttattgaattattattttttagtttgtttaaaatatatatttaattataaataataaattaaatatcataaatattttcttaataaaatttaaatgcgcaaacaataattttaattaaaaaattttatttatttattttaaaatgtataattttattaaattttatttaacattaatattaataaaaaataatttgataaaattaaagtttttcttttgatgttgtattcttcattagccatagtatagcattaatataatataatctaaaccaatttaatcgtgtagtattattatttaggttaattaggaattttttcccccgaactttgacnnnnnnnaaattatgcccctgaacttttttgg

SEQ ID NO: 61957 - DNA, 842 bp, Cannabis sativa
agtatagtgtatagtaaactatacttagtagttctatattaaagattccttttactttaatacactaccgactagttttattcatatcatataatgttaatttccttgtacatctttacaagattataccttctccatatgaataatttttttttagatatttattagttatacttctatagttaatgtattcatttatcttataattgtatttcatgtattctataatatattatccattaataacttgcttttagggcataaatctcaacaccaacattcatttttctattccatgatgtagacactttctgattgagtctttcaatctctcttaggcttcatacaatgattcattgtctagctgataaaaaatattgatctcccctcttagcttatcaactttagttgggggaaagaacttggagagaaaatttatcgtgagatcttcccatgtggcaattgagttaggtggcaatgacaccaaccaactcttagctcattcccttagtgagaatgagaacaatctaagttgaataacatcatcactaactccattcattttgaatgcctgacagagctccatgaagttagataaatgcatgcttgggtcttcattatgtagtcccccaaactggatagtagattgaaccatttgaataatggcagacttgatttcaaaattattagcatcagcagcaggtggtctgatgcaagactgaacccttgtcatggtgggcaatacgtagcccctcaagtttctggttggtggattcttcccattagcttggtcttccactacacccccattattagccatcacttcttctacttcaacccct

SEQ ID NO: 61958 - DNA, 1425 bp, Cannabis sativa
gacagtctttggaatgtcctcctcgtagattctcaactgatgatagctcgatcggagatcaatcttaaagaagactttcttttcttgtagttgatcaaacaaatcatcgatcttaggtagaggttacttgtttttaatttttaacttgtttaattctctgtagtcaatacacatgcaaagtgatccatatttcttcttaacaaacaacaccagttttctgtagtgtcacacattgggtgggaaaaaccttaaataaagtatcccctaaagttgtatctttagttccttaagttctgcaggagccattctatatggtgccttagaaactagctctgctccgggtgctaaatcaattacaaaatttattttttgctgcaagaaccctaaaattgatcccataaaaacaaacagttcctcaccctcaggttgaaagatcatcatatttcgcttacaatcaatactagcagcatatttggacaaaaaatctattcccagtatattatcgaaatctgctaaactcaattccactaggtcagtgctcaactccccatcctcaatcctaattggtgtagacataatccacctttaggagataactaattctccaccaggcagtagggttccaaatcctatttctaactgtaacaaggcttatccaatttatcaattactttagccgccacatacgaatgagtggccccagattcaaacaaaaaagagtagtaagagttgttaactgaaagctaacgtgtcactaatgagtaagagcaacaccctagctagagccagtttagcctctgtcctttgatcttcggtagttaactgtgcgcagtctcttttgtaatgtccagatactccgcacaagaaacatccccaacctttacacttgaccagatgatgcttcttacaattagggcattccgggtaggtgtatcggttctcaaatccactctgcatattaccacagccttggttcccccagaacctcttgttctgattcgagccaccagatgcagatgaaacttttcttttctgatcagtagttgaatcactaccacccctaccataactcgaggtaggaggagcagtggctccactaacaacctgagttccttaggactcttagatacgttcaattgcgccctcagcttgcagtacctttccaaccatatcagcataggtagttatgtcatccgttgtgatcatcaagtcaagtttaatcttgggattccaccaatccagatatttttctttcttgttaaaatcagttggcactatttttcttgtcaaacttgttgtatattctgtaactgacatatctcttttagagtcaactatgtaaattcttttctctttacactataggtagcctccttatagtacttagaattaattatttcttgaaattccttctaggttattctg

SEQ ID NO: 61959 - DNA, 861 bp, Cannabis sativa
ttattattttaatttaattatttatatttattaaatttattaaataaaattaaataaaaatataaaaatatgaaatatgataaattattttattatatatttatgatatatatttgattatatatgatatattattttattttaatatttaattattttaatttttttgctgcaaattgttcacttttatttatttattattatatatttttattttaatttaagttttattttttggaaaaggaaataaataaaacagtccaatctatttttaaaccaaatacaagattactttcaagataattcaatcttatccagtttagtccaatcatgtgtaacaaacggaccctaaggtactttcattttgaattttttctacaaaataatttatttgaaaaaaaaattgcacaaataatataaaagaccattttaatttcctccaatttagggatgtacgtggggatggggcggtgtagggaatggagtccatgtccccgccttttattatttcccttgttcctgccccgttcctgattattccccaacggagaatggggtgaagaatccccgtcgataatagagataataacagggacctgtttattttattaaataaaaaatttctaatactgataattttaagaacatttgcaaacatcaaagtgaaatcagtaaccacataaaatttcttcattccataatctataatcatgcacacctgttggaactacaacaaagacaccacttacagttacagaaaataatatagcgtagaagtttgggattggctaggacataggcagggccggtcctgagttgaaatgggccataggaaaaaaaaaaagggacttactataaaga

SEQ ID NO: 61960 - DNA, 915 bp, Cannabis sativa
atggtttttcaccattactagaaactcataaattatcaaatatttcaaatttctttattcaaagtataatctagagtgaccgtcttaagaatttaacgataactcatatctacccctgaatgtacatccatatttttgaatatatgtgatcttactttcaagttgatattggcatatattctctttatagaggctgaacttattaaaatcactatgaatatgatgcaaatgccataaatatattactatggatgttgtattttgatgacttaggtctagttacaacaaaaagtttttagaatagttcaagtggatctggtcacaaaatacaaaactcataatccatacattaacataaagtttggatccattgatagaaaatggatattaagaactagtgaaagttatactttcttgtccaatgtattttggaaactaagatttaaaatttttattggaatctaaaatttaatatctagacttaaatttatacaaaatattctctgagtaattattctagcttggaccaccactactattttaactttaactataagttgcctttagtaagcatatacaagtaggatactctctaagatcgagagtttatattatttcgggatcaaattgatacagtgtcccgtttaggcaagagtcaaagatatcatttatttgaatggagttttcaactcatctaaaatggacactattttagcaatcttttattcgatcgaaataagaatatgacgttgttttgtttaggcgagagtcaaggttattctatttcatgagcttctaccattgtttcatactttgtaaacctactctcactactacagtatggccttttagtgacactatttagtgacacacattaaagtctgggtcactatagagttaggaataatttttagt

SEQ ID NO: 61961 - DNA, 674 bp, Cannabis sativa
tttatcttttaattttgcagatttgaaatagatgaagagttggaaaatatcaatagaaaaagatagaatatcgcataaaaaatatcaaggtggaaaaaattaaattcaagcccagaaaaagataaatcacgtggaatatggagcagtggagcacatgggccccagcccagctttagtgtgtcgcggcccgcttacgtggacaatcaaaaaaattatctcaggaaggtcacacgggccgcggcatgaagaaagctgtgctgcagcgcgcctcctttaaaaaaactcaatcagcgaaattttttgccattcaccacaattttttcagaaacaaatttttccaattctttttctctccttctatagctatgaccagaagccctataaacccaaaattttccaatttttacaattttcctaccaaattccttcatcaaatttgattctaataagccacaaacataacccattcacctatttcatcaatagccacccacattactccaattcaacccaaaaattttagaaaaacctaaactctaatatttattgtgttcatcatttttttgggattcttggtgcaacaacgcttctatcatacaagtaagtatttttctcttcattcaagttttgtgatttaagagtaattagttgtcgattgtgtgatattagaaaga

SEQ ID NO: 61962 - DNA, 1353 bp, Cannabis sativa
tggtatagtggttgtaccttagtaaagaacgttcttacttatctgataagccttgtggataggtgtttggtagcctagatataagtcggtaatatatcatatgttatatgcttatcttaccaagtttgttaactcacagatattatatttcgtgtgtaggtaaaggaaagagaaaagctgaactggagtgagttttgagctcaggggattattgtacatgttgagacggaaaaacctggagtgttcagtctcaggacaaattgggctgtgttttgtagtcgctgtgcgatatgtctataaaacttattttgattatgattgtaaaagtttaaacacgggatctcagtttatgtatatatatgtttataaaatttaatagtttaaatcaaaaatttatcttggcacgatttttaaggaaaaaccgtttgattagaaaaggtggcacaataattaaaaattattgtagcgcgcctaagtatcagggcgttataatttcggtattagagtaaccaaatttatctaccaaagatagttgagacatgtacaatcaccgtcagagaaaagctcaagtcacggttcagtaaacccttagttgtatagtaatttatgtgattggaaagtatgtttgggagcataatagtttataattatttatttaaatacattgccgtaaaatccataaagtgtggtatatagagtttatgtgatcgctgtctgacctacctgacttatgggttcacaggctaagtcctattaaatggacacccaacaaaatatgaggagttagggtgacatggttgagaccagaggcgatcggggaggtcaaaatcccttgaatccatgttgacgcggcataggtcgtggaaggtttctgggtggtaggcatgagaatccaccccaagctcctctgaattgggagcaagggtttgtagagatgtaagcctaaattcttcaacaagacaaagaaattaagaggctgagacaacaaggtcttcctgcactgccgccgcagtaagtgtcagccattatggttcccgtagtgccaacaaaccaacctactgctagtaaccgaatgaaatcactgtatgagatgttttgtaaccaggcgcttccagtcttttttggaggtccggatgttatgaaggccgagtagtggctcactgtcattgagagagtcttgaatttcaagggagttgtcaggaatgaccgagtgacttgtgctactttccagttccaggaagacttatttgtgtggtgggcgttagtgtccctcactggagacgtcaccaccatgatctgggaagagtttcatgaattattttatgccaagtattataatgaagcagtccgcag

SEQ ID NO: 61963 - DNA, 811 bp, Cannabis sativa
ttaattaattaattaattttttaagacaaaataaataaaaaatgaatgtgtgattttttttatatatatataatattaataatatgaaaattgaaatgtgggttgttggttgattcttcttctcttcttttcctttttttcaattctcttatttattttttttcttagtatattttaaaggtttatatttttttattaaagaaatcagtcaatcaagacattttttttattgaaaatacaatttggattcaaattagaaaaataaattaattaatcagctgttcgattctcaaatagttttacaaaagaaaataaaataaaatcaaatgaaaaaagttgtaacacacttaattttaaaaacacatatattcagtttattttaccatttaaaagatacaacaatagatttgttacagaaggttaattcaattcattaatttaagcatttaactattatataatgtacgtaactacaccattagcaactcattcaactacaggagcctgttatcttaactactaacaataattcaatagtgaagcaccgtaaaacaaaaaaacgaaccaataacgaaataaaatgaaataaatcatgttacaaaaacaagactaatcacagtagcatatagatcccgaccaaaccacacttaagcccaaaaaaaatcggcaagcttggttggagaaaaaaataagttactaacaagtaaaattaataaagaactatatcttatagtgttgttggatactataacacctaataacaatagtatttttttaaaaaactactacctacccgaatgctcaatgcttt

SEQ ID NO: 61964 - DNA, 942 bp, Cannabis sativa
  modified_base (815)..(815): a, c, t, g, unknown or other
  modified_base (888)..(917): a, c, t, g, unknown or other
cactatattttaaaatgcaaggtgtgtttggatatgaggtggtaattacatatgaattcttaatatcttatggcaaaatagttagtaatacttacaagggaaaatgatatttttgtagctaatgtttaatatggaaaattttagtaattacacagtgtaattacattcaattctcatagggggccatgagaattggagagtgtaattggaaccctcaattaattctaattacacagttataatgtaattacatggtcagacaaacatgccaaattgtgtaattacctccaattacacacaaatccaattacattgtggcttttcaaacgcacccttaatagatcaaatgtgtatttcattcttatatataatttctttttctacatacaatttaaaacaaaactaaatattgcgttatacatacaatttttttgtcttcctttgaatttgttatttgttattttatttattttaatttgttattggagacattaaataacaataatttgttttattttgttactagttatgtgaagaagtattttttttttcataagtattcaataatttaatattaaaaagtaacaaatctaaaataactgatccaatccgcacttttgtggattggattgaattggacttgagctattgagcggattggattggatccaaaaaatgaaatccgcatctagtgtagatcgcatgcattatgagcaaaatagtgcggattggattggatgaacacccctagtgaaaattcataaataagatatagtctaattttagaattgtaattgattaattaaaattaattnactgagtcttacaagcagtattatctcaactagtttgggaaccatgggctatataaccaagcttccaataagnnnnnnnnnnnnnnnnnnnnnnnnnnnnnnaacttattaattcctccttgcgcca

SEQ ID NO: 61965 - DNA, 1387 bp, Cannabis sativa
aagcagaggtattaggcagggagatccattatccccctacttgttcttgatttgtggtaaggggttctcttctctggttaatttatttgtgcgaaaacattggttaacggggtgtcgtgttgctagaaatgctcctattatttctcatatgttgtttgcagatgatagttatattttttgcaaagcaaatgagatggaggtttctagtgtacttcggcttcttgctatctatgagagagcttcgggacaaaagatcaactttactaaatcctcagtctttttcagtaataatgcttcatatgggatcagactcacctatgtaatctactaggtatggttcctgcttctgacaacagcacatatttgggtttgccttgtactatgggaagaagcaaaaataccattttgggttttcttaaggaaaagatgataaagaagatccaaagttggaaaactagatttctttctaaggccggcaaagaggttttgttgaagtctgtggctcaatctctcccaagctatgctatgagtgtatttcttctcactaaagaaatatggtctagccttgaggggttaatggctaaattttggtggaaattgcaaggtaagagttcgtctaagggagtcagttggctgagctggcgtaagctttgttgtcataaatatgttggtggacttggtttttgaaatctaagggattataacttggcctttctagggaaataggggtggcgtttgcttactaatgaaacttcattagtagcaaaagtttttaagccagatacttccctaaaggcaatttcttatcagctgagctaggacccaacccaagtttcatttggcgaagtataccggaggctaaaaatcttgttcagatgggtgctataagatctatatgtgatgggaaatcaacttcgattttagaagacccttggcttccaaatatggacaacaagttcgtaacaacttaccacccaagtcttgtgggtcaatcagttgatagcttgcttcaaattgactcaagagaatgggatactaacttgattcgggatatgttcaatcaacatgatggtgatttaatttttttccattcagctgagaagttctagtggtgttgattgctggtattggtctaaagagacaagcgggatatatttagttcgaagtgcttataaactcttgcaatttgttaatggggattggccgaatactggtgggataaaccattggaagcaaatctggaatttgaatgtccctgctaaggttcaacacctgcattagcgggtcattgcaggctgtctcccaaccaagttacagctctccatcaagcatgttccaatcgatcttacttgcctcatgtgtgatcttcaaccagagaccgtgtcac

SEQ ID NO: 61966 - DNA, 1087 bp, Cannabis sativa
tgaggattccactaatgaaggttggggtccttttctccgtgttcgggttaaactttgtgttacaaaaccacttctacgtggccaaatgatacgattatcgtctatcaaagatgaattttggattgactactggtatgaacgttttcctgaattttgttttgaatgtggcattcttggccacccctatgagcagtgtgtgtcgtttatggaaagaatggataataggaatgatgatgatcttccatatggaccatggcttaagggtgctagacttctgactaatagctatgatcggtaccgcaccgatttctgtaaggcgaatgcatggccattcttaacacgtttggctcgacaatctttggtctctgctgtcccacggttaaccacaccaagtttccctcatccaaatcctcttcatgaccgtgagaaagaccctccaattacctttcctcgccctcaaatggtttccactacaacaccaattgccatttctccacagcctcaacctcctcatactttagacccttccccttccaccttctctgctgcactcaccactaacccataccaggccattacaccatcctctaccgtcccaactgttcaaaatatcaaaggaaaaaacgtacttggaactcccttcaatccaaacttcacctccactgatctttcatctcttgataacatacccaactccactacaagtacaaaacttcaaccaaaagtctcagtggcagatttctcccatatttacgtccctgatttggactctgcaggtcaatctagtaatgtttttgccacctatcctccacccacgcccaccacactcccaacctcatctttgaaatccttgtcactctcaaataccataaagccaacacaatcaatatccatttcaactacttttgcacctgctgcttcccatgataaggagaatatcccacccaccattactacaaaacgacaatgtgattccgtgtctatgaggaaactccttaaacgctgtcgtggtgttggtagtcagtccacaacatttttcacccccgaccttactcccgaatctgtagtttcttccaatgaggattct

SEQ ID NO: 61967 - DNA, 756 bp, Cannabis sativa
  modified_base (382)..(390): a, c, t, g, unknown or other
aaaacccaaatggctcaagaccaatgcttgcacaaagaaatctccaaactatccaatcactgacatttacaaattttctgaagctgggaatgagatctcgggcgtagggaatgaggtctcattgcaggaaatgggatcttctgatgcaaaaaatggaggtcttctgctgtagagaatgaggtctatgcaaaggtcaagaactttttcatgtagacggtctttctcgagctatgtgtacatggcctttctcgagctacgtgcagttggtctttctcgagctctcctgtcccccataaataaccttgtattctttgtttaggaaaatttcttaatggtttgcccctagtggcgtcttcataaagacaagtttgtaaaccaactnnnnnnnnncttatcttaaatgccttgtactttgtcattccaaattaatatatttgtgtttgcttgcgttttcattcacaatgtaaacaactatattttgatcaaatgcaaagtacttttgggtctttccattgcttgtaattttgctgtttaagtagttagtaatctactagacttttgatttacaagcagttatcaattcttccttgctatgacaattatagtctatcttaagcaaacttgaatatacttttaatgattttataactttgtaaatttttgattgcttgtctgaatagttatattatctatctattcactaggtttaagtacttttatcaagacatcttaatgtctcgtttaatactttcctat

SEQ ID NO: 61968 - DNA, 905 bp, Cannabis sativa
taatttgtattcaataagtaaatgatactaattcaatttgtggtaaagatatgagaaattaacacacattaagaactatattcaaacccaaataagttgataagtagcttaaattagcaactaataccttttttttcctaataaaaatgtaaagcaacaacttttaccatccttagtggtgattataaagatagtccaaattgtatcttcaatcttacagaagctgataatttttttttcttaaaagtgaaattgatagttccttgaaaaaattctattttttttgttattataattaataaaaacaaataatatttgtaccctaaatatataaaaatatatctcattattaaggaaaaaaaaacaatatagtacaataaattttcttaatttattttaaacaaagtttctttaatattttgtttgttaatttcattaagatattttttgatagatttaatcacatttattaagatattttattatatgaaattgcactgttgcatgatatttttatcagaaagaagtttttgatagaattaaaaaaaatatcttgtagttttacatatacatataaatgttttttacaaaaataattattttaacaagttttatttaatactagaaaaaaaaattatatatgtctttttgtttcattattaatttttaaaatatattttattatttctatttttttcagattatgaaaatatataagaaaattaaataaataaatacaaatttgaaaatatataatgtaaaaaaaaattaatatggactaatggagtattttaataaatggatataaaattaaaaatatatattttatgtaaaaaagaaaaatatattaatggggtgatttagtaaaattttaaggtgttaatatgatgtcgattattattatt

SEQ ID NO: 61969 - DNA, 859 bp, Cannabis sativa
  modified_base (203)..(205): a, c, t, g, unknown or other
ttataaatatatttgagaaataactttggttaaaacacgatcttatatgtacactcccatggaacagtatcaaccaacaaagattagaaaagtttgaagtttgttgtaaagaccgctgagctttaatttagaaattagcagataattataacttaattatgaaaattatttattaatattgaattattaatttatgatgattnnnttgaattcagaatgcattttatatgtcatatatagaattatataattttgcatgttttgtgctcggcaacattgaaatgcggtgtttggctattagaatcacattttagtattttagtatagcggggcaatttaattagaaattgggaatgtcaggaatagttgagattttagagttgaccaaatttcccttaggtggtttagtgaatttttggcttaagtgggggcaaaatggtcttttgtcttctagtgacttatatatgtgctaaataatcagatttttattaagtttaatattagataaaattttgagtctatcttttatttaaaaaattagaaattaagacaaaaagaagcatttgctctctccaagctctctctctttccctcgatctccttagaaccatttagggttgggggtttttctgctgaattcaaggatttctaactcaaggtaaggttctagctcatcctttgttgttcttcttaagtttcaagttatatgctttatgattttgctaagggttaggttctgtggtaattcttgttgttgggattttattctgacgttgagattagattatttgagctgtttggaagctagttggtggcttgatttggttgttagacaaattttgagttttagaactcaaac

SEQ ID NO: 61970 - DNA, 913 bp, Cannabis sativa
ctaataatatatatacctttaatgttgataagttacttagaatggctttccattccatagcaaataaatggttatgaatagcatattgttccccttgcattgcataccaaggcctccaattccatgttgccccatatcaggaaacattaatgaagagacaccctcaaaagatggatgaggaattagaaaaatggttttagtattggattgcatatctccaacctcaaagtaattaattaagaagagtagaagagcttgaatcagacgaccataatctgagtctgaatcaacaacatatgaagaggcatcttgagtactgccatttgaagcaattaataaagttgtatgtgaattgttgttgttgtcatcttcagaataaagcaagtgatcaaaataatcatccatcactacagtaaatattggattattttacccatggcaccatggaacatgaaattataagaaatcccaacataagatagattttgtaaaacaacaaatacttgtattaaagttaaaaggtacgtgaaaaaacacaatcagaacactttaaaaacagagaaacaaataatcccaactaagcaataacttaataatttattattaataactcctaactagctaacttgagttgaatgagaagaaaaatttaaaagtactatgcataaataaaatgagagacactacattatttagcctaaatgattatggtttcaattttggatttagcctcaacgtatctcaattgccttcattatcgttttttttttgtattgttgtagcctttgctattttcttttttatattttatctattctttttaaatatttttattatacatagggtatataatattcatttattatataattaatggtgaaaaattcttacatttattacttattcttgccag

SEQ ID NO: 61971 - DNA, 987 bp, Cannabis sativa
ttgaagacaatgatgggtctggaagtgagtgcaaatcgggtcttgctttcgtcgagaatgtgagaagacgagagagagaagacgagagaagaaagagagagtgggtaaagcttttgatacaagaggggtatttattagagatataaaaaatagacttaaattgttaatagtgattaagcgtagtgtatattgtttttttttttttacctaatttaagcatgttttattaaatttgtcatttaaaattagtgtgaaccaattttgaacaaaataaatataataaaatgataaattgcttatttaaaggaaaacttgttatcttatcacaaattacaatcatttttttcctgtataaaacaactctcacaataaatacaaagtactttgcagtacatccacaatttataaaatatacatacaagaaggtataaaaaacttgacaaacattgtcaaattttgccaattttgatttaaaactttttctttgaggttattcaaaatttatatactattttgaaaaaaaattagcacatccttatagtacatctccaataaggttgttctatacactttctgtttgctttgacattcagtaaaattttatagtttatttttttacaattgtgtaaggaatttataatgtaaacttcagcatatgattctttgagcgataaaaaaatgactgaaatgcctacaattattggttctttgagctttgatcccacgagctttgggtctataatttgaaaattgaaaagagtgttagtgtgggtattcatacttcgaagctctctctaactcttttagatagatttatcgtatacacagactgagtaatgagcttggagactggtaccttatatttataggtgagatactctatgagcatatgtgctacattaattttcaaaatattttgataattaattcaagaaattaaatcgattaattataatatttggcaaattaaaatctaactataattag

SEQ ID NO: 61972 - DNA, 570 bp, Cannabis sativa
aaactaattggagaagtccccctccggagttttcattaacaaggttgcttttatgaagtaacccatcatagtaacaaattggaacccatatacaaaatagtagaaaaaaagcccaaatccccatttttgtagacaaagcagaatagaaacacatataatagagcagagggggataatttaagaaactatttcaaacccaacaacatttgacctaaacacccgagccaaaaaaccccaattaataggcaaacatgataatccaaactgaagggaatgtacctcaacagagccaaagctcaaagaaatgctacccccaacttcatacagattaattgcagacacaataaccctaattctcgatgttaaatcctacgcatgcaaggcaacaaatatctacaagctcaatactatatttcagaatcatgttcagaaatagtagtttcagtaggagaaacacttgtagacggattgaaagaaggggatgatggatgttcctctttgtttgaaattccacaatatgcttggtgacaaggccacagcttgctccaattgtaggttaattatttgtgt

SEQ ID NO: 61973 - DNA, 2157 bp, Cannabis sativa
ttacttattattatttgaccaggaaaatatataaatataaatacctaaaaaaaattatttatacctacactcaaaataacttatgactgattttaattttaggcgggtgactatccccacttaataacatgtaactttgcaattaattataataataaaaaataataatataatgtactaaaatattatacccaaatatgataataaagtttatgggatgtgatgtgacaataaaacaataaagctcatctaaagtaataggaatagttagataaatatcatcaattttcacattattagtttacttgtcaaagaattagtatgatatacaattatagagagttatacatacacatatacatacatacatttaaagatgaccaagactaacaactaccaactaaaaacaatgtgaagaggtttcttgacataataacatgagttgcctccttatcaaaaacaatttacataatttgcttcaaaatatgaattattatttattatttgaggaggcactttcaacattgattgatttttccacaaccataattgttgagaaattgcaaactaagatatgcacacatcataatgcaaaaaaaaaggacaaaacataaatacctaacagctatatcaaaatctattaacaccctaatcttaatttgatcaacataagtacaagatattgtaattgtcatttatttgttatctacttttatatttatcgaaaaataagcaccacactcaaatttataggtattttgttttcttgaaaataagcgtattcatgcattcgattaaaaaacgttagaccttccggtcattacataagagatcttccggaacagacgaggtcggaatagatccgtacaacttgtgggtaaaagcccaattagccacattatgggcaacaaaattacaagttctactgacatacataaaattacagcagttaaaagcttaatacaaaaggagacattgttctcaaacgcccaatgtgcctctgtcccattgagagattgataactatcctcgagtcactctccaccaaaataaacttaaaacctaactctagagccaccgaaacagctaaacaacaggccgctgcttctccacataacacatctgaaaagcccagccgagctgtgtgaatccgaatcacttcacccagatgattccttgctacgaccgttgtgcacatgctttcaaggcccaccctatcacatcacagtttaattttatccaatcctgaggaggaggactctaagacaccctcgaggttggagttgggcaaggcaagaaagcatcatgtaactctgcataagaagtacaaatctagtcaatacatttcaatacatccggaggtgagttattatgtagcaaatcgttgcgcacctctagttttgacatttgaagaaattataatttaaatttagtatactattatcctatttagttaagttttgacttatttttataatttgaataagtattatatgaatatctttttgtaatgaaaagtaattctcaaagtatttgggtattattaaaaaaaataaattagaaattatgtaaattattttaattttaaaaataacttttcaaatttttttttttaaaaaaagttacaaattttaacttcttttataaggatttttaaattaataaaaagattttttattttttatccaaataatcttagaatgatttttctaattttaaaattaaaaaaagagcttataaaagctaaactaaacatggtcataatggagtacattataattatggcaaatcttctcccgtatttttaaaaaatttaataattgcacgagtgcaggttacttttatacgtatacaaattgattattttaaatcttgtttttgatattgtaaattattcataatttttcaaaaactaaccgcatggccatgatacacatcgccatgtaaaaaaaattatgttataattttttcaaataacgaaaagagaaatgccccgccggtagaggcaaaaatgaccatcttacaactagaggcgaatttgtcaccaattttgacaaaatactcttttgattacccatttaagttgcagcaaacttatattataagaagaaaaaaaatcacatgaaatcacactatagctctccattgttgtggata

SEQ ID NO: 61974 - DNA, 930 bp, Cannabis sativa
tccatccgattcactgccaccactggttcggcctagacagtaggggcaggtgccactggaatttctggagcaggcaccccaataaaccctaaccaaatcgtttccaaacccaaccaaactttccagacctgcataatacaccccaataaacattctccaagtgataaaacaactacccatgctcagaattgaaaaataccattaaagagccaagcttgagttctaaaactcaaaacttgctcaaacaataaaccagccatcaaaacaagctaaaatcaacatttctaaccatattctaactacagaaatgcatacaaaacattagcagcaaccacaacaatcaacaactcaaaacatgcataattcgattccttaaaactataaaaaaaacataaaagaataaagtcaagaatgacctagaactcaagaacacctaatccttgaagaatcttgcttgaaatgcagaaaatcacacccaaaccctagctgctctaagggggggccgaaaaagagagagtgagtttgagagagaaatgcttttctcttgaattttccaagtttctattttaaaaaattaaaatgaaatgaatagatagtgctttactaacatattactaacaacatataatttctaaaatcaatttattaaataaaaccaagtccactaatggacaaaatataaatggggcaaaatgactattttgcccctccacacactaacacaacataaaaggatactaaggggtattttgggaaattctaaaatcctgaccaatcccgacatctccaatgtctaaaccattgtcccgttaaactaaaaaaaaatactaagatgtgattctaatagccatatgccacgttccaatgttgtcgggcacaaaatatacacaattgtgaaatttctatatgtgacataaaaatgcattctga

SEQ ID NO: 61975 - DNA, 1674 bp, Cannabis sativa
atattcctatgttatctctaatcttatctaataagattaagatcttgtgtcatccaagctaagtccattacatttaacctttccaaaattaaatataactcaatatcaagctattgatggccaatccatatcaagaaactaacataaagcacacttgaatgaacatgagaatttttactaaatatttacataagaaaaatactaaactaaaacataaggttcttcaacaattcaaaccatcaaaaagtttagctagctcatagctaacttaataacctccattacaatgtaaaattcagccatggagtttgaatgctagagttagagaagaaaaaaaaagaaataacaaacaacaatagaggagaagttttccaaaagggtagatgttgaattcttcttgtccttctcctcttttctcttcctttttcttctttttttttttactctttcttgctctgtacaaaaacaaaggatctatggcagaatttttcttttcttttcgtgttctctttttctgaaaatggaggctgccttctttttgagaacctcttaggttttgtaccatttgcccagcataaaccctacacatggcatgaatcttctagcctctccaagtattattttctcttctaagccaccaccactcctagtagaacgcctgtcatctccacaaatgccaccacatttaatgaagtgccagctcatccttgtccaagtaattttacacaaactgctactaacctgtttgctgcagcaaaaacttcatagaatttcaacaaagttaacaacttgactaattactattttctttgccaatttatacacaaaagttattgatttctaactaacaacctcaaattgcacacataaacataaaacattgaaactttcacaaattaaaagacaaattaactaaaatgacacacaattgcataaaaacatgtttaaagtgatatcaaataactctttactcaagagttatcagggtggtgcagagctgacactatggtacccccttaaagagcattatgagcttttagccttctaccaagaacatacatgattttggctctgtggacatatggttgaaccatataacaaatcacatagattcgccaatccgattgcaccattgtatttgtagacccaaataaatggcgaataccaagtcccatcccgttctggacaatattgagatatttacgaaaatacccaactgccttacaaactaagcatcagcattccaccaacatgcacctcaacatgcaccaccactagaccaccacttggacaacttatgggcgtcacttagcttgtaacgtgccgtcttagcacgaacattacattctcccccacttcaacatgtcgatgccctcatcgacggaccgcgagcaaatcttcctgatctcgactcataagcttactccaagcttctcttgaatcctaagtctgtgcttgtccctctacctccgtagaaccaccctcttggttgcgatttccctcgcccactcttggacttgatcaaagaacctgtgccactgtcgctattcagaatctcccatggagtagtgcctccacactagaatacttccccaacatgaaatcccctgagtccatcacaacgtccctccagtcaaccaattagcccttgcaacactaaccctgaagctaaca

SEQ ID NO: 61976 - DNA, 2873 bp, Cannabis sativa
aggcggtgtgggattgcacagcttacccagtatatccccttacggatcacgggactactgactgtcacattaagtatttgatccacatattacatttaatttaataactattaaatatcactaattatttgtaaaacatcacctcatgatatattggctatcacattactgtgctctagtgcataataacaatacttaaatcttatacttaattaggtattaattgaagttaatataattagttataatgacaatttgattttatattcttaacactacaagaaatgtcacttttatcagcacatttttgtgttggcgaaagttggtattacgctagtaaaataaaatttacttgtgatgtgttggtaaaagggggttggtaaatcaatgttggtattagaatttttaccagcataaaataaaaaatactggtaaaaatgattttttcagcgcgtaaatgcgctggtaaatgttagattttagccactacaaatatacgctggtaaaattttaacctctttgccagtgcaatttgcgaaatatgttggtaaaattacttttatcaacgcagtaacgaactgtgctggtaaaagtgacattttaattcttgcatacatacatgtatatatgtatatatatacctctggttattattgaaacttggaatgcaagttgtccaagcattaaaagtaacacatacttataccctatctttatatttataatattaatatgaatggtacgatatggaaaaaaaaaaggattatatcattaattgattatatatatttgtattaatatataataggatattgtataatatacataaattataatgtaggtggcttaactaggatattgcacatatatgatttctatagcgatcaaatatatttatacatatatatagttctaatcaattaaatctaattaattatatatataaatgttaaactaactagaaaagaataccatttgtattaatctataattaattatctatatataattaaagaataatatattattactaattaattaatcaacatagtttgaactacatatatataatattaacaattcacaaatttataagtttctcatcccctcaaattctgatataaataattaattaattccttcaagaataacttaattattattttatataatctttcatacttttcaatccacaatataaaaaggcctagctacaatattaatactgcaaatatatataacttataattaatatgtactacaagtactaattatctttacatacattacatatatattgatgtatataaacaacctaattaattaatgaaactatataataataaacttataataatatataagaaaccagagatagaatctaaatatataaagaaagaaaaatgtattatctctataaaaatatgtctaatataattaagtaaagtacgtacgtacgtactttactgtgtcacaattaatatccataatatctctctctaattaattattatacataatatatatttacaatagctattctgatcttataatataactaataataataataataataatataaaaactcatgatatcatggctcttgtttaaggaacatggagccagaaaccatatcttgaagaagtccaaaatcatcatgatgatgagataaaatcccagccgttgatgttgttgatgatgatacattattagtattattattaattatataattaggcatttgtccaaacagactattattattattagtattgtactgatcttgatgagggaatattccggtggcggtggcagcgccgcctattagcgatgacatggaaggcgggaacatggcggctgcggccgcggctgtgccacgtaaggaggagggtagtgggtggttgtgagtgccttcataggttgttataacagttgatgggtcttggtatgacctctctacacgttttttcacaccacatttttgagttgtgcatctgtaatagcttctgcaataataataacaaatataattatattaatatgaaatatatattctaaaaggtattattcatattaattattttctttgagtgttatatatcactattggtataattaagtatcgagttttatatatatacttaagaaaataattaagggaatatcgatcgctagctaacttatcgtggaacgctacttataaagtgttgggcactactattgtccaataataatgctcatatatatatgtttagagcattaatgttattggatatatcagtaatatcgagtactttttataagttgcgttttacgattgattagtgatataccttaaaaattattttcttaacttatgtagagcttgatacttaattaattacactaatagtgatatgacactgagaaaaatactagacactaataatgatactttttagtatttcttgtatgtttaattaataatttataggaagaaattaaattaagtaagattttggttaatgggaaatgaaaccaaaaaacgttgagacgaaaagttggaataatattcaaaagtacagtaagagtacataaaaagtttcgtacgtctttaaatatatttttgatcacgtttaagtgtttatatatatatatacacatatattcaacatagttgttgaaattccatatgaattaattattattcattataagaatgagagttgcactatatataactagaattttttggggttttttagtactataacaaaattctattttatttcaatattaattgttgatcatactgatgatatatatatatgatcttaattaaaagacatatttgtaattcaattcaatatatatatagattaattatatat

SEQ ID NO: 61977 - DNA, 1007 bp, Cannabis sativa
  modified_base (645)..(646): a, c, t, g, unknown or other
  modified_base (825)..(828): a, c, t, g, unknown or other
  modified_base (950)..(958): a, c, t, g, unknown or other
ctcggcgacaacagaaaatgcgatcgatggctagtttgatgacatggataagtttataaccttatttcttagtgggaaatattttagagaaaatattataacggagttaagtggggttatggaatttaccattttacccctagcttaagaaataccctagttttaagtctaaggggcattttactcatttgttattaagttgattaggtagctgcctaatttgatggcacatggcaattagttttttcagcaaagggattaattattcaatcccttttcttttgaatcaaagttaaggaaattgaaggaaaaaccaaacatagaactctcactctcttcctctctttcggctggggcaaaaactagaggagatcacctcttttcataatcaatattctggaattaagctaaagattaagtgctcttgaagtggaggtaaccctagaactcttgtttatgtgttgttaagctttttacttagtttgaacttgtaattttgagaaattgtggttgttaggtttaggtatgcttagggtaagttttctaaggttgttttgagttgattttaagccctggatatccgtttggagctatggtgtgagaatttagtaagcttgagttttgaaactcaagtttaggtctttnntggcataatttgatttagtggttttttctgtgaattgctggttggaaaatgttgtaaatacattgtacaggtatactggaaagtttggtaaagattggttggattttgaggtcatggggggaatttttcgggttcccaacacagaaccagaattccggttctgggggacctgtagcaannnntcgaccggttggtgacccagaacaggacttccggttgggaaccggtctgccggttaggggagtttttggaaccctagtgttttccatttttgagatctttagggtattgccatgttatttannnnnnnnnaaacttttagtttcaagtttaagtacctgggaagtgatttagcgagtca

SEQ ID NO: 61978 - DNA, 758 bp, Cannabis sativa
aaggtatattctgttaaaccaagaaatgtcgttagataggcacttttaatatataaagatatatatatcttttaggatgtaatgtttggggaaaatatttatgtcatataattgcctaattgttattatggttttttttttctttttttttttgaaaaagagggttaattattaaaataaaaagttaggccttatggtcattacaaataatatctgcatgggatagttagcacaacaaccatcccagttaaattttgggcaaaaacccagttagctacattgtgagccgcagaattactaagtcgataaaggcaaaattgcaactcaacacttgtctagaaaatctattacaattcaaaacataattatcaatgctccagacgaaaacttttctttgcaaagtcttgataactatctcggaatcgctctctataatcacaaaattgtgcgcttcctcttcactgctgtctcaagtgccagatggaaagctacaacttcaccaataagggcatcagagaaaatgagcttgttggaagcaacccacaaatcaattcctaagtgatcccgagccagagccacagcactcatcgacgaacttcccacttaacatcgcagttgattttgattcggtcctccagcggaggggagcaactctagtagtaggggaagtaaaaagttaggatccataatctccataatatcgaatgatagagttaatataatgtatgatgctgctaaaattattgttgtgcatattg

SEQ ID NO: 61979 - DNA, 1585 bp, Cannabis sativa
ataagcaggaggaatgctacatgggaaactcttcgctggacctttcaccatggattctatcatgaatttttttgtcagtcctattgctgagcaagccattgcctcagaacataattccgtagctttttcaggtatagtaggctgatattgcaagagctttgcatattcatttaaaatgtgtaacatgtagtcatacacatactccatctttagctcattttgaatgaattcacttgctgtctttcctattttttgagcctgatataaaccaaatacacaaaataaaacaaagttatagaattaaaatttctatcaattaataacattgaaagactcaaagagcatatataaatttattatttatttggaaaaaatattttatagattaataactttatatgtattaattagttaataaacaattaacagatttagtggttctgttagttaggtttgtttatgtattgttacttgtcagtagggcagttatatcggttaagttagttaatcattttctgtaatgtttatgggtcttttagttcagatggttgtactctgctttggcctatataaggcttgttctttattgtttttaattcattccaaataataaaaacatttctcttattacttctgcaatatggtaacagagcagggaagtcatgcttccctctgatcctaatcccttcttcctttccttgtcgtgttcttcttcttctccggtgacgttcgtgtttacagtgaagaattcctctcttcatcgacacttcccctctactctttatctataacgtttttctatcttgcttcgtttcgatcatggcgacaaatgatcaagaagttggtcctggcaatgaagttcctactcatgtcaataatggagatgatcaaagcgaaacaaccaaaatagagtgaacacacagttgatgagatcaagaaatcctatcgaggatccttccgatacttattatctacatcatggtgataaccctagaaatgttcatgtgtcccaattattgacaagacaagacaattacatttcttggaatcgagcaataaaattggctatttctcttaagaacaaattgggattcttgaatggttccattcccaacaaacctattactgatcacgttctttataatgcttggattcgtaacaataacattgtgatttcttggatcattaactctatttctaaggaaatttcttctagcattttatatgatgagtcagctgctgccatttggaaagatctcagagttcgattctagcaaaggaatggtacacccatctacaatctcaaaaaatatccgatgaatctgaagcaagataaccagacagtgagcatgtacttcaccaagctcaagactgtttgggagcaattatctaacttcaggccaagtttcacctacaatggctgctcatgtggtggagtcaagaagctgcaaaaacattacaacatggaatatattatgtcatttctcattgggttacctgatatctatgcctaagtgtgaggtaacattcttgtgatggatccgttacataaaactaacagggtttttcattttgtaacatagga

SEQ ID NO: 61980 - DNA, 664 bp, Cannabis sativa
ttgctgattttgattttgaaaaatactgaaaaataccataaaataccatttttttttctaaataagggcccaaaaaataatttttaccctatagcccactacatttcagggccggccctggtctggactctgctggatctttttcgatgtgtgaaaatattatgatttttgttatataatgatttacattataattttaactaataatacatcattagtttttcttaaaaaaaataaataatttatttagccaaaatttttatatagttaattaatagttacaatcatataaaaaatacaattaattacaaatctcataaaattagagatatccctatctcatttcttcattaaaagtgatcaatcaatagaataaagtgtacgtattgagtagtagagtatagttattattattgtttaatacacattcaattacatatagataggaagacaatttatatattagcatgcaatattaaacaaaaataagtatatatatatctcttgtaatgaatgataattaagatcatgatatatatatatatagatatatattactcttctataatttattcattcctctttatctttatatttcttaaattcaaaaaattagtaatatgtataattgagtttagggtagtacttacataattcgaaaggg

SEQ ID NO: 61981 - DNA, 633 bp, Cannabis sativa
aaaaggaaaaacagacagcttgacatgctgccgttggcaccccaaaagattagcctgcatgtttcttccattcgatgtagtcattcagcactgagttatccagttctgtgctttgaatgagcccagtgacccgaaactgtgtcgcccattttgcaatgttatgagccatgaagttgcacttccgagatacgtgcccaatctcccagttcttaaaattcctgcagaaattgtggaatcgccttctgaggtgaactaagttgaagttgatccccctttctgtctccatcgagaaagcattgacaacattaatgttatcacattggaagacgacacgttcaatcttcctttccaccattagttcagctgccatacacaccgcgtaagcttcacctatcaaagggttagtgatgtgacgattctcagattttattgcaactattgttccttgatcatttcagacaatggttgctgctattagacagtcaccatcagacgcaatatcacagttgcagcatagccaagacgcgggaggggggctccaagcacagaagtcctcaatatcattagaggccacatacttatgttcctgaattttacaattgacacgagagatcaactgcgaaatctgacttc

SEQ ID NO: 61982 - DNA, 762 bp, Cannabis sativa
catactatttacatgttgggaacgcaatagtataattgagtgatagcgctaatcatagaaatggaatatatagcttctataaatacttaaaagtaaaatgatagtttccttagagcttcactaccaaacatatataaatagaagaactcttatttcagtatttatattaatttactgaaatatcgtttataagaagctaagcattttaaggataaaatatattgatcgataaaacaataattcgagttcctactcaatatagatcatctatagagggtcattaattatttagattgaaaaaattaataacttatagtgtatctattcgtggtgaatagaacgttctatctaatcaatagtacaattctgaatctatagtggaatcaagagagattaattggatagagactttactcggtaaattctactacttattggattcttgattatataggttcatggtccctacactagttgagataatattactttgtaatctcaattaattagttttaattaatcaattagaattctaagttagactatatcttatttataaatttgactaaggaagggcatattcaagaacaaaaaataatgtaaggtttatttgtcaattaaaagactttataggatctaattaataaataacataaatggtattttggttaataattaattattactcaatatatatagaggaatgcataaaaaatttcatgtgaattgccactattttctaatctctctttttctaatttt

SEQ ID NO: 61983 - DNA, 1085 bp, Cannabis sativa
ttgtttttattttctagttttttttttatttgtttattaaatatgaaacacacaaatattaataattttttttatgttataaaaactccctctcttcttttcttgtatttatttcttttcttttctaaaaaaaaaagtttaaaaggttttttattcacacgtaattatttaaatcaaaaaatctatactatcattatctacttctttttaataagattgttttaccgtatatattttttttctaccattattaggaaaaaatgactaaaattaaagtaacattttaatttttttttccacaattaatttattgaagaaaatgtaaaaatttttaaatacaacaaaatttaatataccaattataatttaatatgttattattttcttttataattttttcatatttaatagtcactaaattatatgctaattttataaaatacttttcacaaatttttaaaataacttataagaaaataagatagtaccaaatttttcacttaaaaaaaattaatgtaccaactaattttatgggttactaaaaagtattttattatttacttgataatattatacataagtttattttatagaacaatttcagtaaacatttaaaaaaagagtaacctttatattgtaatttacataaacttcttttgtagagtaatttcaataaatttttttaaaattatactcactcatctctctatattttttttacttatcacattgttagttggttgagttaaaaaatagtattatcatgacatttttcaagatgatcattttattatatgaaaattatatttttttttgttgaatctagaaaaaatgatcgaaatcaaaaataattttttagtttcttttatattttgttaacaaaaaagttatcaaactataaaatcaaacaaactttaatagagtataaattattttttgaaatcatatacctaacagtattctaaatgagtctattttttgataaattcctaaaaaaaattataaaaaaatcaaatagtatcttaatcaatattagaattattaatattaaaaaaattgactctactaattttgatattaagtat

SEQ ID NO: 61984 - DNA, 820 bp, Cannabis sativa
cgatttatcactttattacttgttacgattgcgtacacttgcgtatacaatttttcacaacatttatttaataaaataataaataaattatttcctaattaaatgtgagatagatgattataaaataattttttatttttgaaagcataacaaaatgttaatgggttttgttgttcataaaaaaaaaatagtttgtagattaatatctaatgaaggctaattatataatttacatagtgaaatcctacaaacattctcacttttatagagattatagataatcgcataggatcactaaaatattattagaaaattttaaattatttaatgtgccataaataaaatttaaaagtgagaataatagttaacaaaatatttgaacaattttttcacaatacaattggattaaaatctctaatgtaggtgttagagattttattacaatggaagaaaatcaagatgtattacaactctattgtaaaataatacaaagactaagataagagattgattaaacatatgttacaacacacatatatacactatagatattgcatatatatataaaagtagcaaaagaagaataaaaggcatgtaatataatatatatatataataagagaagaatatatatatatgtatacactcactcacaactttaagtgtagattagtggcgtggaaggtaaaaatcaggaaagaagctaaaagcaaatgaagaaaaacagggcacaaaaatcgagctaaaagcatacctgaaaatagggtagcaaacctttatttatagaccaagaaatacaacctaaaatgtaacagaaagt

SEQ ID NO: 61985 - DNA, 768 bp, Cannabis sativa
  modified_base (722)..(728): a, c, t, g, unknown or other
cttttgttctcactgctctgaagcttgtcgcctctgaagcttctatcaacaaggacaaagaggctgaacgcgagaagcaacaaaaagatttgaaatcctaggtcgaaaatggctttctctgtaagaactttattctttaacggtttatctgactattttaactcagataaatcggcaaacaaaattagggatgctctgcaaaagaaatatgatactgaagaagccagaattaaaagtatgatgtcagtcgctacctcaagtatcaaatggtggacgacaaatctgtggaagcctaatctcacgagcttcaaaaaattgcacatgagattatctcagaaggtatgactttagatgaacagtttcaagtcgttgtactaactgttaagttagcccattcctggaaggattttaaaagtactctcaggcataagactaaggaattttccttagaatgtttgatcacacgccttcgtatagaggaggaagcaagaaaacaagaccagaaagatgaagtgcttgttgtttcaaacaacaacactaagaagtccacaccaacagttctgaagcctaatggcaaaaattttaagaatcagaaccgcaactcgaattctaattctaactgcaacaaccctcctcgtccgagcgagccgagctgggctagcgggcgggtgaggtgtcatttaatttttaaaagaaaaattatttaattaaataaatttttnnnnnnnttttaatgttaaatgaagtagtaaaaagcgatcagtcaat

SEQ ID NO: 61986 - DNA, 1043 bp, Cannabis sativa
tgtaacttccaattgaattagcacagccgtgtttggttggctaaaaacttaagaaaattacagtgcaatgtgaatgactatatatctcaggaagtaaccatttcacgtctgacaaactgcaatgaccaaggaaaaaccacaagccataagagtaaaatagcacaattgcttcaaagtcatgtacacaatggctttgtttgaaatggaggaaaaagaaaaaactttcactttctgttttaaaaattgagaatttagaaaaatcccaaaagatttattctttcttattttgatttaaaggcttttttgctgcaaagataatcaacataattcaccttttacactttagtttccaacgtattgaaaagctagcattattagtgtttttcaaattttcatcaataattaaaaaactagagctttggcttgctccccaaatattttagttttatttttaaaagtttagaatatttatatatatatatattttaaaaaaactattataaaactttaggaaaataaattcttcctatttttgttcccttataagtttttttaaacctttttcccataatagtaaaattaaaaccttttgaggggttacaaagaaagtttcaagaatttttgttttgttccaacttttcataaaattttattttcaaagctcactctattataatctgtttctatctcattttccttcaaaattctattcaaactaaatattcctccatttgaagtagacgagatttggtgggcttagaattaagttggagaaacagaaaactacagtcagtccaatgtacaaattgacctcaagaagtaagcgttctgcatctgagaaactaaatgcagagtcaaggaaaagtaattagagcaccaatgcaatgtaataccatctccaaaggttgtactattttggtacaaaatttattactatttacatcaaatgtcacataaaatatgacaacaaataaatatattttgtttaaaaaatcattcattttatagtatctacattaataaccaactaattataatgtaat

SEQ ID NO: 61987 - DNA, 992 bp, Cannabis sativa
taggccaaaaatgcttgaaaaagcttgaaccataaccatcaggttcaggtgcttttgtgtctagtatgctgaaaaaacctgcttgatttccttgttagagaatggcttgagaagagcaagttgctgatctaaattaaagcgagggccctatattaagaaaagctaagttcagcttgttagtagccaagcttctgctttccatgtagccccaaaaatgagacacaaagtgatcaaccactttagggaaattatcaacaataacactctgctcagtaatgtatgaagtaattttgttctatttttttcttcaaacaagcatgaaaaaaaaaatatgtgttatcatcacctttatgaagccaagaaatcttgctccgctgtattaagaagttgtgatacatcttatcttggcttaaaaatattgcagcagccagcttctctttttcaagaaaattaggatccctcgggtgagattgagcaagcatcttggattcaaggaatcattcttggaagcctggtaggtcttctcaatgtctcctatgatgtcactgttaaagttcttgaggtaatgcttcaatctcataagcttaagataaagagcaaggatgcccttagcagctatgggcttttcccaattcttccatacaactattttaaattcagcatgaatggcctataagttgtagtatctaaagggcttgcaccctattttattagatacaacagtagtaatggtacaagagcaatgatctgagatggcttcccatctaaataggggctttaaaatcgaggaacatgtcaaaccactcttcatttgcaaaaacatggtcaatctttgagtagattctattatctgcatcttggttattcgaccaagtatagactgaaccagagcaaggaattgcttcaacatgagccgaagctaataattgagatggataagtgtaatgaccgctctagtaatgtggattagttaaggcaattagcactaattt

SEQ ID NO: 61988 - DNA, 815 bp, Cannabis sativa
catccttggtatctcctctcttcagatcagttgccgattccgatgtcgtttggcaaaaattcctcccatccgattaccaaaacctcatctctcattctgtcgtttttcctcaaacgacaacaatcacctcaaagaagagtctctactttcatctctctagcaatcctactctcatcggcgacgatcgcaatctggtaattaaattattaattaaaattgattaatttgtttatataattaattaattgtgatgagtttttttggttgatttgagacagagttttgggattgatagagaaagtgggaagaagtgtttcatggttggagctagaaagcttgagattatatggggtgatactcctcattactggagatggatatctttacctgaatctaggttatcttctttttcactcttcatgattttctctcataataatttaatttcaataagaaataataataataatttattttatgatttgaaattatgaaataaagcataattctgaagaagaaaagggagacattgaatcagttcttagatattttaccttttaaagatggttatgaattgtgacatataatctgaagcaccaaacattaaccaatggtcttgtcttatagcttatgtgtttaaattaagcttagaattattctagtcttaaaataagagctcaatactctcacaaagtagcttcttttgaacattggaatttgaatccttcatctttattatagagcattgctattaggcatcagtggtgcttagcaccttctcgacatgtcgggttgtgattgactagcgatactcc

SEQ ID NO: 61989 - DNA, 806 bp, Cannabis sativa
gaagcattggagcaaatgccgaattatgtcaagttcttaaaagatattttgacgaagaaaaggaggttgggggagtttgaaactatagctctcaccgaaggatttaacaccatgttaaaaagcaagattccaccgaagttgaaggatcctagtagttttacaatcccgtgttctattgggggacgagatgttagaagagccttatgtgatttgggtgcaagcatcaacctcatgcctgtcgatctttaagaagttgggtattggtgaagtacggcctacaactgttatattgtaacttactgacaggtccttggcccaacccaaaggtaaaatagaagatgttctagtacaggttgacaagttcatttttccagctgactccatcatcctagactatgaagctgatagagatgtgcctattatattaggttggccattccttgctaccgagagaactctgattgatgtgcaaaatgaggagccatgccccatttcgaaggaaaaatagaagattagtacaggctgcaagttcatttttccagctgacttcatcatcgaagactatgaaagtgatagagatgtgcctattatattgggtcggccattccttgctaccgggagaactctgattgatgtgcaaaatggggagctcactatgagggtgaatgaccaaaaagtcacctttaatgtgttcaatgctatgagatttctggatgagatagaagaatgttcccgcctaagtgtgattgactctattattgctgaaagaattcacaaggaagcttggaaggatgagaagtttataa

SEQ ID NO: 61990 - DNA, 1093 bp, Cannabis sativa
tgggggcatgactggaggttaaagatgacagctcgatgggccgatgggcccgatggcctgatataggggtgcgatggggcccgattcccccgattccttgggcccaatgggcccgacgggtccgattctttgggcccgatgggtccgatttatgtttaggggaaaagatgggaagagaagagttgatgtaattaggggagggtattttggaaaaaacaataaaattgtcatatattaaaaatattggtaagtatacgtttaggaaaaaaaaaattaagataatgtaagcatagaaatttaaatttcccccaaaaaaaattacaatcaataaaaggtagttgtgaatgatgtagcaaataggaagaacaattatatattaagaagtcgttaaaagaatattaaattagttgtatattgatcaataagaataggcatacctttaggaattaggatgtgagagtgaataaaaatcgttattaatgatagattttatatagattaagaaaaatcacaattacattaattttttttctaattaattaatcaattatatatagtttttttttctaaaaaataataattagtttatgttagatatttttatggaaacttttttaaaataatagtaaaatattaatttgtagattaataaaatgttaaaaaaagaaaaaattaagaggttaagagaaaaatagttttgggattttaaaccgcaacatcaccgcctcatactgagcataatattattgttcattatattttacatgttggtcttttttctcttttatttttcttattcaactcaaaatgttacagtagaaaaaaagtattatttaacttaatttctatcaacaaatatctaattcttgtaagtttattattacgtatatagtagagattataactttctataaatttgccatttttcaccctaccatagagcttttattattaatcattttttcatttatacatttatatttggcaaagttcacttgtgagtttatataaagcaaataaagggtataatttggatctctagtttatgtgggagaaactcacattgtttatatgcttttgttaattctaaaac

SEQ ID NO: 61991 - DNA, 1628 bp, Cannabis sativa
  modified_base (403)..(403): a, c, t, g, unknown or other
  modified_base (1588)..(1599): a, c, t, g, unknown or other
gtcgatgatgcatgtcttgtgacgatcgcgattcttatttacaaagagttctttgaagctcgtttgaatgttagcttctgactcgccagggcataagcctcactgacgttaactagatgaagttacaggaagccttcccatagcgagacaggcacctcgcttacttggtctcgagccgatccgactgttacacttagtttgtacattatacactaagggctttcacaattgatatgtgtcgctttcgtcttcctatgtgtattgtctttgatgcctcgctatttgcattcaatgacattagtttctcactaatatactaaacaccagtttgtatatcgattcctctcctaaaaccttacagtcagcaggttacaaatatactctgatacttacgtaattaatnagttattccataaaaagtgattgcatcgatccatattccctttatcttgacacgtgtcctccactgagatggtagctaaattttggatataacaattgtcccttaaaaatttcttttttggtaagaagtgctttttaataattacagagggcattttcgtcaaaatcccttcttggaaaaatgcgtcctttaattctggcggttgtacggcttcgatggtcattatgaattatctcttcatattctgccctactcccaacccttaaatttccaattccttagatttcttgtcactagactttgtgtataaaagggcggctcaagcttgtcatttttgacaaacttctggttttttggtgagatccattttgagaatcgattgtctctttgttgctaaaatgccccatctatgtttagaagtttaccctcccaaactcataataccaggatgcactaaccattttccattcgttcccatgaacttcaaacctcacttggaaccggaaccaatggattccgagtctgaggagcttccgaccaatccaaaccaggggaatcccatagcccgttatgggcgatcctcacaagtgatccttgagggtaagttttattccttgtgaatggtggtttgagtcggattattatatattttttttctccactgaccttttttttttcctttttctccacaggaatagacatagatcttgtgagcgatcttagagtaactcctcatgctgacaaggaatcccggaagaaagttggcatggtttcggatgaatccgggagggaagttggcgtggtttctattagagaatctagccaacccaagacccaaacctgaaccagaagacctttgcgccaaccttttctagtatcgaggaatttcttgaggctcgaaatagggtctcggctgcaggaaataggatcttctgatgaggagaatgaggtctgtgcagagactaaggctctctacatgtaacgccataactattataggcgtgttagcgtgatttttaacatactgtgcagctcgttgctaatcaacgaggttaatggaaatcgtgataattaaaattttgcttaattatttaaaacataaaatattacatgtataaaattctgggatcccgtttaaaaaatacagtttaaaaagtttactactcatatacaaaatatttgtcnnnnnnnnnnnnacaacagaagccctgatgtcccgaggatc

SEQ ID NO: 61992 - DNA, 715 bp, Cannabis sativa
cttcatactcatgttggaaaaccttttagtgctcacaatacaactaggaaaatgtgtgaagcattaatgaacaaaaaataacatattcaaacattttttgtaaagcaatcgaagcatgctcatagtgagtgtcgaactcgtttacatgcagtggttgattgcattcttttgctattacgacacggacttgcttttcgtggtgatgatgaatctgaagactcgagtaatcaaggtaactttcttgcaattctaaaattttttgccgatcatgatgatgacatcagagcagtttcattgagcaatgctcctgagaatttaagaataacatcacctgatattcagaaagatattgtacgggttgtagcttttgaaactctagatgtcatcattaaaggaattggggattcaatgttttctattttagttgatgaatctcgtgatgtttctattaaagagcaaatgactgttgtagtacggtatgtagataaagatggacatgttattgaacgttttgtggggattgaacatgtggccaataccacagctgtgtcacttaaaggtgctattgataaattattttctagatatggattgagcatatctaaatttcggggagaaggttatgatggggcaagtaatatgcaaggagagttcaaaggtcttaaaactcttattttgaaagagaatccatcagccttttatgttcattgttttg

SEQ ID NO: 61993 - DNA, 904 bp, Cannabis sativa
ttaaaaattctctctgaactattaagattgttagattaaaaaacttttatctaattttagtaaaaaaattctaatatggataaaagttcaaggggcatgatttaaggagaatgatttagtagatatcaaagtctgaggagcatagtttggtaaatataaacaatcactgaaatagtaaaataaatgaaattagattaaagtccttaaatccaacaatctcaatagttcaagaggtatttttaacgaagttaaaaattcaaagacataatttagtacacgtcaaaattgaaaagacaaaaattctgattaaccataatgtaccattctatttattttatttgcgacaattaataaatatgtttatggaatttcatacaaaatctagaaccacatatacaatctatatctatgttacagataggaactctctagaaaaattaaataacaaatttgtaagaacttttaataaataatcaaaacaataaaatttaattctcctagaaaataaagagacaaaagttagataattaagtttaactataagagagtcaaaagttaaaaaaatacataaatattattttttagtaaatttattgtagtaaaataataaataataatattaattataataatatttacctaaataaatagtattgatattgttgttactattcttaccaaaatatttggctgtctaagagagtgtccaataagtccctattgaaaggggattaaaaattaatattgaagcccactcatgcaacgttcgaaaggtgtgttggcatccggaaggaaggtatagttctcaagtggctcccaaaggtctactgtaagagcagttccaatgctgcttttattctagttgcccatcagtttttgtcaaaggtatagctaatgcattgga

SEQ ID NO: 61994 - DNA, 924 bp, Cannabis sativa
  modified_base (573)..(577): a, c, t, g, unknown or other
cctccaaactcttctaggctgacttggggcaagaaccagcttgaaaagaagaagaaaatggctgaagaaaaccttctaggtggctggttttaggttgcatgaaggggaagaagagaggaggttgtattttttttgtggttacttagcttttaagtaatttatagtaagggttcttctttttctttttttatatacaatcagccccctaaaataaaagtagaaagggacaaaacaagtttatttaaagaatgactaatttaccctcaaaagcaaattaacctttaaaataacctaggggaattttggtaatttcactaatccaccaaaccaacattctaaaattctaaaatagtccggaatatcctcaaaataatccatcccttaatgtcatgatatttctgaccacatcgtcaatttttcacagtcgtcgggcccgaaaatatttttatttcaaaaatggtatccacaatatccacatatctcaatataaactcagttgtaattattttatagatttcactaattgatccaagtaagatcataatcttacttcattaccaaaataattacatnnnnnataaaatatgtctaattaaatatcattttattttacgggatattacaactatccccccttataggaatttcgtcctcaaaatttacactcccgcatctgcaactctaactcccaagtcccttcttcaacctcgctgttctgccacaacactttaactggcagaatagtcttattccacaacaccttttctttcctgttcagaatctgtactggttgttcttcatatgacaagttggtttgaactccagatagaacaggggtagggctagctgataagctacctaatctccccgttcttagaaacacaaacagaccgataaatttgagacttaactttcctttcttct

SEQ ID NO: 61995 - DNA, 1451 bp, Cannabis sativa
  modified_base (906)..(921): a, c, t, g, unknown or other
  modified_base (1048)..(1048): a, c, t, g, unknown or other
aatgatatcaggcccgcaacaacccggacataatatcgatgtatatttggaaccattgattgacgatttaatagaattgtatgagaatggtgtttaggcctatggtggttctaaaaagaattctttaatctgataacagtgttattatggactattagtgatttttcagcttacagtattttatcaggcttagcacaaaagattacaaagattatccgatttgttgcactaatacatgggcttgtcgcttggcaaatgaacacaagatgttttatatatggtcagagttgaggcaattagaattaacaaaccaagaactgactaatatgaggttgatagaggattaagggggaaaggaacaatggtgactgtgtctaagcttgaactagatcaagctcaattagtcgtgatgaacaataatgcagaggttcaaccatgtataacttaagttataggtagcttttcctttggataacctttaattagtcaagacgaacgataacttgattaacattacatgttttgcagtgaccataaggagttatttcaatcaatggttcaaagacatcataaaaataaacgaaaatgggtaacagacgagcattgtcaaactttcattgggtggttaaggaataccattctagcaaagttgaacgaacctaatcatggagtatccaatgagttgagtcatattgctcttgaagcaaattttgtggtagcaaagcataaaacgtacattgtaaggggtaaacgttttgatacaaagtcaagagatgatgctcgagaggttcaaaatgttggaatatattttaccataatctatatttactaacaagtacgtttaataacatcctaaatatgaatttgtaaaacaatgaaacgtaaacacatataaagtttgagaannnnnnnnnnnnnnnnagcggaatataatgactcattcctctcatatctctaaccctcgttcctttctgtcgcaaagtattatcaagatttgagcctgattctccttcagctatttgtattcttcatagtcttacacactatnattgaggactaacttgctatgggtaggcatgcactcaatcactgtggctcaaaattattttgtgaagaacactctaggattcaaaattagaaagaagaagaagaagaaatctcaaaactctagttgtctgacaagttgtaaactaggtttagagtcattagttggattatgagactattcttttctttttataccaattcacttagggttaggattgaattatatagaatgaaaaatgataaaaaaaatagccaaataatccctatagtggccgaccatgagagtgggccccactaattatatttttgccactattttaaccatttatctattatttcacaaatgccatattttctaatttcaatcctttaaatgccaaaactatttatagatcggaagagcg

SEQ ID NO: 61996 - DNA, 768 bp, Cannabis sativa
  modified_base (43)..(44): a, c, t, g, unknown or other
ttccctacttgggaatgttttttcccttgtctatgctctggcnngaggatacttccttattagccttggccactgcaaggttataacattcccgatcagtctgttgatttcctcttagacatcataccccattctttgttggaaactttaggcacgaatggaatatcgatgtgacaacctttaagtcatacaaggttggtcgacctagcactacgttaaaaagtgaaggaatatctatcaccaggaattgcgccatgatagtcatgcttgtcgaagcttgtccaacagtgaggggtagacaaatttgtcctagaggtgcaactcgttgactcgagaaaccatagacaagcaggagacatggggttagatccttgagttgtagtcccatcttttcataagcagttttgaacaagatattggaagaggctcgtttatcaatcatgggtttggccaccattttattggctatatagacttccacaaccagcggctcattgtgtggaaatctgattttgacagcgtcctcatcgttgaacgctatggtaggccctcctgctcgtggaatttagggcttcctttcttctacggccaggataacttcctcttgttcgtgctgcgctgttcgggcatacctctcccgagctttgcccgaatatccagcaatatgcgggccttcaacgatgacttgcagatgtccatctaccggttggggtagtaactcttggttattgtcgttcctctgattctgatcggtcttgacatacttct

SEQ ID NO: 61997 - DNA, 810 bp, Cannabis sativa
  modified_base (528)..(528): a, c, t, g, unknown or other
tacatataaaaagaagtatgtttcaaataaatataaaattagaggtaaatttgattaattaattaataaaagaggcatttttcaacttaccccaaacaatatatgttaaatatgagagaaatttgcagtataaattctcatcaagtttattttgatataaataaatttttactttcgaaaaagaatatttgcagcaaaatccttttaacatttataattataacacatataattctaattaaaaaagtgacagcaaagtactttatcttacgattttgctgcggttgtactttttttggtggcgtttggttggaggtaacgaaattaaatggaatgaaaaaataaaccattttcattccattttttttgtttggttgcattttaaagtattggaatattattccaatggaatgacctttccaccattttgatggaatgactattccattttgaaatagaaggaaagaccattccaatgcaagatttgaaaaattttaatgctttttttattaatttttttatgcattntaaattttattccattctatttctattccaattctcattctcattcttattcttatattttcattcttgtcaaccaaacgccacctaagtgtcagcttagaaacatgcgggaacatatcattaaactgcatattatataaactaaagaaatatgtcttcacatgtttctaggctagcacttaacagttaaaaaaaggtacaactgtaacataatcgtaaaataaaatacttttgttgtcactttttttaattaggatcatatgtgtaacgattgtaaataaa

SEQ ID NO: 61998 - DNA, 1148 bp, Cannabis sativa
ttttcaaaatcagtaaaaaaaatgtataattttaaaagagaaaaaagaaattggacccctgggctgggtgggccctaggcataggcaagctatatgcctacggccgggcctgcctgtgtagcatcgggaaaggaagtagaagcagaagcggtaaatgtaatacctctaatttttgtgttaaactctctcggctatttgatggatgtaatttttcctttgttagtacatgacatgttgtaaccagggtcagccctaggcataggcgggctaggcccgtgcctagggcccactctttctaggggcccatttaaaattttaagacctcattacttaactactatatttaattaaaattaacattaaatatagttaaattggacctagcatagtggcagcctaaagagtggtaggtattatgttttcttgggacttgagttcgaaaccaccaaactttagtttttattattaatttattttttaaaaaaaaattatctaagaaacaactataaatgcatataaacttaataactaaagccaaaaaaaatttaatacataaatattatttaaactttttttttttctaaatttaacattttataagtttatctattttttttttattttctttatttttttgtctattttcttacttctcttatcatgtttttcttttctatttatcttgctttaatcaaaattacatctttaatattatgaagaaaaatcattaatcaagatataatatttaatttcaataataataataaataatttttttcttaaatattatttgaagtgaatttaatttatttctttttaaatatcttattataattatgaactataatttaatgtagttgttagaaattattttagctatagataaatataaatttgatagttttcttttattttttttttcatgaatttgatttattgtatggttaaaattttaaaaagataaaaatattattatggatgatagaacaaattaaaaaatacaaatctactaatttttgtaataatttaaaacttatttcagattgttaatatatttctttacttttatgttatgaaatgtagcatataatttttttaggttaattttttaatttatttattaaggggcccaaaattttatatcgtct

SEQ ID NO: 61999 - DNA, 689 bp, Cannabis sativa
atttgtttttaaagaaaaaaaaaacaattaagaagtcgagcttccatgatctctgagccattgaggactattacgattgagaagctcgctgcatttcaatatcagcagcagtagaaagagtaatttcttttattacaattaaaactagtattcatgtaacataataggtaattaactcattccatgtgttgatagttttactaccttaaactgcaatatttctgattcaaaaataatataataaaagaatggaggttgtttttctgttatgggttttgttgttgttttccaagtttatgtcatatagagttgatttctgttaatgacagtagctgtgaagttaattttgatttttcttttacttaattgcatttattagttttcaatttttgttctaatttttgcttcaagtttgaactgaatttgattgatttggtctgctatacttaaaagagaaggatatggtactgttttacaaggccactttgtgttgttgcagtaaagtaattttgttggtctttatcagttgattgaattgtaatgttatgctggctttctaccatcataacctttttcctttttcctcaataagaaatatttgcttgtaaagtagaataaagaacagtatgaaatctatttgattgaactggtggattagaaagagagagggcctcaattcatttgatcaa

SEQ ID NO: 62000 - DNA, 1118 bp, Cannabis sativa
  modified_base (986)..(988): a, c, t, g, unknown or other
tttttaataaactctaccccaacaccaacaacgggtcgggtctgggtccaagtttgggtccgggcccgagtttgggtctgggtccaggtcccgggcccgggcccaagtttgggttcgggtttgggactcgggtctcggtctgggtccagagtcatggtccgggtctgggtttgggtctcgatccgagtctgggttctggtctgagtcctgagtcagggtccaggtcctagtttcgggtctgggtctgggtctcgtgtcccagtcctgggttagggtccaggtctcgagtcagggtgcaggtcctagtttcgggtctgggtctgggtctcgggtcccggtcctgggtcaaggtccagaactcgagtcagggtcccggtccctatcctagtctcgggtcccgggttcggtccaagtcttgggtcgcgagtccggtctcaggtcccagtccgagttcggggtcgggtcaggctcgagttcgggtctgggtctgggtcttagttcgggtccgggtttgggtttgggtcccgagtcagggtctcgatcccaggtcttggtcttggtctgggtccgggtccgggtccaagtcccaagggatccgagtatggggtccgagtcttgaattatgttttttttaataaattaaaatcgggtcggatcagatccaatccaaaaaaaaaaattaggcagagcagaccgaatctgatccaagatccaataagtatctgaatgcatcagatcagaggtgatccgttggatcggagttccaacccggtccaactaaatggatctttttgacatgcctacatttcataatgctttacactaaattaacacatgtattacaacccctatattactaataaatgaacaattaaaaaaaacctaccttttagtaacattactactttaaattttaaaaagggtaaatacaattttaaaccctgtgttttgtaaaagttaccaattggaccatctgttttgttaannnacaaaatagaccctgtattttttttaaaatggtacagatagaatcttgaactgagtttttatcaaaataaaacttaataataatccgatctaaatgtattatgacaaaaatgtttacattttctgtatct

SEQ ID NO: 62001 - DNA, 1233 bp, Cannabis sativa
  modified_base (1106)..(1108): a, c, t, g, unknown or other
taattagatagaaaaattaagcataaaaactcaaaattttttaattttactcattcataggtaatacccattaaaagtgcacccatatttatatatagtagagatatgagtcgatgacgtgacactctaaaatttctttaattagcattaatttcattttttttaattttttattagcaatatatattaattaatataaaatatatatttttatttattttctccataattctctcttttttttttaaattttttttcttcatcgcgttttttaaaattaagaaattaaaaaattatattttgaaaaaaattacaactcacctcatttttaatttatataatcacaaatttatatttatattaattaaaaaaattataattcacataaaaattatttaccaattgtaaagcttttgataaataattaatatttatttatatacatatctctaactctaaatgtgcacattctttaaaacaacaaaaaaaaaatataatatttttatatatattgatccatatatatagactttaaattctatgtgaggttctctaaaatttattatatagatggataaagatagttatagttatttattttgatatatgtttatatatatatattgtactattataaagtgtttaataaagtattttttagtcgagtaaatatttactaaatcaagtttacaatttattttattttcatgatttatgatatttttaataattatgattttgtcaaaaaatataatgtttagtgaagtatatttttttgttttgaaaaatgttttgtcaaacataaattactaatatatatatagatatttttttttagcaaatatccaccttctaaaactcaagctttcaaaagatgaaaatgaagattaccaacaaagttaatggtctacttcagtggcggacccaggatttaaattgaggggggtgacactttctttttataagtgagggggcgtctgctttttctacattgtataacatgttaaaaattgatgcaaatttatattttagtattaaatatagtataaagtaaaaaaaaaaagtaataataaaaatattgggttcaataattaagacattaaatnnnagtattattgatagaggttcaaaatgtaaaatgcaaatactaaagtaaaaatgattttattggaattagaacttatgacctcttttatatgcatgtaatgtctttaccattataccaaaacttat

SEQ ID NO: 62002 - DNA, 1070 bp, Cannabis sativa
tttgggttaggttgattatctattggcacttcccttgtattcccaggttgctcctcctgggtatttgggggattcccttagttattatcctgccttctggtcctggaaccctgagatcttcttcgtggtctccttatagtaggatcaggttggttttgaggaactgtcccctatgcagctctggctgttgcgacttctcgctccaactcagcgttttgtcagtttgattctgccaagcgttgtcaaagttttctgttctctaactctatcagtggtacgtatctggtaggatcataggcatctccactccttctttctaggatttgatcaccagcagcattgaagttgccatcgttcctccctgaacggtgtttcagatgtgttggttctctaagatcccagagttctttgccaggacgatgagttgtttcctcaagacgattacagtcgtgttgattgttatcaaccatttaatatgggtaggtatttgtgtttatgaggaggaatttttgtgaatttttatcaccaaggctctcaatgaaaacaccaaactgttaacgcatattttcgttaactaaatgataataaataacaccagatattttacgtagttttgtagttaaaacctacatactccccgagtccttattattagggatactttttgaaatacaaaatacaatctcaatatttgaaataataagattttctctctctttttgtcgtcatttttcccacagactttgaccctatttatagtaatataggtaggcaattatttttattgggattgattcacttacaactgctaatgaaacgtggacattccccacgtttcatatattcacacatgtaataatatctaataactacccaactgcttcttgtatttatcttttacggttatcctgacttggaatgttatatcttgccaaatatgagttattcttcttgtccgtcttgagaagaaaaacactaagtttagaagtaattcatcttgttgtacccctttatttgtattgatgttgtgagatgacttttttattgtataaaatgcgagacggttaagt

SEQ ID NO: 62003 - DNA, 1583 bp, Cannabis sativa
aaaaaaaaagaaaaaagaaaatttacaaaatcaaacaagccaagtctaatagtgtatcctcattatatactaatgtaaaattatttgaaaaatttattgatacattcctatctatttcagtttttgataaaaaaaaaaaaattagtctaatattttttatagttgtgtacgttgtaatcatcaatatcagtaccaaaagagatcaaacctccagtcaaggaggttgttcagggtatccatgttgcttcttctaagcccgatgtgccaaagctcatggaaacactgggccttcttggaaactttatgtagatggatcctccaatgagcacggttatggcactgagtgagtggaaaaacatgtcaagaatgtaatttttgatgcctaagtgatatttcaacatcacttagtctattacattctcgcaaagctggtcatcagttcttagagatgttgttgttctacagaaacagaaaactcgaaactacccagtttctgagtaaatcaccttgtcgaaaaagtaaaaatatgaagttgtgaatttgagttttctaacttcatagctctcagttattgtgaaaaactagatgaatagtcgagacaaaatcacaatcagataagcaaaactcagcacaccaggccatttgtcaatctgggcactaggtgctaatttcagagcttccaagatgtcattttgatacttataaggttctaaaacttgagaacaaggtctcctaccctatttgtgatcatttcaaagaaaatacctggaacaacattgagatctgagtgatcaaaaccagcgcaccaagttgattgtcaacttgagcgatgggcccaacactaggtcaactacgtgctgggctcagtttccagtccctcgggtttgtggtttactccccgagttttcttgtatctactttattttttatgacatgaaaaatgcttcgaatactttttcgggaaactgattggaaagggcccaagttgattatacgtctacctaggcgctgggaccgatttcagaccatttggaagttttgtttggtccccaaaaatagttgaatcttaatctttgctaaaaacaaagaatatgcccagaggagttctcgaaaaaaaaatcctcagaaatgacctaggttgacaaattgtcaactaaggccctggtcagccctaggtgtcaacctggacgctgggccttgatcccgacacccaagaagtattgtttcttcgctaaaagtacttattttcccatttttatgaagacgaacaagatgcacgagtcaaatttttggtctgatacttggaagtgatttagaataacaaattgtcaacttgggcactatgtgcccgggcaccgaatactctaggtgctcaaaaatgaactttctctgaatttgattctgatgcctcaaatatgcctgtggtatgtctagttcatgttccaatgaaaagtttgacctatttacactaagacgatcccaaaatttgaaaccatagttcaggatgtcaacttgagcgctgggtaaaaccctaggtgcccaggtttacttttgagatattgattcgtgtattttagctcatg

SEQ ID NO: 62004 - DNA, 546 bp, Cannabis sativa
aaaaatagtgctgaagtccaattgttacactattctgtcaactttattgatcttcaaattgatgcgcctcagtcagtaccatggagactcaccggtttgtatggagaacctaacagagaacaacgccaccgaacatggaatctcattcgacacctgaagcaactttcgacactcccctggtgcattataggagatctaaacaatgttacaagccacaatgacaaaagaggaggcaacaattatccgcaacgcttaatcgatggctttaattaaaccctctcggattgcaatttagtcgatcttgatcttattgggtatccttatacatgggaacgtggaagaggaaccactaattggatcgaagtccgactcgatagagctttggtcactcataattggtcagattttttcccttcagctcaactttttaacctcgaaatcactgcttcagaccattgcccactgctgctacaaccttcagttcagcaactattcgcttcagcacaccaattccgatttgaaaacgcatggttgcgtgaacctctc

SEQ ID NO: 62005 - DNA, 830 bp, Cannabis sativa
tccccacttagccagaaaggcgagattcatttctttagatttcttgaatcccagtcctcctcaggattttgggagacacattttatcccaagcttttagaaacatgccatgattatctttctcaaaaccccactagaagtcacagaccatattgtctatcttagacgccagacgatttgacagcttcgtcgtttgcatggcgtacaacgacatcgataaccccaccgatttaataagggtagccctgcctgccttagacaaggttttttactttccacccctgcaatttagaagtcagattatccaaaataaagttgaaatctgcatccttatgtcttgatctgaacagagggaggcctagatacttaacgtttccttccggcgatcctattcccaaagccttcctgatcaccctcatcaggacagagggagtgtttctactaaagaaaatagaggtttttcagcttatttactcgttgaccagaccaatcacagaaactctcaaggcacttccagcagttcctggcttcaactaggttagctctacccaccaggattaagtcatcagcaaagaaaatatgagagaggaccggccctcctctacttaacctaatacccttaatcaagttcttgttgagggcatcttggaggattctcgataaaacttcagccgtccaaataaataagtaaggagacaatgggtcaccttgtcgaagcccgcaggacggtttaattgaacccactggccctccattgagacatatattaagcgttgtagtagtgatacactgggagacccacgtgcaaaacttcaaaggaataccgcaaca

SEQ ID NO: 62006 - DNA, 2004 bp, Cannabis sativa
tcaacaataacagtataaataattatttaaatagctataaataattttataattaaacatgattaactgctaatttctaaattaaactaagcggcctttacaagctgagcatatatgtaatcacgatttcattatctaccatatatacctacaggaacaaaatgaaacatcttcaatttcatacttcagcaagcctatttaaagtgactttgtaacaataagaatgtttgaaattcaatacttcatttttatagtaatataattgaattcaccgcaccattaacacattgatgagccacctggtttggtttgttgtattagctttttggtaaggactccaaaaataatcaaagaccagtcgacaattaattcagctgataagattttatcatggactttttgttcctgtattaacataactaatttttctattttgaagaacacgattaaatagttatccttaaaaattagccaagaacttcctttcaatcacatatacataccttgaaataaccatttcagtatttacataaagtatacatacttgaacatatatttagtgcctctcataacgattatatgtaatatattctagagatgaaattaaacacaattagaaaagactaattaagttcattaattctttctttcattcaatgcatatatatacagcaaatcctagctacaagacaagatcgttaatcatcatccagttctagtacttatatatatatatataattgtaattatattaaatttaaattaagttatagggttagggaatatggtataaaattatactcctagattgaaaagtttatatatgcacacatatatataaaagttaaaagtattagacatttcattcacaacatgccacaatgtatatatatattaaaaaaaatattgtattcaccttcaactcctgtgatgaatatggtcttggggcatcgacgggagcagcaactttggggtctcatgccacaatgccataagtctcattataacacaacttgtcattttcttattattagaacataatagagaattatataatctgaagatacatttgaatcagatagaaaaaataaagcaaaaataatcatcagtatataagtatattgctctcaaataatctcaaaggagcacaaacacaaatgctaaattcagttataagaaaattaataacctataattgtgctcattgatctaacatatatcgatgcaccctccaagagcagctttcccattgccacttccttcacagatcccatggttgtgaagagcattgagctcaaactcatcctctatccatttcatagaaactcatcctcaacaatgtcttaacaattttcagctaaaaaagtaaatcttatttcctatatacattagtaatatcaagtcttagctaattgcattgtgttgagaaagaaagtagttaataaattaattcatctataaattaaaaagctgtaacaatcaataattttgatttacagtttttaagaataatgatgatggaagatctagtaaattaaagcaacttcagtagcaaaaatccaagaaaatggtggtaaaatatatgagatgatgggaatggccctttctagaaaatggtcaacaactacaaatgttcaacatcccatagtcaaccagaggaagacagaaaccttggaggcaaatgtgtactaccgaaatacaatccaacaattttcataattcaatgattaaaatcatatttattctaacaataagataacatcataaacaacagaaattgagtctaaaaatgagtgctccatttcatcaaacaccttgcaaacaatcttcaataccaaactaactcaaatacccattaacccaaaaacacacaagttcatattcatcaactaattgactcaaaaatcatttcaaaacaataaacaaagtccatctagggttttagataaaaacattaaacaaagaagaagctatagtttacatcctttcttttttttttttttt

SEQ ID NO: 62007 - DNA, 970 bp, Cannabis sativa
tctttctttttttcatagatttttgttatttattattttatttttcttctaaattttacttattaatagattatagtagaacaaattacatggacttaaatttaatcaagatgactactgattttaatttaaataagttaacttataccacactatgtccttgtttaaatataactttttttaactattatttaaacataattaatataagtacgatatataattataacccacaaattttaaaaggggttatgtgtctatggcacgtccaatatatatttaaaaaaaactacaaatatttatcttcagttctattctatcatctttattattttaaacaatttgtttgtgttagatatatctttatctttatatataaaatgtgactatttaatgaattttgttggtttaacgaaatattttaagaataaaataatatttcgttaaatttaacagtattagtaagattaattttataatttaacggtattagtaaggttaatgggtcatcttattattctattttttatttttatttttattaaagataaaaagtgagataaaaaatctcatttttcataatgcgatggatcccgagataagaaactaaagtggcctttggttaaaggtaataaaatgaaatggaacgaaaacaatgttggtttgtttgttttggttaaaaattaagaaaaaaaagaaagtatttgtataacatcacgtgcagagcacgtgtaaaaggatagaatagaacagataagggagtttcttctccgtgagctcagacagacaccatacgagacagtaaatcaaatttcagagtttcataaagtcatgacctttcactgaacactctcttcatttctctctctcataaacctcgacaccctaatcatggcttccaaagttcttccccaggtactactctcctctttctcttatacatctatatcgaatgttgggtgtgttttta

SEQ ID NO: 62008 - DNA, 1582 bp, Cannabis sativa
gcataaatagaaacgttggaaaaaaaatttaatagtgtaaatcatcttttacttattttttttcctcaaacttaaataaaaaatcaaacatatatgcaataagtattgtagacaaataatattcttatattaaaagttatttatatttataatattatatactatacttatacgctcaaatactgttgaaacatttctaaaattgtgaatttgacatctcttcaaattctaaagttgaaaaagtgtatagaatgaagtgatttgtcagtacttagggaaatataacatttctcaaaaaattcaaatgctacatttattacaatagccccaggttagatatcaaatacaaaaactattatacataaaaattacatttattaacatagcacaatgttagaactcaagcacaaaaattattatataacaatattattaactccatctaatatctaattattacattaaaaaaaccaatatctaattaagtaaggataaaaattatcataacaatttttgttcagaagtgctttcaagttatgataactataattatatctaaaataatcttaatatgcaaaatttattattctctcttgatcattttactcaaaatactacattttcttgttaaaacattaacgatgaagataagacaaatcgaaaataagaaagaaaaggtgactacttagtaatttaattggtaaagaataaacttaaattccaaattttaattttcatacagaaaagaataaataaaacgtataatataaactttacatacttcagtcaattttgatggttttaaaaaaaataataataacactttgcattattgaagaaaaaactactatcatactttcatatataaaaacaaccaaaatcataattatatgagaagtcctgcatcaaaatcaaaacaatgaatttgtcaaaacaaaagatttttgtctaaatttttctttatagtagcaaaattatgtgatagagacctaattctctctttatatattacacattatcacatattttgatcattaaagggagatctttcggttcttaagttaagttagactatttaattgcattttagagcatttacttaagttataatgtaacatataatggggttccaaaaaaaaaaaagaatgtaatacataatatattttgtaactgcaacatttattcttactattttttagatattaaaataggagttgtaaaaaataaaaagtcattaatgtatttcaattaactaattctacaataataaattattattaattaaaaattaaaaaaaatttaagaaaaagtgaaaaaataaaagagcaaaaaaataaaagaaaagcttatacaagatgtcatgtaacctacccaaacaacacaatcatataaatatatatcaacaagtactgtctcgactaaagctgataacccaggggcctctggctcaaagaggaaagacgactctaaggggtcaaccaaagacaagaagaaataaaagaagcatgacaagtacgtgccagtttacaccatttatatcgagcttaatgaaactcgagaaaatatttatctcgcgcatgag

SEQ ID NO: 62009 - DNA, 2351 bp, Cannabis sativa
gagctttcgttcatggctgcaaatcagggttcgtctcaagcagctactccgaataatggttctcttaatcttcccaagtctgctcctgcaacattttctcattcactttcagtgcgtttagatgaattcaattaccttccctggcaccaccaggtctttgcagcaatcaaaggaagtaggcttcagcatcacctcgatccgaatctcactcctcccatgtttcttaccaatgaggatcgattgctcaatcaaacttcacctgagtatgaacactgggatcagtaagatagcattcttgtatcttggctcttgtcctctatgtctgaaaagattctcaccagaatggtgggatgtgacacagcagctcagatctggggaactcttcgtgagtattacacagcattgaatcgtgcaaacattggaaaatacaagactcagttaagaaactccagaatgcaaggttctttaagcgatttcttgttaaagatcaagagtcttgttgatttacttgcttcgatcggtcatccaatgtctgcacaggatcacattgaggctattttcaatggactctctagtgcctacaactccatctgtccgagccactcaaccaactcatccacctgcacctgtcactactctccctcccttacctgtgtctcctctcattcctaccactataaactctcagtcccaacctgagtgtcatcttccatctactcaaattcctgcatctcaacctgagcatgagcatctacatgtaacacaacctacttctacatccacaactcaaccaaacactgaaccagtgccacaaactaccacctcagcacctcctcttgtcacaaatcaacaccccatgtgtaccaggtccaagtcaggtataagaaagcctcgggttctcattgcttccttatatcctactactgtcaaggctgctatgcaaaatgaaaaatggctcaaagccatggatgttgaacatcttgctcttgtcaaaaataagacttggattcttgtcaatcttcccgaaggaagggaacccataggctgcaaatgggtatatcagatcaaagaagatgaggatgggaatgttattcaatttaaagcaagacttgttgcaaaaggctatcaccaacaggctggttatgatttcaatgagacttttagtccagttatcaaacctgttaccattcggattgtcctaactattgctctcacaaagggttggcctatacgacaacttgatgtcaacaatgcatttcttaatggggatcttcaagaagaaatctacatggttcaaccaccaggttttgttgaccctacagcaccacacaaagtttgcaaacttcaaaaagccatttatggtcttaagcaagcaccacgtgcttggtttgacaaactttcctctgttctccttaatcttgggttcagttcggccaaatctgatcattctttgtttgtcaaaatcacttctgctagttgtttgtatgtgttagtatatgttgatgatattttgatcactggttctgattccactcaagtttctgctcttgttactgaattaaacaggtgttttgctctcaaagatctcggtacactcaactattttcttggtataaaggctgtaccaactgctactggtatgatcctttctcaaaagaaatattgcaggaacttctctgtaaagcagagatgcaaggggcaaaaacacatcgaactcccatgaacaatggcttaaaactttccaactatggaagtgaaccagttgctgatgcctctctatatagatcaattgttggagcattgcaatatgcaactatcactcggcctgacatagcttttagtgttaacaaagtatgtcagtttatgcacaatccattgcagtcacattggattgctgtgaaacgcatattgagatacttagctggcactttagactttggcctgtagctcactagagtgtctgattttcatcttcaagcttattgtgatgctgattgggcatctgatccggatgataggcgatctactactggtttttgtgtctttttaggataaaatctcatctcctggcagtctaaaaagcagcccacaatctcaaatcctcaactgaagctgagttcaggagtcttgcagcagtggtgtctgagatttcatggataaaatctctgttatccgagttacacatctctgtttcttcacctcctcaagtctggtgtgacaatatcagttctgtaatgcttgctgcaaaccccattttgcatgcaagaacaaaacatatagagattgacctctattttgtcagagacaaagtcatcaacagagaaatccaagttcaacatgttccagcagaa

SEQ ID NO: 62010 - DNA, 1681 bp, Cannabis sativa
aaataaattagtgggatatgtgattctaagctctcgaccactaaataaatgttgaccattaatattagaatatttcatcaataaataaaatattgttttgatatattaaatcaataaatatattaattaataatcatttgctttattattatcacatatatataaatattttaacataaaaaaaaaactttaggtgagtttagatgaattaactaaaccaaatcgattaaattattgatcgagttaccaatttttctattttaaaaaaattaagcgagttgcatttaaaattttgcaacctaacaattacattgaattaaaaaatatatactataaattgaccaaatcaattgatcaaactaatttctcatgctgggcgtctcactttaatcaaatcaatcacctctgcaatgccaatttatgccatgtccacatcgaagatccctttgtctacttgccgagagcttgatactctcatgagaaaatattggtggctaggaaatgttgaaaagaatagattcttggccctaaaggcttgggattcgattagtcaaccgaaagcttccggtggattaggtgtcagaagatgcgaagatatgaataaagccttattgacaaagttggcttggagtttggcaacacaagatcagaagccgtgggtttcatgtctgctcaacaaatattgtaagtatgataattttcttaatgtcagcagtaagagtagtgacacttatcaatggaagtgtattttggatacaagaccaacaatcctccgaggatcaatctcagttgctgctatgggaaactcaattgacttttggcatcagccatggattccttggttagagtaccaagattttgtaggtttaatgaatggtctcaagaatagaggatacacaatcaaaacgttggcagacatttcgataggtaacaactggaacgaagagatagtgatgcaaatttttgggagtgaaatgggaaaccgaatcttatccattcctaggttgcccttcccttatcaagatcaaatgttctggaaaagttctccacaatgtatgttctctgttaaggctgcttattgtgttgaccaattgtggagatttgcaccagagaaaaatatttggaaatggatatgggaggtgggaatccaccctagaatctcggttctattgtggagaattttgaatgatgccattccaaccaagaacaaattgttttttttgaatgaaaaaacttgtgatctgtgtgaaaccgaagaggagaatcccttgcatttgtttttcaattgtagctttgcaagagcagtctggtttgggggcagtttgcctattagaattcaacatcaatcaggagaagacttgatatgtatggtggaaaagatggtgtctaccttctcctcttctggatcggaggtaaatagatgtcttcttcttaactatattggctgtgtttttgatgctatttggaaccagagaaataacttctacatcaaaagtactcctgtaagtccttcccttacgttgataaaagctggaaaaaagttccttgatatccagaatttgcctcctacgaaggacttagacagaagtaaccacaaagatgcaaacattaggacagatatgattcaaatcccagcgaacaaacaagtgcgccaggttattttcacggatgcatcatgggt

SEQ ID NO: 62011 - DNA, 579 bp, Cannabis sativa
tgtcatttgtctatatatttacttttggattgtgtgaggttggttcttaagaacgacttatattttcttgctcatgcttcttgtttgcacgagacatgtatcgtgcctaacccttgagcttgtgcctataggtgcatttaggttgacttgctagcttgatatgccagcaagtactgccgcatgcacgtttcacctacttaggagtgtccaaatagtcgatctgtggcactcgagaagaagtgattgagaaggatacaatggtcttccaaagttgtttaataatattgtgatagcatattgaagactaactcaactaatgatttcattttattttatgtattcttgcttttctacacttgggagaaagtaaagatcatacaacttctaccatcactagctaaattagtccattgtaccaaagataagaattctagagaagtatatcacaactaaattatttcaatgagacatttttacaaacaacttatagtttatttacataaggaaaaacaaccaattaatacaaaagtatccatatatgttcatataaaaaaaaaaagagtaatttacggtataaat

SEQ ID NO: 62012 - DNA, 1023 bp, Cannabis sativa
aggaatcatgagggggacattgaggtccgaaagatagaggagcaggacaacgtccgtcttggcaacccttccgaggctgaggaggaaagagtggtagaacctccaaattttggagggtataatgaggtcggggagccagtgtccgcagagcatgacgtcttggtcgagggggaagactatgtcatcgaggagcttaccgaggcagttccccacaggaggcaaagtgccttaggggacagatgggtgagccctccgtcaaaaataagtgaggcacgtatgagggccttggatataaggctgggtacttgggcggaccggagtgttacgtcccttcttcgaatcattgggcaacgaacccgcagaaagggatgtgtgcttggttgggtgctcacactaagcaaggggcgatggtgcctttgcacccgtacttcaagagagttgcagattatttttgcctttgccgacccaattcactcccaagggaggtacgtatttgtctgccttgttcgtcctctacgccattcaaggatggggtgtgccgtccccacacgaggtcaattggttttttaacttgaagtctacccctaagcaaggcaggtcagggtacttctacttctcttagccagacttcaagtggctgacgggcaccgtggacaaggatgttagcaagatcgggggttttgttgacaagtcttactttgtggaaggcatggataccacctatactcggtttcaagagattctaatatactgacgtccacccctcacgttggcacttagagatagggctcaggagattgttcaactgccagatgctgctcggaatatcactttgttgaccttagaggacaactttgtggagtacaagctttattcggcagactttataccccagcctgtgaaggggaggaagaagaagtccagggctggccgggctgaaggacctgagcaagagaaggagctcattcaactcaagcgtgaggctaagttgaagggtgatgcaggagccaatcagtatgctca

SEQ ID NO: 62013 - DNA, 1419 bp, Cannabis sativa
aaaaaaaaaaaaaaaagtcttttacaaataatgtattgtatttctaaactataaataaaataatcttacattaattttattatatcatgattaaaattgaataactcaatctttctcaattaattataaatcttttttagattgattagtgtgtacatattaaaattaaaaatataatataaatagtatgtaaatataaattttgtaaaattaaaatatatatcgtgatatatcatttaaatttgcaaatttcatataatataattagaaaaataatatcacatatagtgtaacaataatatctattctttaaaacacaatatagatacctatcaactttattattttttaataaaatatatttttatagatgcatataaaaaatatatagtataattaagtttgttagaaaaatatgtacaaaaagaaaattaaaattatttacataatattatttattatcacaaaagataaaatatgaaaagaaaaaaaaaaactaattagattatgatattcttatatttttaatacattaataagaacaaatattgaaactgttttgggtggcatgcaatttcatataaatatataagtataaaattataaaaattaataaaatataaatgtatagaaatataatatttttatttaattttacaattaaccaaataatcagaccaaattatttattatatttatataattgttattatgatacatctttcaatatttattttatttatttatttatttttccatatatttatataattgtgaaacttaaagagataatgtgatattatggtgatgcatagttcaatattatttttttttttcttcaaaatttagaataacatgaactcataacactattttttaaaaaacaaaaaaactatcacatgaattaggaactattgtaagtgatatgttgtacactgtaaataatatattcaattccttaatttaatttgtgtcaaaaataatatattttttattataaaggtgattagctaatttaatcttagttttacttttttaggaaaataccatatgtattttaacgttttagtaattttttaatttttattatctattttattgtttcaaagtttggaatatataacacaactatttttataatttgattttttttttatttatttcataaatttaatttaaattatttacattgtcaaagcagattaaataaatatgtttttttaccttaaaaaatattttatatacttttaaataataaatttatataaaatatatgaaattttaaatctataaatatataaatgagatatatgaggcggtgacatattactttaaaatctttctaactagcattacttattctcttattttaattttttaataagactaaaatccctatcaattgtacatcaagttttt

SEQ ID NO: 62014 - DNA, 654 bp, Cannabis sativa
ctgacccgggttgagatgaggcaaccgattcttgatccacccgtagaggtgtcccaatcggatcatatagtttttctatatcattgaaaaactctttatcatttgtagtgtctagtaagccactaaataaatgttcaagaattgaatattttatagcaatgagactaaacaatatgacttttcccattatgcatgaagagctttttggacaatagaactgataccagtaagatcaacatatatttcttctcacaggcataactccaaatcgattatgcctaaagtgatttctacatctcgttttcatgccttaatgttacgtatttagaatttggatggaagcattattgttgttcacaaaaaggagaccaaaaacttaaaactcgattatttgagccaagaaattaaaaaatattgtagagtcagttggtcattatatactttcctttaaagtgagaatacaacacgcacatgatctacttttatgaagttaataataaagaaaaaatacatatcaattatgaatttattacctttgtgcaaataaatttcttaaagaatatatactaattcaagccagaaaataataataaatatgtatatttaaattattacctttgagcaaataatttaaatatacacatttaatattaa

SEQ ID NO: 62015 - DNA, 1020 bp, Cannabis sativa
attaattcaattaaatattagataaatatttaaattttaaaagtagtttaaagatatttcaagttggttaagatattccctcaaactagttgggatattcccttaagtggttgagagattccctcatcaaaaataccagtaactgaattcgattatagatatttatttgaataattaaatatgatttaattaattgagaattaattaccataaatagaagcatgatttaataaatcagtctcactcattcccatagctattttcaaaatagagagaaaaaaataaattatttttctctcaaactgttattgctcatgtattgagaatttaacaagaacaattataaactttatcctagtagtccacactactcattttgtgtggtggatcgatttagggactacggtgtgaggattaatagatccaaattataagaagtttcgagtttaccctgataatcattaagaggtatgtatatttctttcatatagtttatttttagatttaatatttatacatatggtgatcattgaggctatggtacaataatattcatataacaattcatccactgcgtacttgatttagtaccacaaaaccaacaggcacagacctagctcgcctatgctcaaggtcgggcttgtgtacaattatattttaagttatgtgtatttgttatggcgtatatttttatgttatatatttgcattttttagtttttttatgttatgttttagttatttttaagtggattttatatttttttttgttccacggttatttttttagtttttttattcatgtgtaatttttatggtgtatatatttttgatttacttctggtaatttttttgttatatgtgttttgctttataaatgtgtatacagtacatatattaagttttcttttgatatatatatttttttatattgttatcccaatttttgcactctgacatggcatcacatgaatggtgacacgtggaatccacttaaaacatctactcgggaagcatagtc

SEQ ID NO: 62016 - DNA, 1459 bp, Cannabis sativa
tgatggtatgtttctcataacttttcaatcagaatttgttaaacaaaggattattagaggtcaaccatggcattttttgggtcattatctgtcgcttgttgagtcatctgggattaatcaggttgtagtgaaggattttaagaatatttctttttggatccaagttcatggtattcctataaataatattaatgaaacttcggggtcaaaaattggaatgataataagagtttttgttgaatacgatgctgaaaactcaagcacttttatgcgaattagagtattgtgggatataaatcgtcctttattacgggaaatgttatttgagggggaggaccaactatctaatatgtggatctcttttaaatatgagaggctgaatactttttgcaagttttgtggtctattggatcatgttcatactaagtgtgtagcgctattggacgagactgaggcaggaactcgaccaatcttacagtacgatgataagatcaaaacaactggtttagatcatatgttttctccggttcgctcctcaactactggaggacctatacataaattagtgactcaaatggctaaggatgctgccctaaagaaagctaggagtgcagtgttaggattaaccactaagaggcagaaaatcttaatatctggtaattgctgttttttaatctcatttagattgtaaaaataaattcataatgttttaggttttcttttctaactcttgcttaattaatggaatactagatcaagagcaaggggcaacttacattcagagagctataagtaatgaagaaggttctttgctgaattagaaaccgataggttcaaataagagtgacagtactaatattgccttcatagagagtggtaatgcaggagagaaaacaagaagttcaagagctatcaatggggaaaacaattgaagtgggggctaactctggatcaaaagggaagactaaaaattccaaggcataaagactcattgacaaatgagataggattgctaagtatttcaataaatgggtgggctgttttctaagttaaatagatgactattattgggtggatttaaaatgttatgttgtgtgtttattttcaaaaacataagtaatggagtttttttttctgtttttaagtatttgttaaataaagtggaaacaataatttaagtattattttctcttgtcatgtttttaaaacgtaaattacctattttatttctcaaatattaaaacttgctctgtatgtgcttagagtgatggatacaacttttagttttaaaggtaaatgatagaggaatgctacacttattatagtttatagttttttttttctcaaacagtttataaacaacatataaatattttacttcaaatgaatgtagtacaactcaaagataaactaaattatctacaattgatggagattgtcattatcaatattttattcc

SEQ ID NO: 62017 - DNA, 1203 bp, Cannabis sativa
aatactgtacacaaagtgtgttacacttgaacaaaattacctaccttataattatatgtaatggacctgcttcatatgtgtagtcacatacctacacagtatacataagtacgcaactttggtcaattacttacagaaataacaactgaccctgcaaaccaacacaagtatttttgacgtgctttgtcctcacgcaccctgaaaaaactttctaagagatcattcatcttaagattgctccaggtcatcaagcacgcttaattttggagttcttaagagaatttggatcttattgatacatgtagtacttatgaatccatttatccttgcaaatcacaggactctaattgtcacaatcacctcatatggggaccgacatccttattaatcatacttttagttgggtcaagactttgataccatttgtaatgcccatgatccacctgtgtagtcacatacctacttagtgtacacgagtacactacttgttgcttcctaaaatgatgattggctttgtaaaacacaagttcttctaatgtgatttgtctttactcgcatacttcttaaaaaaatttctcaagagattgtccattctaaaattgctccaagtcaaacatgcttaattttagagttctttaattatgggctaccaaaaaaaaaaaaatgcatcttggtgatatcttccttcattgacaattaaaaactcaatattatttctccatttttttcaatttggcttgagttatcactactttagttaaaatactagtcattcaactatgagaaatgttaagagatatcttaataaagccaagcaaatatttgttattactgtacacatatttatgatctaaataacaattccctttcaaacatactaacaattattgtgtaataatttattattgagtatactcataaatttagagtttacttagtagtgaagtaagggctttcagacatttgtcatttaagtttttattctattatccttattggattaagatgaaatttttaatttaagaatagagatagactcaaaaattttctctgactattatatgtgtccgctagtattttttttttatcttattaatgtatatgaatttaataaattaaaataaaaaatattaatttaattatttttctcaaaatattaaaattaaaaaaaaaaaataaaattatttgaatttgacacaaaaa

SEQ ID NO: 62018 - DNA, 2233 bp, Cannabis sativa
  modified_base (30)..(34): a, c, t, g, unknown or other
agattgtttatttaaaagattgtttaattnnnnnggtttaattattgggtttattttaacagaatattcttttatttttaaactgttaaaccaaaaaatgcccataaaaatatatagaatttttgttgggatacggctacactacaactccttaatatatatcatataaattttgatttataatttatgtaagtgctaaatactttcctacaagcaagaataaaagtagtgttttttttctaaaattttccaatgcatagagaaaaaaaagttaacaaaataacaatgtttatacataaaaattattaaaaaaaataaaaaataaaaaatggtgcttgattaatagattaactgaaaatagaaagaacaaaaaatctccagaaacgaaaagtacaaagtcaacttttcaatttagtcatttaagtacaaatgtacaatgtaatctccgagtaatcattatcctcctcattccacaccaccccaagatggtgcgtctaaatatatactaaaaaaagacagagataaagcgattcaaacaaaaataaaaaaagaaaattggaatagtcatcaaatcatgattagacttacaactccttaaactttgcgatacagaatacacatacacatactaaccagtaattataattaggatcatatgattataaactttgttaataaatttttttataggcaacattgtgaatagaattcaacattattctttaagtttctgaaaatttggatgatgtgatattagagggagagactgttggcgtgaaacataagaagagtgagtgtcttttttgtaattttagaaatagtaggggtccaagaagttagtcaaggcccaaaaataggcccactcggtgggcccaatagcagacggaaagttttgcaccggtggttttgcaatagtggggggttccacgactcgacctccgttctatgaagtcctgtgatgaagcgttgacaaatgccaaaaggatgcgcttttgttcgagtgtcagtaatgcgggacccacgactccacaaccctacacgtgtatgtgatgccctttgcccccattcagttcagtgcgcttagtttttagtctaaaccaaatcaattcaaccaactcaatccaaacaaatcatccctacttcaaatatatcaaaactatatttgaacaagtttgagaattttactgtatttctccaattgataaagattgtactttgaacaaacccattaaatcccttttaaagatacacgtgtattatacttttatatttatatgcagaagcatttgtagatatatttatttatcaaaagtttttctctcaaaaatcaatatgcatataatttttctgggagaatatttgagtatataatattacagtggttttttaagtttggacacagatttctggtatttctaactatgctattattaatttctcgtgctgtcaaagcttatctttagatatacttctttttagatgcttttgggctttggatgatctatgtttcttacataaattagttgtacttttagaatgatattcggagatgagcaacaaaattaattgatttcagctaaaaggttcgtattttattattatatttgtcgcaaaatgtgtgactattatatggttgttattgattaatatgttggctatttgtattttgataattgaaaggaaattttacaaaacatgatacgatattacgcacaataacatatctatatttttgatggttatgcatgatgtggaacaagggtatgtactctatgcctctatcatgagcttcataaagtaggtttttttttttagtcaaaaacttaatctcagattctcagtaatttattattttttaaacattttcaaataattaaaaatgtcatggtttattagttaaacaatagtgtttatttaatatgaacctacatgcaattaatttgatagtgcatgctaataatactcatatactaatgaaagatgcatagttcttattataacaatgaagatggatcccgaatgctaaattttattggaacagaataaatcaaaaatcccaattaattaatgttttaagacagaggaattatggaatatatacagattaaatggtatgtcccctgtgcaataaaatgagatgaaattaagtcctatgaattcataattattagttgctgcaaaataattacacgtgtacttgtgttgtgtgtaatgtctgagatgatttaaaatc

SEQ ID NO: 62019 - DNA, 2057 bp, Cannabis sativa
attacaacttaattacttcaggcccaaccaagataatggactaggtccattagcgaagtcagctcttctggatgatggacaaatgactcgtccaggaaagataatcttcctgcacaacatgaattcaaaagatatcaattggagcgtccagagaagtaatcaacaagtatccaaacatccagttctgtatcacatcaattaaataccagatctcacgacatcaggacttaactcccaggatctcgtccaaggatcatatcttcccaatatagaaaaatagtaattgatgatcaagcatttaatgtgtctttattatctacaaaagtaggacacagtttcgacaactatcaacgtgatgtggcattcacatcagcataccgttggtgcctcttgggctggactccaccagatgggcccaagtcaatatattatttgtatttaccccatcaatgggagatgcgaactaataagaaccctagcactataaatataagaacacccattcatgcaaagagtttaatctcattcctcaattgctcaggcagaatctatggttcaaacatatgtgtaacataaatgtttaccagtcttattgtaataatattgactcgtggactaaggcttgttaatgtcccaaccacataaaaactctggtgttacttctttattattcatcaatgtctgtaaatattagctttcacatatattttgttagtttaagaaaatctcggtaaatattttagtactttcatcgagagctgaaaaaagcactgatactatcaaaagttttatactgcaaccatggtaatcacccgaagcaaaactggtggtcgcgatggagacgctcctattgtaaaactctacttatttaggagcaccacaatattttccaaattaatgtgtcgaccttcgtaatcaaagaattatgaaaaaactgtatttttgcaaatgccaataattttctttaataacaataaagaaaaaatagaaataatagtgtagaatttaaaccttgacacaagagaattgtatgtgatatcagtgttctttcaaacactactagtccaaggggccgtgcccaaagaataaaatcaattagtaaagtatcaaatattacaaaagcaattgacttaaacaaatttagactccctctagtgatttgtcgcaaccctttgtagtctaccttgctaatctgatctctaaagcacaccaagtagtgaactcccttcagctattgatgtatgcttacttcctctcaaagtaaggcttaaacaaatcttctctcgtagatatatactcacttcttgagattggaaaagtcttttcccaaagatccacgcttgttcaaagcttctcttcaacctatttcatgaatagtatgggatcataataagaaaaccaaaacctagttgaacactttaagtttttacaaatgaaatactcttcacataaagatagatatgaaaatatcagattagaagagataaaattgtttggctgctctctacgtcctatttatagaacatagcaaccctagagacagccacaaaaatgatttcccagctgtacaaaactttcttaaaaaatttcctgatttgtagcatcataatcggtctctgcagcaacagattaggaccagaaaggaaacattccaaaatggaccaagatcatgaatttggacttcaaacttgtcaaataaagtttatttgatatgctctaattaaggcaaaattgaaatcattaattagaaaaagggaaagtcaagtttcccaaagttagacaactttccataagagaattcattctcttacaagaagttttctaaaccaaaagagactagctgagaaggaatattttcttagaagaaaatagtaattagaggcacaaaatcaatgtaataaaaataatttaaatgctcaataaaaatgcatattaattaaaaaaaatattttgacaactaaattaccaaaaaaatacctaaaaatctctccctttagcactttagataatcaaaatatttttaataaccaagaacctacaaaacaaagttagaaaaa

SEQ ID NO: 62020 - DNA, 659 bp, Cannabis sativa
tagaattttttaaaaaatttacaaggatagtattgcagtcaatatttagtagcactgtaagaaggagattcaattcttaaaaactgaggatagttatcatcatagaaaagaatatctgaaatatgttcattcacgtcatttattttcttaaaaaaaaatagagcaacttcataagcagatgatcataatattctcatccaattatgtaagattataacaatttttaaatgaaaaagccataaaggaaatttaaaaaataatttcgaataaaataagaatgtaacgttgcctcatattgcacgggatgcaaggtaaatcttattttataaacttctaccattgtttcatacttgtaaaacaaattcaaaacagccactattggagtgagtgttacaataaaatgtgagtctacaaaatatttatctttcgagatcttacggtgctaaattttctaatgcatgatcacctagtgggatggatcccattaaaaataataataaccttgtaagaccaataatagaaatccaaaattgatactatatattcaataatagaaataaatgcaatgttcaattaaattataatcacataatcaaatatggaaaaaatatactaaaaataagtgtatttataattttctaaggtttttttaccgaaat

SEQ ID NO: 62021 - DNA, 946 bp, Cannabis sativa
caaaacctagatttgattccaagttgataggattttaacatgcacataggcttacacaaaaaaaaaaaaaaagcagaaagaaatggagatgagttgaatttgaatgatggaaaagagatacacaactggtgtttgagagatctgggttctcccagtacaaagtgaagtctgacaaaatcatacctccctctcaagcagaactgcttaatgcacatagcctacgaaaaggccggctgtacaacctaataaacagaaacgtacaaaagtagcctaggggataagcacatctaatttcaacttcctattacctattgcatatgtacacgaatggtggcttatcaaattacttatattcttctttcgttttgtttctataactgcttctgaccttatccatatatatatgcatgcacgtgcttgcagtatataatattgaagggttttgttatcttggccttcggttgaggtcttcttcttgttcttttttttctgatgacaagaatatcctcagttcttttgttcaaattaaaaatgtttgttactccatggtctagggcctttttcgcagcttctgttctggtatagcctttattcttggaaactaatatgatactttggcatatcaaatcaaactaggtttacactattaatttattgagctccaaaacctgacgaaattcatggaagttgaccatagtgtgttttcttgttggtcttttgacatttcatggaagttgaccatagtgtgttttcttgttggcctattgacattcttgggattattttcaagcacatgcatgtggataaaatatatttgatctgtttctttttgcttgtcccaggtcacaagtgttggaattaatactgaatggggtttgctcatggctagtatttcagaggacactggtgaagaaacacctttgcaggtacttcccccaccctcccc

SEQ ID NO: 62022 - DNA, 1290 bp, Cannabis sativa
  modified_base (1232)..(1249): a, c, t, g, unknown or other
cttatttgaattttaaataactttttcactttcttcttcttaatacatctctaataggaaatatgcaattaccaggaaatataattataagttgtaattatatagtctaatcattacactataacttttacattacaacatataatctagtaattacactagaatttttacattacatggtctaataattacatagtcaaatataaactaataaaaactagagagatataacattgaaaatcctctaaaagagccacacaacttttcaattttttttcttcaactaaactaatttatcttggaatgtgaataataatggattaattttagtatcgttatgatgtccttttttagtattttattttagtgaaattttttaatattatcacatattttaataattaattattttattagtacgaaactagttcattaaatcacaaatgtggcgtccctatagaatagttacaacttggtatcaaagcagccacagttttaaaggtcttgaagactggtcgaatatgtacatttgctacgaagataggtcgactcatggtatagtaagtgttaatattatttgctattagattacttgcctagactattataaagtatgttaggaaaagtagcatagtgataattatgataagaatacgtttaagagtataaaataagttttagagtggttaactaagtatgaagataacgatgatttcaagggagtaatggtagcgagcgtatgaatcagaaagtaaaaaccttagtggtaatgacgggaaaggaatgtgagagtcttagatgttgataaatcgacaccattaatgggagactcactataagttggtatggtagttcataccaaggggttgtcaatagaacaaagaatatacttgaggtatgtatatttctggatgtgtttgaaaagatttttaagatttctaccaaagacagaaactaaactttgagatcaaggaatgatctttgattaattgtatctgttgagaatttaggaaatgagtatatcagtttagttatgggtacccggaagcagaaatgttacctctaccgtaaaggttgaattaattcaatttataacggtggttaactgtaaattattgggaaatttaaaagttgtgtcagaccaagagaaattgatacaagttaaaataagtggagatgaacaagattcaagttgacaatgagatggaaattttgttgggttttgtgccctnnnnnnnnnnnnnnnnnntataatcagatttacttattgataaagatcagaaataacat

SEQ ID NO: 62023 - DNA, 833 bp, Cannabis sativa
  modified_base (559)..(567): a, c, t, g, unknown or other
cctctcttctctctaaactatttttgctcttgattttcttggttgaggtcagcttgatttcaagcttggtgttggaagcttttgagctagtagttggaaagaattgaggtagttctttcactgattttagttgaaattattgctgaattttattgttgcaagggcatgaaatgagttgataatgatcttaggtggcatgttagtaatctcttgttgagttaagcatgtttttacttgaatcttttgattttgtgtttgagtgaactataggatgaattttagggtatttcttatacttgaattcaggttttattttggtgttgttgctggaaaatataaggttgtatagatttgaagttcttattattgagcttgagatttgatggtgttagctcttgagagaagctagtttatgcttgttgtcttgactgaaattaggagattaatattggatttggtgcatgaaatatgtattttaaactagttgtatgattattaaaatctatttgatggtttgagagttttggttaagaattgggttgtttggatgtgatttaannnnnnnnnttcgtggtttattgctggtttttctgggttttgaacccaggtgccgcgacatggattttgcatgccgcggcccgctcttttctttatgggcggatccttatgcaaacttcaaatagccataactttgtgattcatactccgatttaggtgttctttataccgtgggaaagctcgtttcgagctatatgtgaatatttatattttgaatgccaagtttatattttgtaaatgtggaattaggaattaaccctatatgtgtgaatcct

SEQ ID NO: 62024 - DNA, 1124 bp, Cannabis sativa
aaaggagtatgcattggacgattggcgggtgagctactatcagaggatgtgttagcttcagggtcagtgttgcgagggatacttggttgattggagggacgttgtgatggactcggagtagttcatgttggggtaagtattctagtgcggaggcactactccatgggagattctgaatggcaacagtggcgtaggttctttgatcaagtccaagagtgggcgaggaagatcgtcaccaagaggatgtttctacggaggtagagggacaagtgcagacttaggattcaggagaagctttgagtaagcttaggagtcaagatcaggaagattcgcctggggtccgtcgatgagggcatcgacatgttgaagtgggggcgaatgtaacatgcgtgccaagatggcacgttacaagctaagtgatgccccacaagttggccaagtggtggtcaagtggtggcgcatgttgaggtgcatgctggtggcatgttggtgtttagtttgtatggcagtggcgtttttgtaaatatcttcaatattgtctagattgggacaccacttggtattcacaatttatttgggcctacgaatacaatggtgcatcagattggagaaactatgtgatttggtatgcggtttggccgtatgtctacaaagccaaaatcatgtatgttcctggtagaaggctaaaagctcaaaatgctctttaagggggtaccctggtgtcagctctccaccaccccctggcaccttggtgcgaagtgagctactacttgtcagtgggactagtaggacgggcatatgaggaccacgaggggactcatatgtctccatgagttggagtactcatggacattatcgggccgacccggtagtgcgtttaagaagctgccagaggttaacgggtacgtttccattggcttgccggtacgttgcttgcacgggacggggcccaaacctccaagagacattgtagtgtgccatggccacaagtctcaacacgagattacaagggtagtcattcgtgggcaagtttgcatacgtgcatgggacggatacaccatgttggaaagagacagagtctaatgtatgcaactagttttgtggcttatctcgagggcctgcca

SEQ ID NO: 62025 - DNA, 505 bp, Cannabis sativa
tggtgcctagggcctggaatgccgatcacctctaaaagtattaccaatagtcgaaaaataaagtttatattttgtaaaggaaatttgtaccagacaaatatatgcaacctctaatttaattttgtaagactaagtgacttaaaaattgattttcatgtcacttagggggtactaaggcatacacacggacaaatataaatagatcaagttaaaaactaaatatatttgaacataaggtagattgtttgaacaagggaaaaaaaccttaaaaagaaattgtcttaaaagtaaggggaaggacatgaaatgattacaataataaaggagataggtaaatgattcaatcagcccgaggaggaagacgaggacccctgtgctcctccagcactgtatctagcctcttcttcttctcccagaagcgaacaagaacctcttcaggcttgggataaaagctgaggttaagattctggccattggtttgtcaggccataaagactccatcgtc

SEQ ID NO: 62026 - DNA, 777 bp, Cannabis sativa
acgaatttaaccttaggcaatccacaaaaatcattgagaaggaatctaggcaaattttccctttcaggaaatttggctaaaaacgtatctcacaccgatgtttacactaacttttaaatccagaaaggaattcaagcatgtctttcctttgggaatttttgttcaaaatgcattccatttttcgtttaatatgcatcgtgcgctaagtcccccgacaaagtaagcgaatatgatgcattgtatgtttttggggatatacacagctaggcataacaccctccaaatgagctaagaagcctggatgcctccgaattcttgaccatttgtttaaacatagctcgtggtaatgatgcattacttaggtcaatgatggcaagatttggtcatgcatccaagtgttaactgggctcctttcagcgaggtatagtcaggtttgcgctgacactttaatcacattctctctatctagagccatctgtgatgggcttttcccgaacaatggggagagagcaccgggaaacacgaaaggcttctagttacacaaagctgagagtgtattagctgcactttttttgggggtcgggttgaattatacaatggactctcgacttcaacgagggaaggctaaagttgcacttgaattcaagcgagggcttcacgctcaaaactaatggtaaaaactaagttgggtgtccaataggcttcaagcacttcctccttcgagaagtgagggttgaaggcgcattgaaccctaatcgacattgtaatgaccgcatg

SEQ ID NO: 62027 - DNA, 947 bp, Cannabis sativa
gagctctttgcgccttagcaactggtggagtcgggagcttagtacgcccaaagtgctccattggtaggaggtgcaatgttccaaagtgctccatttgtgccaaagtgttcccttttcgctagtgtactctcttttagccaaagtgctccctttttggccaaagtgctcctttttggcctaagtgctccattcttggccaaagtgctcttttctttgccagagtgctccttgttttggacttccatatctagtagaaaaatttatgcacaattatcttgaattttttgagacataacgccaaagtgctccttttgttggacttccatatctagaagattgttgagctagagaaatctttaaaagataagggtagtgagaagccgaaagctcttcaagaggcaactgaggaaggtgaaataaaagaaaatgaagttgctcagttatgcttttatagaatttggtagaagaacaagaacataaatacctcgttctttgagcctcatatcaaggaaagtattaaactatacaagcagatggaagctgatgaaaatactaagcgagttgggaagtctattgaagaagtagaagatgagggggcttgggaggtcacaaaagaggatgaaaatgatgatgatttacctaaatctcttagaaaggaggtttacttagttttaatttttttatatagtaatggcttctaagccaagacagtttattcaactttattttttgtaaccaattatttttcagttagacgaccagctgtttattttataacttatgctactttaatatacatattttcttcactttttgtaagaaaatttatccaaatttcacttatcacaaattaattatgaaccattgtccataggtagacttaatttaagattacaaaatatttttttaaaattctatctcgaaatttattactcattaatccatca

SEQ ID NO: 62028 - DNA, 1875 bp, Cannabis sativa
aaaaaaaaaaaaaaagctattttgggcaaaactgaaggagaactagaagagctttcattgcgaggtttaattaagcttaattttccgatccacaccagcaacaccacgatcaaaattccacctttggaaaaggggaagaattttttggctaaagaaggaagaggaggtgggaaaccatgataggggtcgggaaagccaagcagtactcgaatgttcttgacaagcccctcagcaaaggaaaacaagaggtcccttctgtacttctgagctgaaatttttctgggtttttgttacttgattcgtttgtggcttttctatttttctttatggggtttagtgtacatttttatcggctttcgtttatatgggatatttttagagtaattggtttgtgtagtttggatctctctaatttgaggctattttatgttaatggcgatctgggcaattttcatttgagtttgtctgtataattagtgagagtatttttgacatcaaatgatgatttcaggtcagcttgagtgcttttgcgttcttgttttcagagcttgtgcagtacaatcagactcaagttgataacattgctgagttagaacggaggtgatttgcatttgtcacattttctgattcatagtttgtttgttgatcttagttacatacttataaatactcagaataacattcacccaaacatagtttatacattttacttatatttcaataacaaataactgagatttcgataccttcactgttgattcttaaacttattaatattttgtgaaatatggatcaggcttgaggatgcaggctattctgttggtgctcgagttttagaactcctttgccatagagataaggtataatattctgttggtgctctactcaaaattcacattagcaactaatgacttatagctcatcatgtgatgagactctacattttacaaagcagtggaaattagttttaagctacaaaattgagttgtttaaatgattttaatttcacatgacttttcatgtttggagcatgaatttatcatttgattacagaaatctactcctggtctgaactcattttaaaattgtattcgcatgcttgcatgaatggacaattctgtcctgatagtgaaagtagaaagagaaaagttgtgcatgaatcattatacacctaaaatacttaactgagtagtggaggacaatttagcaattatattctaatttgttagaaatctaaacttcataagaatttaaatgtgttgagcactaaatttgagatacaggtgtactgtgttctatccattgtaaatgaaggtgctcttttaacactgcagggaaatagaagggacactcgtttgttgggtattctgtcttttgtccacaccacagtatggaaggtgctttttgggaaggtgaggactactgcttttcctttctatattatgaattattatagctagatgcaaatattgaaaggatatgcagaaaggcatacttacatgtttcagaacaaggctatccaattcaatactataagtccattgcttgatgtttaccatttagaattttttttctgttatttgtctgaattaataagttgttcttcattccacccatgatctattctgaaatacctgcgtttgtttgtgtgtgtgtgtgttcttttggccttttctttttcttccttaaaatgggctggcaattttttcatttatttttaattttcagtacttaatttattagcttctttttgccttctataaggctgctgactcacttgagaaaggcactgagcatgaagatgagtacatgattagtgagaaggagcttctggtgaacaggtaacagtttttgctcagaagcctcggatggata

SEQ ID NO: 62029 - DNA, 1153 bp, Cannabis sativa
  modified_base (281)..(281): a, c, t, g, unknown or other
tgctgtaggacagatgagactcaagagtcaagagtcaatggggtctggtgaggaggcattagccattgggcaatcacatggtactgtcttcctactcatcccaatttcatatttccttgaatatatctcgctcttcaattcccaaccccaccacaccagcacagatcacaaaatttgtataaaaatgtctaaggcatgccccaatttgaagggtcaaacaaatatttataagtgaaatcaaagcagcttttgttaaaaatctttatctgctcatccacttnatcatatcagtaccagctgtacaacttgtactgctattgcctatcttattagtggcacagaacattatagcttattcctattatttcatttagtgggaaaatacacaaaataatatttacctgaaaagtacttttgataagttcatttgaatgattaaatcaaatcacactgattttgtttcttagttcaggagatccatttgttaatcatattagagataaaaaaataatataagaaaccttacaagagaagggaaggcttgttctgctcttgaatttaatccttatcataaataatgtcacaaagtatagttcaaaaccacaaagtcaaacatcacatggaattttctttctactctatacatggaaaaattgttcttcttttacattagaaatagtaacacactacttttacataatttgtaggtgactgatatctagacacattgattaatttgaaaatcagttagaccataaatcaaatggattcatggataagagccattcatagtttttagaataacatatggcctactcaaaacccacaacacttttggtcctttcctccaactgaagggttatattgtgattagaagcaccaactgacctacctaccaaccatgtgatgttgttttgtaatattaacacagcaacaaataagctttaccaagtattcctttagaaacttgataattataacaataaattattatgcagagtgtaaatttgatttttaattattattcataatccgaaagtgactgaattgtcaagtaaagaaagaaattattgccaaattactgcagcattttaagagtcctgaagattaaagcatgttgacatgaataaaagtgaattggacagaaattaat

SEQ ID NO: 62030 - DNA, 992 bp, Cannabis sativa
taaatataagtcttctccatgaatgggctttgacaacactggtggttgggccatgtgttctttcagcttcttaaacgcctcatcacagttttcggtccattcaaacttctagaattttttcaaaatgttgaaaaatgggatgcacttgtcagttgaacgagagatgaagtgattcagggcggcaaccttttcggttaggctttatacatccttgtgtcttcttggggagggcatactcaacaaggcctgtatcttttctaggtttgcctctattccgcactggcttactatgaaccccagaaatttccccaatttaacggcaaaagtacactttttgggattgagtttcatctcgtacttcctaactacttcaaagcattctgtatggtcgtctgcatggcccatgcttgttttatatttgaccaacaagtcatccacgtacaccttctgttacgccccaggaggcctttgaacattcaattgaccatgctcttataggtggctccagcattttttagtccaaagggcatgaccaaatagcaatatacccccttgtcggtcctgaagctgatacactcttggtctacgatgtgcatcttaatctggttgtaccccgaatacgcgtccatgaaagaaaataacttgaaacctgaggtgccatctaccatttggtcgatcctgggcaacgggaaacaatcctttggataggctttgttaaggtcggtgaattctatgcatattcgccatgtcccatttggtttgggcaccagaactaggtttgccaaccattccaggtaatatacatcgcgaataaagatgtttgacaacatttgtccacttccttctctacggcatcagccttcactggatctagcatacgccttttttgttgcactgtttaggatgtgagtgattatgttagggcttatcccggtcatgtccccatgacaccatgcaaacacatctgccgatgcctttatggtgttaatgat

SEQ ID NO: 62031 - DNA, 776 bp, Cannabis sativa
  modified_base (234)..(237): a, c, t, g, unknown or other
cactcaaggtggatattagcaaagcgtatgatacagtcaactgggatttcttggaagatcttttgaatggttttaaacttccaaccaggttcatatcttggatcatgacttgtttaagatccacctcttactcgattttattgaatgtaagagtccaagaaagtttcaaaggcaagaagagattgagacaaggtgacccactttcccctctcctatttgttatgataatggagnnnntaaccaggaggcttcacttagcagtaaatcagtcaaaaatcaggtagcatcccttatgcaagaatctcaagctaataagtctttgttttgcggacgatttgatgattttttgtaaaggagatacatgctctatccgagcagtcaaagaggttctagatgaattcagcgcaactttggggctagccataaacacaggtaaatctcaactctactttggtggagtgaaagaagaaggaaaacaggttatgctgtcagaaatggctcttcttgaagtagagttttctctcaaatatcttggggttcctctaagaccaacaaaatggaaagcagaggactgtggagtgattatcaagaagatcaaacaaaggctccaaacttgggaaacaagacatttatcttttgaaagaagggctcaactcatttactcagtgcttcttggccttcgaaattattggatgagtatcttcatcctccctcatagtatcaccaaggagattgaaaaattatgtagaggtttttttatggggatggaatgggaa

SEQ ID NO: 62032 - DNA, 834 bp, Cannabis sativa
gccgacttccattgcacaagacaattcatagatgagataagaacccaatccaccgcaacatatttttggttccaaaccaaatcatttcgagcatctagcacaacataactgcctccccatacttgtacttactgtacttttgcaaaatttgatcaaactagctgcaaaagtcagtagaactaatcggcctaaaccccagccaaaagcctctgccagcattgagtagcgaatgaacaggaaataagtgcatgaaaaatagtttcctcacttctttgataaaccagacacatgatttgaactaggaccctcttaccacttaattgagtcaaggtgggcaaataatttgaagcagtctgctgtaccgaattgagagcttttggtggtacctttaaattccagagcttgcgccaaaacccaaaagaatcagctgcaatccaatttcttttttgagcttgtattaacttgtatgcactacgcaccaagtagaaaccatgatgcttcttagacctgaaaaacgatccccaactacatttagactcaatggaactgccaaaatatgttgttgatcatgctcgtttaaaatcttctgctatcatgacttgggaaactgtgtctgaccattgctcttgtgtggtctattctttattcaggatattggcgtcaaactgttcagattcttcaatttctggactgatcacaaagattttaaaaatatattattggagaattgttataaaccagttaaggggacatgtctcaagacccttcattttaaatgcttgaggctaaaatgccaacttaagaagtttaacaagcagactattggagatgtgg

SEQ ID NO: 62033 - DNA, 1001 bp, Cannabis sativa
cttccagatttcttctcgtttcctctagaaacccaatcttcacaagtttctgagattcacggaatcgtccaaggagtaatcgacgatcccaaggttagtacaaaaaatcttgtttgcaactatttttcctgttttttgaagattgatctgtgttctgtatttttagagaacataatatgcatgatataatagggagtgtgtatagagccttatttttctatttagaaactgggtagttttctggagaaaatatacttgaaatttgagtaaccgtggatctcaggaagaacacttcgagtattcgtgtcttttatgttgattgccttgaatattcgcgagtattgaaatgatcatctcaaatactcgcatataatttttagaaaacccggggatttagctatctcaacccttatttagaacttagggtttattattgtctcctgattttatgcatgtttttgttacgagtgttggttgagtctttcaaatggtgggtgtatcaccgtaacttaatgttcatgcgtgcatacgcatgttccttgggatactgtgatacaccaagccatttgcgacatatagccaatcctcgttttctccttactttaatatcacacgttaggactaaccaggtttctcgaaacggtgaggatttcccattaacccaatgctcatgcgaggaatgcgtgtcccttgggatactggggaacctcatacttttcttgaggtgtaccgttagttgtacatgtgcgatgtattcttagtcgcatgttgtaactgaccagttttctcgaaatggtgggtgtgcctcaataccttaatattcatgtggcgacatgattattaggttattgagatacacccagccatttcttgagatgccaggttaactctctatattttgggtagtgtcttttatgagggtgaggtcacttacgttgttctcacacttagaccacactgaaaagatcttctatctttcagatgagcgacctgtcagatag

SEQ ID NO: 62034 - DNA, 1557 bp, Cannabis sativa
  modified_base (1060)..(1063): a, c, t, g, unknown or other
ttttattaaataaaatcttaataatttcttaagaaatgacaattattcataaacattgaatttaaattcaaagtgtttatgtggtataactctttgtacagaataatataccatagattttgtatcaattataaaagacaaacacatacaaacatgagaaacataaaacataattggtattggcatacaagttaaagaaaaatgaagctcagtttcataaaagcaattcataatgaagacctcttaaagagaattttattaataatctcaaaaaaaatgtcataatgaattgtctgcataaatatgaaatagggtataaaatcccattctaataattgaaactaaattgttcataaactaaaacaattaattcaaaaattaaaagtagattcgagcttcatattcacttggacaatctccacccttctgtccaaccatccaactcaactcgctaggatagcaatccaagtttaagcagttgagctgaattaagaagaaagtaaacatggttagtagatctagaattaatagcctaaggggataataattttctaaaacacatgagtttatagcatagttagaaataccttgtttctttgccaaaaacttaggacactggggttcctagtggcccttttcgttgcaatagatgcactttcctttttgctttgaattgggattagcagtctttttcatattagttgtgttaacagctattagaggcttcttgctattcttccacttcttctttttgctgggcttcgaagcaggggcaatgtttgcctcagccattgccgtaccattagcagtgccagaactaggagctttagttcctaatttctgtggacccccaatcaaattttcaaatgtctgaacgttgttgatgaactcttggaagtcaaaagtcaacctgttcatgacataatttgaggtgaagggaaaaaaagctggagtcaaactattcaagatcaaacttacttgagttgtctgatctataatagctccatgattcgaagcactctgccttgtttttgtcagctggaagttgcccgttgagaannnngttgactataggtgtcatccaggtaggcgagctatctatcatcacaacttcttccttttcacaaatacttggctcgtttaacacctcgaccggtaccaagttcaattgatccacttcattttgcgaggccagttttgttaaggcatgggcattacagttttgttctcttgggattttttcgattttgaaataattaaacttttccaagttcttctgaaccttctctaggtaattttccatttttaagcccttagcctggtgtttcccttggacttgatttacaagaaattgcaaatcgctatggcatataagatttttaaccttcaacacttcagctatcttcaaaccagcgatcaaggactcatactcaacctcattatttgaagtttcaaatggaaatcttaaggcctagtgaaacttgaagccttctggaaaaattagtattacccttacacccgagccatgctcatttgatgcaccatccacatataact

SEQ ID NO: 62035 - DNA, 980 bp, Cannabis sativa
aatgaatattaaaattgaattcctctaggcagaaaactaaagtaaaattaaaatttattatataatgtaatcttctacataggaagttgaaaaaaatgtacctaaacagaaaacaagtgactgtagaaaaatgtaagaggagaaacgaacatgacaatttgaacttatcatttatgatgccttcggtgtcaacaaattataaccaacaacgtttaaaacagaatgataactaattgtttaaaacaaaataagacatcgtcatcattcaacatgtcttaatctacagtccataaacattggatctttgtaataaggttaataatctttttcaaatataacatgctttataaccaaataatagtagcagtagttagagaatagtatagaataactcacataagttgtgttgtttctgctacatgtccttacattgtgccccttgccaccacaactcgaatacttaattatcacatattttctcttcaatttcttgcccgaaacaagttcctgaagttcaagtttttttgtttttctttggccttcccagctgctttttgttgattggatttttcattccaatcttgccactttgaggccactcatcttgattctgaatggaaaaatttggtgagagtaagctttcatataatatttttttgtgtaccacttactcacatatacagagctctctagatcctgtttattgtgccaaattgcagccataacatggctacatgggatcacggtaagctcccatcacctacatgaacaaacccatgaccttgaatcaacagagtaaatatttccatacatgttatggatttggtaaatcaattctccttatttggtgggcaaatgggattcaacttcctctttgttcttttcaatcatttttactacttttggtgaaacgttagaatcccacatgaccacatattgtttattttttgtcatcctttacatcaagtacatccttattc

SEQ ID NO: 62036 - DNA, 611 bp, Cannabis sativa
aaggagattttcttttacattttcttttgcattctctctttgtttttacaataagtgtcaattattaaataatatctacttttacttaatatttagttataatattatcatgttattacacttatgtcatttactaaatcacatctgtaatttataaataactttatatttatttttaaatgtcacatttcttttacagtttagaaaaatcaatgccgttaaatacatagattattataaattttattaaaaaaatttgatagaatatacacatcaaacatgacaaatatacaaagtcagccctaggtataggcagactaggctcatgccgagggcccaaacctttggggggccaaaataaaaaataaaaaaaaaattattaagcttttatttaagtaaaattaagtatattgtaaacaaaaaatattaataacttagttagttaaggtgtatagcatattatacaatgtcataggtttgaatcacagaacattctttttcaaaaaagtatatatattaataacttagttagttaaagtgtatagcatatatatatacaattgttgaccgagattttcggcaactactaaaatatgattatagtattgagc

SEQ ID NO: 62037 - DNA, 816 bp, Cannabis sativa
cattgttatgttaaaatggcagggccctaaacccgagatcatcttcccaaacttaatagctttgttgaaaacttgaattgcccaagctactgctatttattttttgattgcaagttgtcttctcaagtttatgatcagctaatttgttggcttggagctatcccttggcctagcaggtacaatggctggacctggacggagtggttgaacaacaaagggaaaggccttgttgctgcagtttctaacttcgttctggctgctgcagtttatgagatttagaggaacaagaacatgtgtatatttgagcacttctctcattcagctgctagtttagttgctgaaataaaaaaataaaaaaaaatctgctattgtttagatggcacagctatgttaagagaaaaatgagtactaatgatcaagtgtatttacttaaaatttttagctggttgagaacacgacgcagggacggttagctttgttgtcttggtgcttgttatttttgttcaagtgattaatgaaaacttctttcttcataaaaaaaaaaaatttaaaaagtatatacaaaaaaattaattcataaaaaattgaggagggcaaaaaaaatccccattcctattgttttttaagttgcttgtcagagaatgggccttacacaatacgtataaatatttaggtgtcgtttggtaacaattatgttttctaattttttaatcacaaaaatgaagtagaattcttgtttttaaaattctgtttttgaaaaacaaaaatgcgttctataactacttttgttttttaattttaaaaacagaaaacaaa

SEQ ID NO: 62038 - DNA, 819 bp, Cannabis sativa
tatataaaattattatgatacaaataaccatattacttagtgatcatttttctttctttgatcataatcaaagtgaagcatcacactcattgcaaaaaaaaaaaaaaaagtgaagcatcacactctctctcctttttttatttccttagattgactaattgacagaactgaagaacataggaattgagaaataatatacatatatcggattaaggtagccaataatggataaaaagtcttgtctttttgacatgttgtgaaagttctttgttttgtgtcattgctagttgtatgagtttggttggtattgagtgatctctgtcttatggcttccagtagtcacaacgttcgtgagttagcagagcaatacgctgagattcattttgatgaagaagaagaaggaatattgattgggggtgattctgagggtgaggaaatggtttttgatgataggtggtgccttgtagggaaattcttaacgggaagatcgattgattttgatgctatgaggcatttgatggcgtctctttggtagccaggtaaaggggtgtatatcaaagaattggaaactaatctgtaccttttctaattttaccatgaaattgatatacaaagttttatcgatggtagtccatggacttttaacaagtctccactggtgtttcatagattaaaaagtggtgagaatccacgagcggttcatatacataaactggatatatgggtgcaaatacatgatttgcgatcttgctttatgatggacaaggttgttcccagtgctggggcttatgttggaacatttgtcaaatcggatccaaa

SEQ ID NO: 62039 - DNA, 583 bp, Cannabis sativa
ttggcctgcattgaaccatataatggccaaaggaatgctaacagctagaagaacaatcattcctctctgcatgtgtacaccaagcatgtgatattgttttgctccataggattgcccacagaatgtttccaaggcactccccattccaatctatccaaacaacacaaataacatgtcatagtttagtgaaagagtataaacaaaaacagggctatgatttacagccagaaaaagggacaaaagggtcttcatcaaatggtgcaagacttatattacacatatgaacaaaacccagataagattttaattctagaaaagccataacatatgaacaaagtaatataagataagaaaaatgagagcataccagcaagctgaaaccagttactgaagcaaaagaagtggccatggaagctccagctagtggtaattctccaagatgacccacaaacatgactgaaatcacctgcaaactgtatgttaagagattaacacatatcaagggacctgctaatttaagctgctgcttcacctcagcaacaatatcatcatccttgttcaggtcttttctcaaatgggttgt

SEQ ID NO: 62040 - DNA, 836 bp, Cannabis sativa
tccaaaagaattcatctttaaagggagctttatttggaaaatctacaatgatcttacgatcacttgtgtgagtactaagatagtaaaaaccccctactgcattcttcctcgcttgaatagccttgacagagtaaagatactctatttcaaagggagtaggcattcccatttcaagattttgtatagaaccttcaaacttgcgaggattctgtatgaaatggggcaagcccaagatggtttataaagtccttgaaatagtctcgcagggggatatttgctccagccatgatgtgttcgaggttccaagcgcctatcccagttaagccacttgtattggtcttgccactggccccctcagatgtttcgcgagtaagagacactggtggataacaactgaactcactagcaaccaccgatctaacctagcaatctttcttatattcaataccataagtccttagggtattacctacatagtctctgatggcttgcacctttgactctatttgctcagcctcgaaggtgacgttagggtccttgggagtctttgatttacgtggctaagaaaacataatttcaaagtccaggtcacctggttcaaaagcaatcctgacgttgggtaaaaactaaggcttagctaaaggaatagaagacaaactgggaggttcaggccaagcagcgtctcgcaagaaacggcatctgccttctgtaatttcttacaagaagcgtatgtagcgactaccaatatcttcttggtgggttttcactaagtgttccctaatttttgcatcatttatctctaatttagatttaattctgggtttgtatgggatggc

SEQ ID NO: 62041 - DNA, 1099 bp, Cannabis sativa
aacaactcgcatgttatggcgaggtacttagccaaacgcctgcctctggcctggtattctctgtttacctggcatacgacgatctgggagtcactaaaagcctgtaagtattcgatcttcatttcaagggcgagctttaatcctacgatcaaagcctcatactcagcttcattgttagatgcagaaaattcaaatcgtaaagcagcgtgtaccttaaaattgcttggactgatgagtattatgccgccaccagagccttcgctattagaggctacatcgatgtataaagtccatccctcgccatttgctacatcactatcaattttttcttctacgagtgctacctcagtgcttgggaactcgagaatgaaatctgccaaggcctgccccttaatcacagatcttggtttgtacttgatgtcgaactggcttagttctactgaccatttcaacaaccttcctgatgcttctggctttgctaaaacttgccccaaatggtagttcattaaaacctcaatgctatgggcctgaaaataaggtcgcaattttcttgacaatattactagggcaaacaccagtttttccatttgagggtaacgagcctcaacgtctaataaacacttactgacatagtacaccgggtattgccgaccttggtcttcgcagattagtaccgagctaatggcatattcggatattgccaggtaaatagataaaacttctccaggcattggttttgacaggattgggggctgtcccaaatgcgtttttagtgcttggaaagcttattcacatttcggtccattggaacttcttgttagcttttaagatttgaaaaatttctttacatttgtcaaaggatcgtgatatgaaacgatttagagcgacgactttacctgtcagactttagagttcttttggcctagtcggagatcgcatttctactagtgctttaatcttcgcatggtttgcctcaattcctcgctgattcaccataaatctgaggaatttccatgagccgtctccaaagagacagttaagaggatttagccgcattttgtatcgtcgcagtatttcgaacatcgcttgtaaatggttg

SEQ ID NO: 62042 - DNA, 771 bp, Cannabis sativa
aacattattggggaagattcctgccttttgtgtagtaatcaaactgaaacttctaagcacttattctttctctgtcctttttctgacacttgcttagctgaaattaaggtaaggttgaactggagagtggaaacaatggagttgaataggttgattaggtggatcggaagagaaaaaattagtagctttcgaaaagttgttttatcagctgctgtaactgctattgtatatcagatttggcaagtccgtaatggagttttgtggaattctgagcaagcatcagttgagcaggtggtgagaaagacaataaaggatgtggaacttagagtactgagttgctggccaagcaaaaccaaactaagtgacaaggattggtttttaaatttgcatttcaggaggtgaatgcctgctgctgtttgatttcctggctgctgtcgacatttgtggcttttactgttgtgctgctgccagtttggctatttgttgtttgtagtttgttggttgtttgtccaggatattcatattgttgtcataagatgttgtaaagaatagtctatagtgtaaatagcaggtatagattatagagagcaagaaattctaaattctgtatgctgtatagattgattgtgcaggcctcggctgaggtgctggtagtgtgtaaaaattctggtgttaatgaacttactgattgataaaaaaaaaactattggaggtgaaatgatgatttccttcaagcttgacttaacacgataaatgattgagcacttattt

SEQ ID NO: 62043 - DNA, 819 bp, Cannabis sativa
tcttttaacgtttatagttgaagtttagtgcagtgctgaatatttgattattattattattattatttttttttgagaaattaaaatcattgtattgcttaaactcaaatttacaacttaatagtaccattacgacctttataatctatacaacttgtagaatctataaaattaattgtgttgtaaatttataattgctcaaaccattccaagtctttttatttcagtttttaggcaaaattaataaaattctaacttttacctcatctcgaatgcagagcattaacatgggtaagggtgcccatggattggtttggtcttgagtttaccaaaccagtataacagttttttgaatattaaaaatcaaaccagaccaataaatttctcaaaccaaaccaattggtttagttcgaaattgtttaagtagaatttataattattcatattttttaagtgattgtactgttttattaagtttttaattttattttttaaaatatatagagtaatttgcggcaaaaccccccaactatcaatttacttgcaaaaaatcatccaataaactttgaggttacatgtttttttgcaagtaaattgatagttgaagggattttgtcgcaaattactcttaaagtttttatttttattttaatttttattttgtaaatatagctacgtaacataattttttaatgacccgtcattgctacgcgggcaaaattaaaacttaacgaagctggacagacgatacttaaaaatataaacagaacagtactttagagggtttttttactaaaatatataattggatgatatttt

SEQ ID NO: 62044 - DNA, 5877 bp, Cannabis sativa
  modified_base (5844)..(5844): a, c, t, g, unknown or other
agcaactccgacgactttttcgatgccgacatgccgacagcaactccgacaatttttctgacgccgacaggaaactctggtgcctttactggcaccgatgacaactccggcgatcacagtagtttcatttgttctatttttttttaaaaaaaaatatgaaggaaattttaatattttttatggtaatttaatcccatatatgttaaatttttattttaattttcatattttttcctattaagtttccttacgacatttatgtaaactagctttatttttcccatatttatagaattaccatatataaatattaaattttgtacaatcatatttttgtaatttttttgttgttttgtgtatttctaaaataaaacttttttcccatatttaatgtttgttaaacgatctacaaacaaggctgctcattgcattgcaagagggtctagtttaaagtcagattgtattttcagtgggctaatgttccttttgagttaaggtctattgtagctactgaaagttattgaataaacaccatcttttattcaaaaaaaataaaataaaaataaaaaaaaaactttttttttttttgtaaaagtaaggtataagtactacttttcaattgagagattcttaatttttttatatctgttcgtgttaggaattatcttcaagttagttatattgagaaaaaaaagttgtctaaaattaagtaatttttttttctataaaaaattataatttatttttcgttttattttaccaaatagatgcaaatatgtctagttttagcttataagctttaagtctcaagatgatttttaattgttttttttttttttgaaagggagataattgtaaagtttaaaaaatgtgatttacttaatttagtaaaaatgtatttatgagtaataagtggcatgcatttatgaaattaatcccaccataaacaaaggagaataaatggaaaatatataaataattgatcaatgttatttaggaagaatatttactaattttgaggtgatgaggttctaatttcacaaagaaaagaaggcatggcatgcgtagctgtctgaaagtgaggtaataagtaatgaactaagtacccaatgcgtaaacatcatcactatgcctatttagacggtctttttccttgaaaatgaatcaaggaattgttgaatgagaaagatttgattttgtttggggacacgatgaggatgaggatgttaacctttgcttataaaatttgctttattttatttcatataataataattgacacatcaaatcccaatatcataaaacatgtgaccaaaatgttcattaataaatgtcggcaatctacacgcactcattcttctgtttttattgaaataaccaaccactcaactcaaacaaagcttttagagtttagtttcaattaggggagaaacaaacatttatatgtcccactactttaataatcataataacaataataataataatggactatgacgctacgtcgatgctattatattatgtttcaccatcatcatcatttaataatttggtgttaaaacaataaccataaatatatgcataggccaccaaaaaataatctgtaataactatgaacatggactatagttgatcggggaatacacacagccgattcaattttctggttttggaaaaaaataacactactaaaaattaaaagtacaaataatatgttcaaccaaagagctgaaagtgatctgatctgaattacttatttcatgaaacaaataataaaaggtatttgattgtttaattaacatcacatataatatatgaaccagaagtaataagtccatactcaataactaatacatggcaatatatatatatatatttatgttattaatgtttacttacataatggagcagtaatgggtgtaagcatcttcggccacaacataccaaacatcgcatttcttacaagtggttgaagggtaagaaatgatcacttctttattcttttcatcttttttctcttcctttggagggccaatactcacaattgtagcagttttcctgaacttccttaccttcctaatgatacaaactggatcagcttcaccaatcactgtcactgtattttttgaggggtctaggactattgaagttattccttcaatctttgcaattaagttcatcaccttctgtctgcacttggagcacagcagttccactgacacaactgttttctgcaacaaaacagtcagattgcattttagtactgaggtgtgtcagtaacaggttgagttgacaaaggtcagaaatttaattcgctaataaataaagagaatgaaaagaaacaaaaaaaaaacataggaaagatgaaccttagaaaccatcttgatgaaaatgtgggggaaaaaaagaaaaattaagactcaagagagaaaacaggatcaaactacatgtgaaatggaaaattggtcttgtttgattatggttttagagaatttttgtgttctctttcttaatgttctaaactagtagtgacacgttagtgggtagatggaagtaaatgcaagtcagaaggctcttccttctttgattgggtcaccaatctcctccaaaaatggcaattaatgcaccctcaacaaggctaaaaacataactccactgtatacccaccttatcctacttcttctcatgcataaaagaagtaacctcagttagtgtaagaattaagaaatttctatgttttcatcattctttgtaccctcattagaaccttattcaagaaataaagggaaaaaaatcatgtagtcatacgaaaatttgacacatttagcagctatccgtctatatatatattagtccaaagtaaaaaaattctatgtctaaaacaaattatgcttttgtgaatgactgattgctgtgggctttagtctgaatgtctacaaaaaatgacactgacctaacattacaagtgtcttggtcaattggacatgagatagtaaatgtttttcagtggggtcagagaatgggctctcttgacccacctctgcaatctatttaatctctttttgccccactcaaaagaaaattgggaagtcttaaacatgaataagaaagaaaagagaaagagaaatacatactcaacaatttcaacaactacaaaatgcaaaatgattattaacaagtggtgtctaattttaaatatatacactgatcaaaatattgccacaactataaaatgattctgaattggtgattcttcagtaacatattttcccacatagtgcagtaacagacatgaaatattcaacacaattatataacttacaaattaattgcggaaagggcagtaataaaaagattaattatctaagaaccaactgcagacacaatagtacccttgcaacagtagcatattactttgtaaatttgaaggtttcccttcactaaaatcctctagaagttacttagaactaacaggcagaaatgttatgcagtgatgccacttaaatgaacaatgttaattttgtaccacagccaaaaccaggccccagaagtaagtcaaatacttaaattctccaatctaaatatcaatgagcattttgtgtcgaatgcaactttatttagcatggttctcttcttccaattttcctttttctttttgggaaagattagcatgcatctcaacaaaatgatgttgacaattataataacacaatgacatccttattaatgctatctagtaaactataaatagctaccacaagttgaataacactaattttatcagagaaagaagccttctacaatcaaaattatcctttaagacacacagggttgtcaaacaccatgggctgttttctatcttcacctccagaaagtgctgaggttaattttaaactccagctgtagttagaaataaatatgtccatgtgggcttggaatggaatcacagtagagtagttgatacatcactatccagtagagacccaaaagttgtgttatatcactttcccttcttctatctctgaatcccatcatcttagatgacaagcttaccaacttatatctccattacaaaaatatttgacacaaggcataatgcaagctgtgttgatacagttatattatatattggataagaaattaaaatgcttgtttcctaattaaaaattaaaattttaacatcattctaagattaattgcaacacttttgctagagatcaaaatattaaattaaatttgaacaatcaatttctttatgtgctataaataagatgtgtcaaaaataaattgaaaaaaaaaaaaaccagaatagagacatgtaataaattacccttgaaaccacccctcaagaatatggtcaagtggcaaaataagaagtgggtgtaattaattacccttgaaacaaggatcactagtttaaacatttacaccaacaaaggacatcaacccctgaaagaacagggataaaaactgggtaacagaaatgcagttccttccaagcctcataagtcataacattactagttacaacatcaatgaatgggaaaatttgccttatcaagcaactggcactaaccattaagattttcagcaatatcatccgtgccattggattaaacctcggatcacatttccacaaacctccaaactctttaagttttatccacctcttgctctgatttcaccatctgtgtgtagcagcttacaattttcttgcatattttcaaaatgtttcaaatccatgtcaatgaaacatacctgcaagaattaatgctcaaatactatataaaatttaagaggacaactttaaaatccaacttcataaatcactttagtttagcaatctagctaataaaggattatgcttattatcataagaatcagtatatacacaaatctttaaattcactttactgaaaatcattgcacctttctcaaagtttctcttgactgttatacatgaattcattttaaagcaagaatgcataattttcttcctttaactaggcagcctaaacctactatatttggggatcaagaaactataacaattgttgtgtaggtagtactcgggggagatttgaacctcagtccttgtggaagcaaaccacatgcctgaacacttgagctacctctctttaatagaatgcataaattttaaagttgaatgaaattacataatcccataattttggttatgagaaaaagtttttaatcaattactttttcaataaaagcaaacaaaaatataattatacacgcatagctttggtcaaaagtgtatgattgtaatggttagtgctggtgaaatataaagttaattgtttgcacaaagtgatgtaaagcatttgatgagttcacatactggtgatgtgaaatttgactttttgttgtaggcatttagaactttagttttttggtctaaagtgatacaaagaggtgtctaaagatgtacaaaatgtttgggaacattttgaggtgtttaatgtcattttggagaatttgtaatgtcctagaagcgacgcgtcgtgcgtgcatgcatgcgcgcaagcaggcaagtttgacatcgcttgctacagggcaatgtatgttgcctgctgtccatgcaactcgcattttccttccattctttttgttactggctcaatctcattggtgtcgcctattgtcccccgcaactcgcattttccttatattttgcatttttagcggcataatctcattggttgaacctaataacaatgccttgctaacctttctaaatggtttttaagggttttgagactcttttaagtggcctaaactattggtggagcctaacaatcaggcccggccctgggcatnggcgggctaggcctgtgcctaggggccacctag

SEQ ID NO: 62045 - DNA, 1046 bp, Cannabis sativa
tgcaccatgaagacatggagcaacctaatacaaggtttgggatttgaaattacacgaacttgcaacccagaagccaacctgggcacctagggttttcacctggtgcccaagttaacatcctcaactagggtttcagtttctgggaccgtcttagtgcaaagtggccaaaaattgcattaggcattaacttgacataccacgaacatgtttgaggcatcagaatgagatttggaataagttgatttttgagcacccgaggccccgagcacccaaccccgaggttgataatttgtcaatttggatgccttccaagcatctgatcaaagatccaacttttgcatcaaatctgtcttcataaaaaataggtaaataggtccttttggaggaataacaacaattcataggcataaaaaataggttgacacttggggttggccctccgtccaagttgacaatttatcaacctgggccaaaaaaaatggagttttcccaaaattattacgagcatcatctccatcttcagaaaatattgagaatcaactatttctagggaccaaacagaacttccgaaggggtagaagagggacccaacgtccaggttgacacttgggattgggccctgcgcccaggttgacattttgtcaacctgggtagttgctaattcagttcagcaaaaagtgcaaacaaagattcaagtgaactcaaggagaaaaccacaatcccaagtccctagaaatagggcccagcgcccaggctgactttgtgctaggcctagtgcccaggttgacaatcaacctgggatgctgccttcaattgctcaaatggaaaatttgatgcaacctttgaatccagcatggtcaaaaataggggaggagaccctatcctcaagttcagaagccttggaagtattaaaaataaaatctctagtgcttggtttaaaggccccaacgcctaggtcaacaaatggcatggttcgttgggttctgcttattcgaatatgatgtcatttcgaccattagtcaagtttttcacaagtgcaataatcc

SEQ ID NO: 62046 - DNA, 1832 bp, Cannabis sativa
gctaagttgatgattcctgggttgctgagattcgagaatgatattgaggctggtgaggaagttgtgcttatgacaaccaaaggagaagccattgctttggggattgcagagatgaccactgcagttatggctacttgtgatcatggtgtggtggctaggattaagagggttgtgatggatcgtgatacttatccaagaaagtggggtctgggtcctaaagcatccatgaagaagaagttgattgccgatggtaaactagataagcatgggaagcctaatgataaaacacctcaagagtgggctaggaatttgattttacctaccggcggggattcaatggtggcaggccttgcagctgcaagtgaacccaccattgcggagaagcagacttcagtagtggaggatgtcattggtgaaaagaaggagaagaaaaagaagattaaggataatgaagatgacgggggactcaagcgaaaatttgatgcagtgtcggacgaagtttctgagggcaaagacagtaagaagaagaagaagaaggataaggagaatgggcttgtggatgatggggtcaagtctgagaaggtgaaggatcataaagaagaagctgcctcacctgtaactgaaaagtctgagaaaaagaaaaagaaaaagaacaaagaagctgaggatgctgctgctcaatctcccaaagtcactgtcgatgacaagggtgacagtgaggctgataagagtgagaagaagaaaaagaaaaaaaagaaaagtaaagatgctgaagaagattagataaaaaaagatttgatttttgtttgtattgtctaaacttttttttttctttgttatttcttctgtagcgaattttgccttagaagcattactgtttttgaattttgagcactcccccgagcacaacttatttacagtttgcctcctcaatggcgtaattagtacttgaactcagggagtacatttcctactatgtggaaaaagagagctcattgtcatggattagctatcttttccatttgcaatgctttcatagtagttaaagtgtttacatttttattttataactgctacaatttgatggaagagtaaatctcgcactcctctctcttggtgatccgcatatttcattgaatttttcacaggagtctcctgttcagttccctgaacatttttaaaaagttcaaaagctgataggggttgaaaaatggggcttaaaagtttcaatctttagcaaaaaaaaaaaagatgtctcttaatctcccaaagtcacgcgatgacaagggtgacagtgaggctgataagagtgagaagagaaagaagaataaaggataggtatgttaattttttttcatcaaatctgttctttgtaccattagcctgttttcttctgtgatgaatttttgcatatttatctattaaacagtttttggtggactaattttccaaatccagtttccagttccagtgtattgctatttccaattgattatataaaaaaaaaaaaaaattgattatctagtatgtttccattaataatcgtttaaaattcaaatttgctcttttttgttttctgaggagcaagtatattcttgattttacagtactttttgcctcttactgctgtttggttcataatttttttttttttaatttttaatttttgaaagcatagtgtaatttaatacttctgttttaattcaaacaaataagacagcgaactatacttttatttctccatctcgtgatattttgaacctctcaaatggcttttcttgtttggtgaaatgggagtgctgtgaagagcaacaaaatattatatgaatgct

SEQ ID NO: 62047 - DNA, 792 bp, Cannabis sativa
gaaaataattgaatatattttattttttgtatttttgtaaatatgtttccttacttttttatttttttaatttgtgtatgagcttatttaaaccaagtaatttatttctatttattaatatttgtattgtcaaaatgaagaaccctcaccccaatcctcatctattaaatgcctttgcaaatgaactctataatgtgaagatgtctcctcatcagagcatcacatcacacttactcatgatgaacttaaggttccaaaaagcaaatctactgggaattgatctatcaacagagtaatgggttcaattcattctcaacagccttccagcaaagcataatggatttgttgtatcttacatgataaaaaattttaactcatctgacatggataagctggacactgaactgcgtgcttatgaaaagactttttcacttgcaaggagggctcctccagtgttgcagataagggcaaaaggaaagttgaagaaagtgagaatgatgcctctgacactgctgcttcttcgagttcaattttgagagctagaattgaaattgaaccggcaatagagacaattaaagaataactaagcatgcatattcttcaatgttctcactatagagagaagggacatttgaaagcaagatgtcccagacttctaaaccattggaatgcaggtaacacttttgtttttgaataatgtgttttagagaatgacaaatccaattggattgatgattctggatctactaaccatatttgctcttcatcgcagttgcttaaaacttgggatta

SEQ ID NO: 62048 - DNA, 1118 bp, Cannabis sativa
  modified_base (512)..(514): a, c, t, g, unknown or other
tattttaagcgttttaagtaacaaaagttgagaaggcaaagttgagaaggcccccgagtcttcgctagtgtgtatgttaataacaggtgtcctgccgagaagtgatttttgcaaggacctgcaggctcgaagaccagaatcgttggtcgttgccatggcagaaccacataagaggattgagaattccctgacaaagttggagaaaggcaaagataagcataagtcactagtgtcgcgatcacgatcccgcagtccccgagggaagaattccagaggacgaagcccaagaagaagcagtccacagagacagcgaagtccaaaactggccaagtcccctccaaagaaggaatcctcaccgaaaaggaaatgtggaccgcgcttcgtgaactataccgagctcccagtacctcgagaccaatctacgccatcgaagagaagaatggggtcttcaaaaatccttccccggtcaggggaaaccataaagatattggtcacactactttggagtgttnnnttttgcaggacgagattgaagagctgatcaagagaggaaagttcagcaaatacaaaaagaatgaggaaagtcatccctgggcggatgacaaagaagaaaatcagaatgtcagtggttcgagaactcctcgcaatatcctgactatcataggcgggccccgtatcccaggtgactccaaaaagtcgcaggagcgatatgcaaaagaagccaaagagaagccactcaccaatgtgaacaacctaagcgagcgactttagaagttgttcaagagagagtgggatgagatcacattcatggaaagtgatgccagatgggtccaccacccacattccgatgcattattctttgttgccaatattggcagggataatgtccaccgtatactcgtggacaatggaagtttcgtgaatctcttaaacttccaagccttcaaacagatggggttgcatgaggaggatctgggacctgtaatgtcgagtatatacggttttactggcaacgtcattgcattaaaagggatgatcaagtttccgattactttgggaaccgcccctgtagtagccaagtcgatggctgacttcgcagtaatcgaccaatactcagc

SEQ ID NO: 62049 - DNA, 2621 bp, Cannabis sativa
  modified_base (64)..(71): a, c, t, g, unknown or other
  modified_base (1434)..(1439): a, c, t, g, unknown or other
atcctctttagatgatctacattgagtagggacaaattcatcgttctacccttcaatgtatttnnnnnnnnaaatacttagctacctgtaaatgatacttcaataatgtaatataattactgaaatgagtactctactttatctctattaaaccaagctcggaggaaattaatcatcatttcacttatatacatttactattgattccatatctatgattaccgaactcaattgaactaccatattcttaatctgtatatcccatcccatgtatactttatacatccaatctaagcttactttatcagtgtcgtgaaaaggacatagcacttatctaatgtgcaagtaaactacactgttgattattatacagtgaaatcacgtgtactaataaatcgttggaatttatttaatgacataatcttaattactttctattgtgttgacaacacagtgatcaagaatatcaatatgataaggatttagatgaatttataaatcaaacaatcaaacatgaaataaacatgtaaactaaataacacattaaacaagtaatgaaatatatatgtttctttattgataaatgaatattcaagattacattgaaatagagttttagttagggcacaaaacctaacattacttattacatttaagtttgtttatgaaaatttcaattattcacatggttcagtaaatcttttgattagcaaaggagtacacagtaattagaaaatatgttaacgtgcctaatcaagtagggtgttacatatattgtgagttaaagttgcagtatgggaaatttttagagagtattgcaaaggatccttgataaatttaggtggctaggttgtaagacagaagataagacttttcatcctaccccaacctaagccttgcatttcaagctgattaaagttcttttgatcttgagtgtagtgttagactacattagtggagagggtttcactaagccaacttatggaagcaaatatataagctttaagatcgaggtatagttattttaagttattaaggtcttatggaagcgcttgcacattctagtgattggatcacttattgtatgcatttgtaatgtaatcaacattcgagatttgattgggagcattggtacggggaacatcccttactgtcatcatcatactcgaaaatcattgtaataataatgatatcatttttttgctaagataaattctaaatgagcagattcttctcgattgttgggtaattcttaagtcaattgtgtgagtgttttttattttttctttctttcatcactcgaggatgagtaatgttctaactttgggtgtgataacttgctgtgatagttgcaacacgcaagtatacgtatcattttaacaagtattactcacaaagagtgagatcgatcccacaaggattgtagttaagtannnnnnaattaaacttttacttctatttggctaaataaaaatttgagaaaaaattaaactatataacaataagaataataaaactcaagaagcaagtaaattaataggaaaattaacaatgaataaaagttagggctttcgatttcaattgtatctattgactgtgggataatatgattatctatcaattaccaatctttatgcaatagtaggcttactaaggtaatttattgtcttctcaaatatcttaacctcaattacttgtaaattttctactctcatgatatattaaacatgcaacaggcattaaacacagaaaccctataagcaatctaaaccatacaggtactctcgtcctatatcgaaattcaattctatttcactatagcataattgacactcacttctcagatctcttatcaaaatcataaagcaatgaattgatggtcaagcaattaaaagtaattaagtacgaatgaaataaaatacatagaaatggaggaaaaaataaataatattagaaccataaatcaatatcaaacaatctccatctagaccctaattaactttttagctactcatgttcattgtagcaaattcacacataattttagaaaagagaagagaatagagaagaaaataatgctgaaaaccctattgaaaaagtcttcgcgattgatttttatctctaatttttgtcctccttcattgcttattgaaaactattgaagttcacttcttttatagccaaaaaaagattaaaaaaaatgctataaaaactattttgcttaaattagaagggtcgggccgcgacatgggatttccatgcctatgcgcggtacccccctttatttgggcagtgagttttcttttgcgttgactgattatatttttgtcataactctctcaatattgctcggaattagacgatacaaaatgttttcgaaagataaaagagagatctagaacttttatgttttgactttttcgaaaatctaatcaaaacatagttgaattttggattgaagtttcagctttatctttttacacaattttctctcttttatagttcatctttttgtgagatttttttatcttttttacatcttattcctcttatattttctaatcttcttctattttaattctgtaaaaataaaagataaacagcgtaaaattgctctaaac

SEQ ID NO: 62050 - DNA, 801 bp, Cannabis sativa
gtaggtggtgatcatggaccatggttgctttgcttgttggattggactctattttctatctattgctttaatgtatttcattttttttggttgtggaataatgtatttaatgtggacttatatttgatttgtgttttagactttagatttttaactacatattttaatttatatggttgcacttataatatgtagaatcatgtgtttataattggtctttgaacaaataatttgtatggttgtagcatttttttaaagaaagtgtctatatggttgtagctttagatttaaaaataatgggtttatataataaatttgactatattttatagcaaaacaaaattcagttttggcagtttgaatcgactgaaccgcggttcaatttggtcggttttaggatggtttttaaattgatcagtcgattttggattgaaccaatccagaccgaaaaaccgaaagttaaagttttatgagggaaaaaactgaccaaaccgatcaatgcttagccctacttttctatacgtattactcctctaggaatattgaattctatactgcttattaagtgcatctgaatgaacagaagacaaatctctaattctatccaaaatggaatagagataaaactagttaagaactttcttcagtttgaataactttccagtgcttttcaaagaaactaagttacacagttttactggtggaactaaattattatagatgcgtttttacactcttctaaaataattcttccacctcggagtaacctccatctctgatattaagttctgagttagtgta

SEQ ID NO: 62051 - DNA, 1237 bp, Cannabis sativa
  modified_base (357)..(357): a, c, t, g, unknown or other
aatcataaaagtattgatttgccaaatagaatcactctttggatggatgaataacttgttgggctagatatgatgatccaggtttttgctggatgtatgtaagtatcgtgataatcatgacatgttatgtatttatttgatgaacattatcataactagcttgtataacgttattatattttttaatgaatttattcattgctttcaaaaaaaaaaatcatataaaaggtataaatgttattcacaccttatagatgtatttttgtaaataaagtgccaatttatattttctatgtaataattcctaaaaaaattattgtgaataattaagaaaattaaaaaagaaattaaaatttnaaaactaattaagcgatttaaaatttatttatttttttattaaaaaatacctttagacattagaaaaaatatatattaaaaatttaattttacgggaacaaagttgagtctattttgtatttttttaaaaatgtatgtttgtttaagtaaagataacattttttagtttaatttcttcttttttttttcagaatgattttacatgtgttaacgcagattttcattaagcaagtaataaatattatacaaaaattaataaataataacagatataaaaactccagatatttttacacagttttgtagttaaatctacatactccacgagtctttcttattagggatattttagagtatagaatacaacaactgatactgaataataatgattctttctcaattgctgtcccttttctcatggattctgcccctaggttggtagatattcttttatggatagatttaaatataaatatatatgaaacatggacaatcccacatttcattcaaaccacacgtgagatcatactaaataactaccaaaccgttctttagttttatcctttatagatggttattgttgacgtggaaggttacatctactctaattcgagttatctttcttgtccatcttgacaagaaaaaacactaagtgttaagaaggtttccatctcgctatgtcctctttgtggcttttgtaatgcgaggtgatcttgtcattatatataatgcaaggcagtttatgttgatacatttattctgctcggatggatgaatatcttcttctttttttcgaggcagatcaatagttattattcttgtctcgtttttgactataaagccaacgcgttttgaatattatctatttatcctttaaata

SEQ ID NO: 62052 - DNA, 1203 bp, Cannabis sativa
tccaaggacctcttcaaggcccacatttccaaatggaagtcatcattttcaccagacactgaaaaatgggaagaaaaagaaaacccaagcaattaataccccatatccaaatgacaaatagggtatcgaggaaggcctcccccaaactgcttggagagatccccaccggactcgtcacataaaaggccaccctcacaaggcgatctgttatggtgacaaatcaggaatccaagaatacaacaaaaataaaaagtccaggtttttctttcaaaaataacgagagaaaagaggattgtcttggaaacttgcctaaacccaaaaacgcttaacctaaatgttttgttcatatagacgcttgcattgacctaatcaacagaaaaaacctcggcagaactctagttccaaaggtattctcccaagattcatgcgaacctattttacacacaacaaccctaatattcagacctaaaccctacgcatgaaaaacagtgtatttctacaaactcaagaccgtattttagaatcaaagcaagaaataacaatctaaaaggaggaaatacttacttgtagaagggtcgaggaagaatcgctggtggcgtgtggctgtccaaagtctatgagccgctcgagggtctggttgtgactcgtctctacgaagaactcgtcgcttgtatgagcttcgatcattggaaaaatctaacgacaaggctgggaaaggagatgaggtctttggtttagagaagtgtttaagggcaagtgaacttttgggttgagagctttctaggaaaatgttgtgggtaaaacttgcatattaaagtgagaagggaaaagatggactttttcgccaagtttttcatttatatgggtggcaacgacttagtgcattttgaaatggacaatccagattgtaccgattaaaagctgctccatccaatggctgagacttgaagagtttaaatttaatgcaccttaggagagagaatggggcattcattacttatcatttcacgacagcaagaccaatgcatcacaaacctactgtctattcaagtcctgtcgccattcacttcccacaaggaacacgtatgagcctggcgcataagtcccacggcttcacaaaatagacaccatgtttcaacaaaatgacagttgtaccacgggatatatcaactcttcagctgtccaaagtaacacgaaagattg

SEQ ID NO: 62053 - DNA, 1084 bp, Cannabis sativa
ttcaaaacttaatgagagacacgctaaaacacttattggggatctaaaattgaaactaaggataaccctatcgataaataggatgctaacaccctaaattatgcaagaacgagaaaaactaaggttcgggaaaaagccccaaccggtagaccggttcccaaccggaggcccggttcctgtgtaccaaccgttcgaccgttctaatggtcccttagaaccggtcggcgagttctatgctaggaaccaaaaacacgaccccttgacctcaaatccaacccactttgtgaaactctctagtatacctgtacatactcaaataaacccaaaccaaccaaaagaactcaacaaacatctcataaaacaaaatcaccattaaagctcaaagttgaagttctcaaactccaactttgcttcaacaacactatcacctccaaattcagcttgaaatataataaacaatcataatctaacttaaaaatataacagtatatagtcctaacacaaacagccacctaaaacctagttatcaacactaaaacctaacttgaactcgagaaatacaaataaagaagagattaaatgaatcataccttaaattaggctacacaatttttgatgaaatctcccaacagaaacaagaaaatcaaccctaggtgatgctctaatgaattcgagagagagaaggagagaggtatgtgaaaatggataaaagtgattctagcttctccaatattgacttttgttcttttatttaatttatttcacaacccaatatcagattttcccacacaatatcatgccccacataaggcaaaagaccacttagccaattacctatttacccctaaataaaagaaaaaaggtttaaactaactaagggtagtttagtcatttaccactcttgacaaatccctgacatatcaaaaacataccaaacgtgactctctaacggcccaacgtcgctttccaccgctacccagctcgagcaccagaaaatgagaaattcacatataacatatttaacatatattgcaattaaataaattttcaccaatatgcaatattataaataatatttaatctc

SEQ ID NO: 62054 - DNA, 915 bp, Cannabis sativa
  modified_base (646)..(647): a, c, t, g, unknown or other
aaaagtgcactgactttgtaaacctgtcaactatgacccacacagagtcacattatcccgtggtcctaggaaaaccaaccacgaagtccatggaaaaatcttcccattttcactccagaatatttagtggctccagcaaccctattggcctctaatgttcagctttcacttcctgacaagttaaacacttagcaacatactcagtaatgtcattcttcatgcctggccaccagaacatggctttgaggtcttgatacatcttcgttgaccttggatgaactgagtaaggagtcgtatgagactcattcatgatctctcttttaaaatcatcatccataggcacacaaacacgattcataaattgtagcattcccgtattatccactgtaaagtcataagtcttcccagccgaaaccctatctcgggatttcactaactctggatcttgcacttgtacttctttgattcactccaaaagagtagattccagggtaatattagccaatttccccacaaccagctcaattttagctttggtcatttcatttgctaactgttgggagatctgcttcattgtatttatctgactttgaccttttctactcaaggcatcaacaaccacgttggccttaccagggtgataaannatctcacaatcataatcctttaccaactctagccagcgtctctgtctcatgttcaggtctccctgggtgaagaagtatttcaaacttttatgatcagtgtagatctcacatttctcaccatataagtaatgttgccaaatctttagcgcaaacaccactgctgtgagttctagatcgtaagtagggtatctctactcgtactcctttaactgccgagaagcgtaggctattacctttctagcttgcataagcacacagacgagagcct

SEQ ID NO: 62055 - DNA, 862 bp, Cannabis sativa
gtagtaggcatcggttacaaataatggtcataatgagactgttacaaaataatgataatggtaataataggctccttaatcaaattaattacaacggttataaaatatgtgtaacgtttatcatgaatactcctttaatgcttgactgttgaattccgttgaattatgtatgtatttgcgtcttttcttattgatactgcgacttatatgcgaggtgtgcctttcagttaatatctcgagatcctttctttcagtactgtgagtacaataatattgtgagccactttccatacagcgagttctctatagacaagtccttctcgcggggagagaaaatttatgccgataacacctatgattggttggagtggagttttttagagagcactcttaaagccttgttccattaacctaatcatcttctagtattgttgagcttcccaactaattgaaaacccttaaccctatgaatctcaatctcctaagccttacgaataacttctttgtagctatcatctcacgtctaggcatctagatagcggaatgtggttggaaagcagtctcgatcaaatagtaaagaaaagaaaatgggggtgtaatctgaatggttgataacaagggatttaaccctagcctttgggtaagatagcaaccactcaaggtctacaataactccatccaaccttctctgaatgtgatacaccacttcacaaccattagactatttaaagagattttccacacttcccatatcaactcccctagtgatggcttgaaaatcttgaagcccttacaatccttgtcttgtaacttattacctcaaaacttttaatattgtcaaccatcatattgagatccctaa

SEQ ID NO: 62056 - DNA, 2078 bp, Cannabis sativa
tctcatattttggaatcaggttatgcctgctgtacttaatgtgatgaaggaagaggcgagtttagtgactttggtaaaacctcaatttgaagccaatagatcacaggcaagagaatttattgtgactccacttttcaatttacaactattctgcaaaatatttacacttttcttttgcttgtaattttttttcaaaaagaaaactaagaagtttaagggcaatgagttatttatgaataagagaaatatgtttcttctcctaaaagagaaaactacttctattttaattgaattccaaactatttctatacattttgtaggtaggaaaaggtgggattgtaaaagatccacttgttcatcaagaggtatgcacttcttatatattgtgcatctatttttatatatatttttttaagagtaacatttatttatatgcatttgagatataaaaatcgtcgccattttcaaatttgtaacctattcttagattctttcttccccatttaattcatgttaaggactcactttgttgttggtgggaacatttctcttgtttcattatctatttttaaatgttgaaatagatggattttgacccaaatttggggtattgttgtataggttcttgataagattatcaaaggagtagaaaacaatggattctccagcaaagggtggattgagtctcctcttaaaggtgcagagggcaatacagagtttctggttcattttattagaacaactcagcaaaatgcagaatgatttctaacacaactgtattttcacatttagtttttaacattatttacaaaatatgaatgcaatgcaattatttcttggaattcactaaagaaatagatacttcaatacaagcatgagaaagaatagattcatttttaggttatttcactctaatgttttaatcacaattgatgttgatgattgaacagttcaggtgggattctaagaccaaatacttggccaactaccgatagccatgaaaacagatatagttcaattgatacaccatgtttagctacacacgtgtcactttgaaaaagcagcttcatccactcactcgtcccacatggatgtaacttgtaccatggtctgttcaagtatggatgctcctatatttgattcaaatattagaacaatagcaaacccaaaatagaatttgatgagtaaaaaatgttacctcttgagttatgaaggtccattttgattccaccaaaaccttggatgaggatgaaggtaagtctttttcaatctcttccagtttcaaaggttgcccatctgaaaattctaacacattttaactcgagcaatgattcttggtttttctgttccaataaataaagatgaaattctaacattaccaatccagtaagcacgaaagtataacactggaactcgatatgaagcactgtagactatatggaaatcatagtaatgtactccaacaccattattgctttcaaccttggaaaatgaaaataatattatattcaagaccttagctttaaacaaatatacttggaataaaaggattttattttttagatttgtgtaccaatgtcgcactatcaacaggttcttcttcctcagtgaaggtgatctcctcttccatatcaaggtcttcctatattatgaattgaacaaaatcaaaattatcaaatcaaattgccaagtgtttaaaataggctttttttttttaaaaaaaaaaaagaagataactttttctgtttaataatttgtaacactccctacaaaagaatatgagtgttctttttgtcttcccccaagttaattatttaatgtcaacttattaatataagtaatcaatttattgtgtaattgtagaacttacttagtatttcttctaacgaattacgagactacgcaatattttacttttataattttttttgtaaaatgatttaacaggttattcataattttgaacattggcaaggaaaattgtgaaagaggagataaattatttgagacttttcaagttattttaatattattttttgtgagaaaattattatatcactattttgtttttatgggta

SEQ ID NO: 62057 - DNA, 645 bp, Cannabis sativa
ttaattaagtcctggcaaatcatgatattatgagctatacttcttcccttaacaaatcccccttgattttgagcaaccagatcaggcagaataagttttaatctagaacaaatcaattttgtagcaatcttgtatacaacattacagcaagctattggtcggaattcacttacagtgttggggcatttgatctttggtatgagagtcaacaaggtggaattgatctctttcaaaagctgtcccgaatgaagaaatgatagaactgcatcacatacttctctcccaactaaatcccagttgtcttggtaaaagaaggagctgtatccatccggaccaggagctttaatcccaggtatgctaaacaccgcttgcttgacctcttcatctgtgtaatttgccaccagaaattcaaattgctgttgtgtaactctaggccctttctccactatgcgattgttaacaggaattctattttccatctgggaaccgagaagaatcttataaaattccacaaaagcatcagcaacttccttcggttcatcaactcttattccagcagaattaatgatagaaaagacattattttgccttcttctatctctaatactactatgaaacagggcagagttgatatccccatctttc

SEQ ID NO: 62058 - DNA, 972 bp, Cannabis sativa
  modified_base (573)..(588): a, c, t, g, unknown or other
aaattgtaaaaatattgaaaattctataaaaccgtatttttgtaatttttttttattgtttgtgtgtatttgtgtatttgtgaaataatccttttaaaatatcaaaataattaaactaaaaaaggcccactctcctcggattcagacaagtttcatgtgcttaattgtagaaatggcccattagtttgtgaaactgccaaaccatgtgggggaaagaggaaattatataaaagaaaatggcatttttccaaagtttgattaatatgattttatttttatatatttttaatgactttttctatcacttatatatagatatatatatatatatatataaataaatatgtatatatttatgggaatttctttttcaaaattgtttaacaaaatggtaaatactattttagactttttgttttataaaagttacagattggatcttctgttttgttaaataacaaaatagactctgtatattctaaaatggtaaaaataagaccctgagctttattttcgaaaacttttttttttaatatagccaacttgaaaacaattcctaacacgaacagatannnnnnnnnnnnnnnnttttgtcataacacatttagatcggattattattaaattttattttgataaaaaatcaatttaggatcctatttatactattttggaaaatacagagtctattttattattaaacaaaataaataattcaattattaacttttacaaaaacagacttaaaataatatttaccctaacaaaaataattgatattgttataactcgttacttatacataaatttttaaaataactggttacgtatacatgaaatttttaaacaaacaaacaaacaattttagtgatatatgttagacatttaaatgtataaactgaaacatatatgattaagtataaaatgcggaattaagtcaaacatctatacactatgaataaggatcgaaat

SEQ ID NO: 62059 - DNA, 3149 bp, Cannabis sativa
gtgtgtatatatgtgtagtatgaattttttttatattgcttgatgtgttgtgtataagaatttagagtatacacattgagttattatactccatgtttgtctttgtagtgtttgattataattattgaagatctgattttattttaatacataaacaagtttatttggagccctttgtctttagatcagaaggaatcgaatcagaaatagttggaagatgtttcttttctcttttagctgataagaaggcttcaaaactttcatagtaggacttcaggcatcctctataggcgtttgccaatagccttagttttcttaataatattcttttattctgctcaatattattttgatacacaaaattgggggaaaagaaaaagaacaacaacacttcacaaaattgacaaaaaaaacttcatataaatagaaaactcatatcttctgaagccaattttgtattgtagaaacacacagcattataaatcacttctcacacaccacccaaaagcaaagtaaaatacaatctttatgtttgtcgttagcattccaaaatagcatttatgcgttttgagggtttttttggacctacaatttcgttttattttttgacatatgtttcaacgaattccatgcttttgtctaatgagaggcttgtattcataattattttttagactctctattctaattccatgattttctccaatggcaaggtcaccagtctggttgacagagtttcgtagaattcatctgttgcaagccatggctaaagtaaacttgcagtgataaaaattttgaaaaaagttattgataaaggatcctacagctagacaaattttttctcaggccctatgtatgtgcctattctttgtttctacattcatcttatgtattggaccttttggtgataaaaatattccttggctagcaaaaatagacaagttgcaaaacatggtggtttcttcaactttttagctagagatctaatggagaaataatatgagaaattcataagattttgctttgattttttataagatttgtttccaattttcatctcacagttgggccagagaagagaagaggatttgttatgaatttagtattcctactttttaaaaattttgctttatttttattagattaataaattatggcttaccaaaaataaaaaaacccatccaatctctccaaaatttcaaggaaaaacaatattgttgaaaatttttctatttttttttttctcatgttacaaatctaactctcaagtaaaaagttaaattttctcatctacagagattggatgatataggggatgaatctaagttgcttcctcttaggagacggagacaagtaagctcttgaaatttttccgttttaaaatatttaatagcactatattttttcttaaaatgtcaatattgttctaaatgcatcatgattaaaggaactttgtagatttaaagtggaaacatttcagacaattctttcttaatttgatcaatttgtgtatgatgaataagttgattatgagtgctttgttaggggtttgctataatgatgctgaatgctgattagtgggcaggttatttggaaacttgctgctgtgaactactaattttttaaatattctgttcaggaacaagattcacggaatagcctggtgctattttcaagtcacttctcaatatgttgtctttaaaattggaaagtagttcacttggacaggcaagatgatacatgtgtgtgcgcgcactttactacatattatgcattgtaatggaagaatgaaattaacgtaatttatgatttatgttaatgaattaaaagtttatttggtctcattggtagtttattttattagtcaatttttcattggtgcttagctattgcctgttgtagatagacgaagttccatataagattttaattttaaagaacttgaggatacttgagcctagagtttccttcaactaagtccactggtaacacaattgccactaagaatcatatatagcatgcaatgtattttgttgacatcatatttggaatcatatttatgcgagatctaatattttaggttaattagtagttgtatcatttgcacttaatgagaagtatataatgaaattgtttttttttttttttgataaatgaaacttcattaaaaaccagcaacaattgggaaagagaacaaacacaaagcagcagaaagccaccgcaacagcaggaaaaaaacaaacacaagctacctaattagagttcatagcagcaaacacatccatgtcagaaaaaagaccacaaaattcagggacgcaacccgagtggccaacgagtgagctgcgacatttaacaaccgagaaatccaacaaagcttacaagaaacaaagccatcaaacaaattaaaaagctggaggaagagagaagacattttccaatttggaattttccttgccaagaccgcatcaacagccaccttacaatcagagaagatgctcaccctcgaccaattacaagaaatgcatctggaaatagcatggaaaatggccaaagtttctccttcaagaggggaaccagcagaaatcttcaccgaaaaggcctcatcgccctcccctcccctggtcatccaaagaaagaatagcaaggaaagcctcactccctctcatagcagcatccacaaagatattaactaaggacccagtccacagcctatccaaaccaggcacaacagtaggctgaagcaaggatccagaagaagccacacaatctctagtctcacgcacagacttcatcaccgtctggaaaatggactccggggtcgctatcaatttatcatggaaggttttattacgcacattccacaatgtatagcacaaggaggctgcgaatagggagaactgaaacaggttaaggatccaattcaaaatctctcttgtcgaagcaaaggagagaagatcgctacgaatcccctaagaactcttaaaccagcaatatcgagccatatgacagtgcaaaaacaagtgttccagcaaatcctcagcattctcgcaaaggacacaacaagacgtattgccaaacatagcatagagcctctggccacatggaaggatgtccttgcccactttccacataaaaagtttaacccgttc

SEQ ID NO: 62060 - DNA, 909 bp, Cannabis sativa
ccatatatgcaatgcaatcaagattattctagcatgcctaaaatgctttagattctttaataaccaagtcactgaatttaagaaacttataagataaatatataaaattcaattaacataaagataatattaaattaaaacagaaatttttaattcaatggtgaaaaaacatactaatttattatattaataaaaaaaaattaaactttgattttatatctttcgagctaactaaaaaatagcatatatggcaccaagcacaacaaacttctttcaataaaaaaagcacataaataaactaatttggtgattacaatagatatcttagagagagagagagatgggcattcaagaaaatgctcagctttgttgtttttacacaagaaaaagaaagaaatgttaaaagagtttatatattcaatattattcctccctatataagttgttttcaaattaaagataaataagcaaataatatattaatataataatggaaagatgaaatgatgacatgaagggcacgcaacttactattcttcataaggtgttgagttgtctttttctgttaaatccataactattacaagattaatatataggtaatttcatgcaaatcacttgttactatattaaacaaagataatgtctttacaatttggcattgtttgggaaattaatacataaaaaactacactctgatgtggacaaaaatccagaaccataatcaaatctatctcttaagtgtttgataatcttcatattgaatttgttaactgactaattaacattgaagaaagaaaaattaatcacaatgtatacattaccactatggatgacaaatagaaacaactacaataatctagtaaaacagataatttatacatacattctcaatatatatatatatat

SEQ ID NO: 62061 - DNA, 928 bp, Cannabis sativa
tagtgaagcgggaaacaaaatacagcatagattgtttgtaacattcctagctcgcattatagtattgaaattatttaagtgtgagaccagatcagtagtcccaccatatgaagagacgtggggggtttttgaatccttgaggaaaaggagtattcatgatgtctggatggtatggctcgagttcctcatctgagtcatatccaaatttttttccttgttccccaacttgatatttcctcaaacttatcctccaactcatctattcgcaattggatttgactaccttgctttggaccgagttgttggcgaagatcaggtttctcctagttcaagtgttctcgcaaatttggttggttataattgctagcagacctcgttctactcacggactttgtcctactcattgatctcgtcttgctcatggaccatgttcttgagtaacttgtagttttacgcgtgcctgtgctttctcgatcatggttttaatgagtactttcttcacatcccgtccttccccttgggtatggttcattgtgtgccccatgctggggtttgtacatgccccttccctatttgcttgagaagaatgttggcaatgccccgttggtgaccttcgtgtcccaggctgagtccaaagattttcctcgttttcatgaggaatttcctgttccctgatttttggtcgccttctattctcattcttgtgagaaggctgtggctgatcatttggttgttcattttcaaggggaccctcagtttccccagaatgttcttcctaggcattctgagggttctcctaggctgtctcctgcctcctggttcgtgagccgcgaggtctgcctcgtggtcttctcactccaggatcaggttgattttgtgtattattttcctgtgtcgccttggtcgcggctgcctcacgttccaactc

SEQ ID NO: 62062 - DNA, 809 bp, Cannabis sativa
catacttatatgactatttgagaattcttgattatatatatatattaattttttgttactttttttattatttaaattttagaatataaaaaatatctatttctacaaattgtttttttatagtatagcatttttcttatttatatttttttaagtttagtttaaattatttaaatcaatatctattgtttaggatgtatttagggtgatgatgtggtagtttagaaattgagtgatccaattttttaattttgtggtttttttaacttttacatgttttttttttcaattctcttcaaaaattttcatttaatgacttttcaattatttttctatttattgatttaagtggtgacctttcaattattgacccatagatgcatttgttgtattaattttgcatggacattaagtataattataattaatgatatttagaaagtgaagagactcaaagttttttgaaacctatgaattaataatgatgaccttatacgtgagtcatatagatttgtttctccttatccaccattaaaagtaataccataacttcatatatgtatagttaaaatatgagcattgttattaggcactagtgatgtctaataatttctttacatgttatcttgtaattggctagcgatactccctaaaaataattatattaaattatatgggatccgatacttaagtacaccaatagcgatattaacctgtaaaagggtgttaggcaccactggtgccctttagcatttcccttaaaatattgcatagtaaattaattcaattaatcaaaaatcaagaagcag

SEQ ID NO: 62063 - DNA, 896 bp, Cannabis sativa
ctcttatatgcttaattccaaaaaagtgagaagcccacacaaatgtccgaatttcggccgattagtctatgcaatgtaatatataagattgtggccaaatgtctagcggggagaatgaaagatagtcttcaccaagctatttcggaatagcaaagtgcctttgttaggggaagactaatacaagataatgccattattgggtttgaaagtcttcattgcatgaaaactagaaggttcggtaatggaaagaaaatggctttaaagctcgacatgtcaaaggcgtatgaccgggttgaatggtgtttccttgttactatgatgaaagggcttggctatgcggaggaatggattgataaggtcatgagatgtgttaaaagtgtatctttctcggttctagtgaatggggaaaggatagggaattttcatccaactcggggcttgcgacaaggagactcattatccccataccttttcctcatttgttcggaaggcctttcatgtttaatccaagcaaaggagagagaggggaaaatctgaggcatcagatttggcaaagatggggtcaaagtttctcatctcttcttcgcggatgatagttttgtatttttggatgggagagaagaagaatgtgacactttgcttcaaatcctaaaccgctactctagactttcgggacaacaaattaatctagcaaagtcggaagtaagtatgggaagtaggatatctacacaaatgggttaacaacttgcctctcggttgggagtcactcttgttcctcatcatacaaaatatttggggctgcctagtttcattggtaggaaaaagaaagaggtgtttgaggtaatcaaagacaaagtttggaataaacttaaaagttggaaagcaacaatgttctc

SEQ ID NO: 62064 - DNA, 1131 bp, Cannabis sativa
cccgcccacccgccccgacccgctacaaaaaaaaaaccgaaaaattaaaacctgtatggtcgagtcagatctaacccgaaagtgctcaacacgggtgtcgggttcggattttaaagtaagacaaatataatttcgggtgtaaatctgaaacccaaaaattaagcacattttcgtgctagctgctaggaaagtcaaaagacatatactttttatttattttaaaattggaaagtgtgagagagaggctgtggctgtcttttcagttttcacctctgtcacctaataaatattacataccacgtgggaatttatgtcccatataccttttcatatcatctgccaatgccatgactatcagtctgtctctctcttttctttcccaaaaaaatataatcctattcaaatacaaacaaagctgttttgttttactttttattttttttattttactttcatcaaaataaaaataaaaaatattattagttgtactttttatatcatactgaaatatgcacagaactattttctttatttttttttacagtgctccagaaataaacttaaattgtacactgcacaattcttttatgcaagtattaattcgggtgttaatccaaatctgaccacagcaaacccggcatacccgacccaaaacccgtcgaacctgaccgcccaaaaatcgggttcggttgcacttttttaatatctgaaactcgaaaacccgaacttgaccatccgaaaacccaaaaattcgacccgtgtgcacccctaatcctattcaaatacaaacaaagctgttttgttttactttctatttttttttattttactttgatcaaaataaaaataaaaaatattattagttgtaatttttatatcacactgaaatatgcacacaactatttgctttacttttttttacagtgctccagaaatatatttaaattgtacactgcacaattcttttatgcaattattcattcgggtgttaatccaaatccgaccacagcaaacccgacccgaaacccgccgaacccgatcgcccaaaaatcgggttcggttgcacttttttaatatttaaaacccgaaaacccgaagccgaccatccgaaaacctaaaaatccgacccgt

SEQ ID NO: 62065 - DNA, 1916 bp, Cannabis sativa
  modified_base (504)..(506): a, c, t, g, unknown or other
  modified_base (1623)..(1625): a, c, t, g, unknown or other
aatctaacatatgagaagaaagaccatgacaacccaataaaaatagcagtcgtcctccctcatattattttgagttaagttgaaaaatacattttttttttgtatccagtaataaaaaatactcttattttatattttattaaaatatacccacttttttttagtgtgttgcctaatataccctcactctttataaatttagcatataatttacatcaacttaagagatctaatgggcacatcatttataaaagtaggtatatcttaaaaaatataaaaataaaagtaaaaattaatacaaataaagtaaagtaggtataaaatgtaatttcttcaattttctttattatggccccatacaaagttcccatattttttttcaaaaaaagaaaaaaagaaaaaagttcccatatgtttgagaagggaaatttacatggtatactaacttttgccgtttttcttacaaaaatactactagtcgatattttttacttttttactgtnnntttttataagtttcatactacagtatactgtgttaaattttcactggtgttcgactagtgttttttagttgttctattgttgttttgagttgttatgttttgtgttttactagtattttataaaaacacagtattcttgaaaacttttccgtgtgacagtatttttataaaagttaaccaaatttcagtatctttgtaaatttccctttgagaaagagaaatcttagcccaatgggcttcttggctttcattggcattttgttaagagaaatctctaggcctaattgggcttccaaaaacaatatcagcgagaagtcatggagacataaatgcctattttaaaaatacaatctgtataacaaagtcttgttaataacctttaaaaaaaagtgtggcatatatcaatatttttttttaattattcaataacttccaacatatatataaaaagtaaatctttgactccaaaatgtatcacttctatatgaaaattgataaaagtgacctcaaatgaagttaaaggaagagaagaaaattactagttgtatgtatgggaaaaacattgtaaacacataacaaggaaggagcaatatctaaattctattttttttatataatttatctgtgaaatagtcaatttttttttctctttcaataaaaataaaataaaataggaaaattattgtaaatatctcaaattatagcactatataagtaaatatctttattttaaaacttatagagaaactatttattatttatattgtcttttgacacatacaaaaaattaataattttttttaaaaaaaattagaagcaaattacttaaagatcatggtatatctatattagttttgttaaaatcttttttattatatcgtttttttttttttaattttttatgggttgttgtgggttgttagtatatagattattattcttagatgatatttatttattattttactatgtataataatggtatataattttcttagcatatataataatacaaatattttaatgtatgtatataattttattaacatgctacatatatttaattattatttttatatattttaactgtacaatatattatttattttaaataatnnntaattagtttctattttattatatctaatgatggtatataattttgttgttatgatatatatatatattttaattgtagtatataatttagtataatatatatttattattattgttaggatttataatttggtgaatgttatatgtattttttattatatggtatattattttttaaaaaaataatatttaattttgattttttattatactgttattaatgtgatatataattttattagcatgttatatatatatatattttaaatcttcacatttacacatttttag

SEQ ID NO: 62066 - DNA, 1769 bp, Cannabis sativa
agcttatacacggactggacacgttcacaacccataggaaactttcctaaaagagatcttcaatcaacctagaaatttttacttttgtacctacaaaattgtgagttgtaagtgtgactttctttttataaatgtgatcccaaaatttgtacgaatgatgtggctctttcctgggtgacacgtggaatgtttttgagacttagacgggggataccatcctcggaatgtctcccaaaggaaatgacctattaaataactgtagtttgatgactaaagtaaatgtgccgtgcatgatgaactgtttcgcctgaccaacatcaacaatttaggcattgtgtgttccgtctagggtaaacgcgaagatcagatcagcaaaattactctcctcttttgaatataaataaaatgcctattttcatgagatgtccatgtgtagttgatgtaaattaggaaagtagtaagttttctgatttatgctttattaattttgggaaacctaattaatgtaataattctctttgagtagtggagtcatttcactattcagagatctgaaatcagacttttagtagagcacttacgttgctaaattctctataaatactttcaggagagatcaagttttccttgcttctcatcccacaagtctatacaagtgtaatgggagtaggttattaccattatcaaggggccgaacctatgtaatatttttgtgttcttattttgctctatattattcgtgttctatttgaatttaattatcctcaatcactttaaagacctagtgtcgttggccaaaagagaaatcaatattttggtactttcattgagagctgaactcaagacctgaagatggatgtgactacaagaaaaggtaatccaaatggtacaagtgattggatggttacaaatccaaatgtcaaaactcctacaaatccaaggaatcccgcagaaattattccaaccaacactaccccaagaactggcgttactccaggaaatagtggaactacctatacctactctgctggaaaaactagcccgggcatcagggagccttcaattagtgagcctcgggtggcgattgatgatgataccgaactgcgcaatttgagagagccagtatctcaaattcaaaatcatccaaatacacttcatcacgataagccaaacactcgggcagccatgaatgaaacattcgagcaccaaaagaggctctttcccaaatggatggatagacagactaaaattttaagggctcaacaagaggcaattgacaatcggtctcattagactactgagctgataaggcaattttatcaccaatctgggcagcagagagaatctccttcattagtgaccccaacacgggaaaagacccttatactagaccacaatatgggccaaaagtttgcccaacaatttacaccgaaaatacctggcaagccataccgtcaaatctaaggccacaaaatctcaatgtgggcaagagaagcaaaatcgtcaagcaacaatcgaaaggagtgaagctagccctcaagaagttgtaccaacatccctggccgactaagagaatactataggccagttaaggtgagcctataggccgaccagggtctgggcacaagctggccggctagaaagtgactttcagaccaagggagcttccattcgaccaagaaaatctgacctctgcaagggaaaggtgtgcaaagttgtcctccacttggaaaaggttggcctccacatccaaaagctggcatcctctt

SEQ ID NO: 62067 - DNA, 1024 bp, Cannabis sativa
accataataggaactaacatgaaaggaaaccacttccacataagtagaatgaccccgcacagtttttgtgttacaactgtaacaagccgggtcatatggcacgaaagtgtcagaacaagcctagcactgctctgttggctaacttgactcaagaagcttttacagctatgatttttgagatcaacatgattggtggatcagaagggtggtgggtagacactgtcgcctctcgccatgtctgctatgatcgtggtatgtttaagacatacactgctgctgatgacaagaaagtgttgttgggagactcccacatcatcattgtttctggaactggaaatgtggagctaaagattacctcgagaaggaccttattgctgaaagatgtaatgcatactcccaaaatgagaaagaatctgattttctggttttttgcttaataaggctgggtttactcaaaataattagggctaatttaaacaccatcactaagaatggtacttttgtggggaagggttatgctactgatggaattaatgtttaaattaaatgttgaatttaataaagtatcttcttctgcttacatgctgtgtgattttaatgtttggcattctaaactttgtcatgtaaataaacgtatcattaagaacatgagtaatattggcttaatcgtgaaaatgtcagaaaaggattttcaaaattgtatttttgtagtcaagcaaaaataagtaacacaccacataaattagttactaaagaaactgaacctttggattcgatacattctgatatatgtgaacttgatggagcacttaccataaatggtaaacgttattttattacattcatagatgattgttctgattttatgtatgtatacttgatgaaaaataaacatgatgcacttgacatgtgcaaattattcgtagctaaaattgagaatcaattcaataagaaaataaaaatgcttcgtagtgatagaggaactgaatatgaatcaaatttgtttattgaattttataattca

SEQ ID NO: 62068 - DNA, 1955 bp, Cannabis sativa
gaaggttaatctcacctaattccttcgacacctacagtataagtaatgcatgccttattttgtatcttttgggaacttgtgcttatccatagctagcactcaaaaacaagttactccttttttatctattcccaccaatctctataaatacccctgagaaaaatgggaaagaggatcggaaaaaggagagagaaaaacacaccaagaacattctctgtaaaacaaatactctcattaataacagagactcgtggagtacagctcattaatgtccgaaccacgtaaaaatcatctgcattaattatccaaaatctctatttatttatttggttgccgaaaacctcggttaacactatccttttttaaggtattaacattatcttctttaaaagcagttatattactaagagaataacattacaatgttaaattctcaaaacaaacaagatatgtttcacattactattttcttactattattaatccataatttatctgtttaaaaaattcattataatctttgtataatttattttaggatattctcacgtttctcttttagatacaactgccaacttctcccaaatcatgaaaaaaaaaacctgccgacaatctctcattttcaaattttttaatttatctaattactctgttctatcaataaagcactaaatatatagggtgtacaagggcataaatttataatatatgtgtatatatttattttttaaaataaattaataaaatcatttgtgtgtcatacttgaaattaggttaaggggtttcttgatgtttacgttgtatcttcttgataattaagtagatgttttggttaagtaattaattttaagttttaccttatgatattaggctagtaatgtatatttgaataattaggcttgtaatattcgaagatacaaaagttaaaaaaaaaaatgtcgtttttgccataacaactaaaagaatgttataatataactcgagtgtcattttccatggatatataccctacttttcaatcaatgaaaatcattaatcatgtacctgaatctcatgtcgtttggtttcaaaaaaaaaaatctcatgtcgttttcttatattattattactattattattattattattattgataaatggcatatagtttataacaatgtgatcacaatataactccagtaaagtagtttacaattattaattctagcttaattgtggtttctcctaattgtgctttaaatggtgtacattcagtaagggacccacaaattttggtctatggggcttaattattataaaaaagttaaaattatttttagtggaacttaattattatagaaaatataaatatggggtttttttgttttttactattttagtttataactacacaattaagagaaaattatatatatttttttaagtgggggctataaccaccataggagtacatgggtccgaatccgtgtacatttataaatgaaaatgacataaattaatactttcattattttcacactatgcaaaaacatatcaataatgaatgatcagtagtttttctccatcagaaatttgttttaaatgttttttaaaaaacgcaggtgtactttttttttattatttttttagcaataataagtatgataaacaatagtacaaaatttaagaaggttttaatctaaagaagaatttttatttttataattttttaaggtatagtatatctgaagcaatttttgatattttgatggaaatataaaatttttccatgctaaagcctcacctaaaaagcccaataataaaattaaatttcttcacaatgggataggaattcaagtcagttcaaaggcagatatgggtactgctatacaggagtattttgcagccattttcacaacttctgcatgttagacttttatttgggcttacattatattttgttggtttttattaaa

SEQ ID NO: 62069 - DNA, 939 bp, Cannabis sativa
ttatgagaattagcatataattagaacttattgttagaaatagaattttaattattatttttgcaattatggagatatattttaattctaggtgtataatgtatgttatatatgaaattttatattttcatattttatacctgacaacagtagaatgcgacgatttgactattagagtcacttagatacggatgaatattttagatttagcagagaaacttagttagacatttagaatgttaggattactcgggaaagttcgatacaaaatttggcatatttcgagacatggaataattgctagtgtgaatctgttatagcacagatgcaatagccaaacagtatagaatcctgtaccctaagaggacaacttagttagacatttagaatgttgggattactaggaaaagttcgatacataatctagcatatttccaaacatggaataattgctagtgtgaattcgctataacacaaatgcaattaccaaacaataaagaatcatgtaccctaagaggagtaaaatatatagatgagaaatacacaaattcacgcactttgtgactaaggaaaacgcgatggtggaaaaggttgatactaaatacaatctattagatcctattacatagtttatgctaaatgctacatttgattaggacatcaagtatatgagattaacttgaaatgcacttatagttttatattagtgcaagtgggagtttgttgagattttataccctaaataaaacctaatatccttatgtactttcaataaagatcaaaaatcatattttgacattgtcatatactttattcacgtattttatacgtgattatatgtataatatataagttctattaaatcccgaacatgtagttatttataattatagtgatgctgtcacaatggaaagtacttgtaattatatgcttcaaact

SEQ ID NO: 62070 - DNA, 956 bp, Cannabis sativa
gggtctagggtctaaggtctaggtccaggttagggttggggtttgggtttggggttggggtctgggttagggtcagagttagggttctgattccaaggtctaggttggggttggagtccaaaatattgattaaaaaaaaactgtttaaaaaattttgaaagtgacttttttttattttttaaaattttaattctcaattaaaaaattaaaaagtaaaaacaattttatagaacataatttttgaaaatattttcactttactaattttaaaaacaaaaaattgattaaagtaatgttataaaatgcacccatagtttttttttctttttttagaagaaaagaaaaacaacaacattcatttaaaaagttgaacagttaaggtatcaatgaagactgagggtgtatgggtcttggggcggtggtgacaaaccgtgaaggggtggttttgtgctctttggggactcatcgacaacctccttttatcctcatgtggcagaggatgtgtgtgtttgatcacatctctctcaagtgaggtgatttgtaaggggtaagacacaattattgatgagcttaactcatgtattctcctttgtattcctccattattaaaaatcgaataaagcttggccaaagggcagttcctcttagggattagtcaccacaaaaaaggtgataaacctcgttatatcttgtctatatttcatttaatttattctacacttatttctggtttgtgtcattgtttgattcaaccattttagttcttcagttcttgctttattttgattcttgataggttttagttcaccataaatggtattcaagcttcacggttaaatcaagaattctagaattaagttttgaagtttcaagaactcatcatgaatggctactaccaaatatgaagtagacaaatttatgagtcttaatggattttttatggaggattagatgaa

SEQ ID NO: 62071 - DNA, 924 bp, Cannabis sativa
  modified_base (27)..(37): a, c, t, g, unknown or other
  modified_base (131)..(136): a, c, t, g, unknown or other
tattaccgaactgcttggggctgaacnnnnnnnnnnntcttgtgtctttacattgctttactatacatcaattgctataaatctcttatcgcttactaaataagacccactgttgttggctaaaagcgagnnnnnnattttggtgctttcattgagagatagaatcaagaatcgttcttcattcaaaatctaaccacaagtacgatggtggtacagactcgtaggggcctagttgatccagtcaatccacagacggtggatcctgcattgcagaattcaggaaacgccagggttctgccaggtgttaatcctgaacagccggcatacgtgggtcacggtgtaacgactcctataaatgaaatcgcgcctggtgtgcaagagattgggaataacagttcagcacccaaccagggcattcataacacaatcgttccgccggttaccaacactcaaacgaccattggagatgatactgagttaaaaaatctctgtgttgctcttggactcgtgcaaggtcatgccaataccctacatcatgatcagaaagatcaacgcgcaatggtaaatctcgcgttcgaggaaaaaaggcctatgtttaccgagtggagagacaaagagatggaagcgttaagggctcatcatatagagattgaaaatcgtagtcggcaagctactgtgctgatacaaaaagcctaccaaactgtagggcagcaacctctatatgtcatccctctgggcgaaacggacgaagatccaacaatgaatacttcccagactgcaaatggtcagctgccaaatccccggtcacgagttgcacttatgggcctagcagtaggcgggcagaccttgtctagtaattcatcaagagaggtcatacctgatagttccaatcaggttaacggtgtcattccacctgtcaaccaa

SEQ ID NO: 62072 - DNA, 627 bp, Cannabis sativa
taataataaaagaatgaatagaatgcaaagcattctcggcaaaaacgaaagaaacataaataaatgaatgcatcagaaccaaaaatttacatgcgaattgtatgtatacatacaattcagattttccttatcaacattatttaaactgttatttaataaactgtctttcaatatatatatatatatataatgaactgaaatgattatatataatttgtgaaatctttaccagtgtactgtaaagaaaatacgttggcctttaataaacattaacagagggaaagtacgattatactttaaaaacttcatgagtgtaatatcatttaagatgtcagtgtgcatgtatactttacgcagaacacaattttagcggcacacacatttacacagtaatggagcgattacaattaaattataggaatatactatgtccacaccatatatatatatattgaaaaccttaatcgcatatacatcaaacagcaaatctctttcaattgcaatatgtatatatatacgaataactaaatcaataaaatgtaatccagcaatcatcaaatataaaaaataatttaatggaagaccaatattactataaattctcaagaactaatttagggatgctct

SEQ ID NO: 62073 - DNA, 1538 bp, Cannabis sativa
gttcgtgaattgggtggcctccgtgagcccatgggctctcttccaagatgatgagtagtctcttcaggatgagtgttgttgttttccccaatatcagccatggagaaagaatttctcctttggttaggagggattaaactgagcttttatcacataagctctcaatgaaagcaccaaattgttaacgcagatttttgttaacaataatgagcctatttttgtaatatatttgacacaaaatttataaaacattaaataaaaatagtagaaacaaatttaacaccaggttttttacgtggttttgcagttaactctacatagtccacgagtcaatcttattcagatttttctgatacagaacaagggttctttacaatcagtgtattcttttttctctcaaggatttttcgtcccccttttttttcgtacattttatccatatttttaacaacataggttggaagttaattacattcaaatttgaatcccacaacgatattttcccgaaattgtgggatataattatgttccacgtaaataaatgcagttattatttgaaaatcacgcagctgtgatttaaactacttttaaagggtcaacgctgacttaaattaagacacactgtaaaatgtctcactgaggtgtcctaccttgtacgtgaacaacttgatttattcataagtcttctagcaatggcatgagcaccagtgtattgagcaaatttaagaactgctctttgaccataaggccttgcagactagacaatcatgtcctgggggttctcaatagcaacaataatcctgacatcgagctggaatttaccaggagtatgccttcctatagtgagatggatttctctctatccgttatctatgtcctccttgggattatgccttttgatgccaaaaggtttctcgtcaatacgcaaatttatagtttgtacatccttgtctcgctatagactgtacagtctgcgagttacaaatataccccattgattctgcatttaatgagttatttcatttaatatttattgacataattatcaatatattcgttgattcatattccctaaagttgacatttttcaccctctgaagtaccagccgaattttaggtatagcactgttccattgatcttttcaagcaaagtctaagatttaatttttatacaacttcagccttccttcccgaaagccgaagcttgtttcataaaaattcaacataactctcgcatgcacgttgttttttgtgcaagaaagatcattgagagtatgatacgtctttaaccctccttcccggaatggaaggattgcttgaagtttgtcccactccttgtgatgctttccctttgatctttttcaagcaaactctaagcttgaatttttatgaaacttcagcattccttcccggaagctgaagcttgtttcataaaaattcaacatgactctctcatgcacattgtttttcgtgcaagaaagattactgggggtacgactgcttgaagtctgtcttgctccctgtgatgctttcccatt

SEQ ID NO: 62074 - DNA, 635 bp, Cannabis sativa
cttaagaaaatcataaacataaacatacaaccagaccgtaactaggcacccatatacctaattatgattctatcccgcgtccgatgcatataagtctcgaacgttcatataaaagtacgattgatcataacatcaatatatgctcggtactctagtcgtactgatgtgatagtactgttaatcctacttaaccatggtgccaaacatatatccattactgatatgttaactgataggcaaccgtaaacatgtaaacatgtatatcattatactaattttatcttgatttcgaattcaagtgtgttggtcaacctgagtggaaactgctaatcgatgatttaaacgccctaagtcacaatttacgtaaaactggtaagtaacttgctagctcacttttggagacttaaaattaaaaataaaagtttccctgtcgataaatagcgtggtaatactctaaatatagataaaatataaaaacaagggctcccaaaactgctccaaccggtgaaccaaattcccaaaatagtgaaccgttttttgggattctgcctggagaaataattcactatatttggaaaaatatatagttaactgttttttctacaggaatgtaacatccccgcttcaagcctcca

SEQ ID NO: 62075 - DNA, 937 bp, Cannabis sativa
atatatttattgttgtggaaaaaaattaatacataagtgtagaatcaaaattaactaaaatttaatcactaaactgttagcaatgacacgaataacaaatacaaaacagttaatcgaaaaaaatatggatgaacggagtattaaaaataaaaaacgattaaagcattaaaacgataaaatcaacaccaagatatatatcggttcaagttcgatagatcgatgtgatctatggctctactctatttttggaacaccaccaaatcttctttattaattgaacatgaatatgtacaatatagtcaagaggattctttgttggattctctcaaaatatttcaattctcacactcttacctaagaatcttcttcaactacataaaattcttcatacaaaacccaaacccaatctctctcttttctctgaacctctctctacatcgatcctaaagtcggtggttgcacatgctaagttgttaagttagttatgacgtaacaaacttaacaagcttctcgtaatagaatcttcacatcaacacaggacaaggtgcttccggatgagacatacgcttcctggacaacagactgaagcaaattctgaagggacttccagataggaaaagagccagctggagtcaactatccaaaataccattccaggaggaacaactagccatctgaatctcctatctggaggaaggctgactttcctaaagattacacctagagtggtcatgatagtcatccaggaatgcccttccggatggtaactatcattccacgagacttcttctggatgaacaagttagctatctgagacatactttcggtagataagtaactttccattactaggacagtcttatggagatgttttttttatttggaagaacaataccacaattctacctttttacttaaaattaaaaattattgacag

SEQ ID NO: 62076 - DNA, 847 bp, Cannabis sativa
gaaatacaaattatagtgaacttagagttcatgaatggagttgttttgacatgatcaattatatgcaataaatcgtaaaataatttgactgagaaccaaaaagttttttcattgttaatttataatgctctaaagaagaatatacatatattttacacataagaatagtaaaagtatattctattatataaaaaattattaaattttaaaaataatatatgtataatttcgtttagtttttctttaattcttatttataagatgaaactatatttttattcataattaattttttaatataactcatttgaatatatgtgcatttatttatctatccagaaaatgtatatatatattaaattattttaaagaaaatatttagattatatatctttagtaatcttgagccattattagattttattgcatatcttcttatcgatgtaataagatcataaatcatgaatttacaaaatttttaagtttatgtatttctaattatacacatacaactcattcttaaaaataaaataagctcttaactatatttattgaacttgaagttcaatatgatatagtatatgtgagtttaaacaaatattcatttattatgatatatttaaatccctatgtgagttcaatgatgacttttggaaaataattcttgcacaaagtatataagaacgatatagtacaaaatgatatatactaactgcaaattaatattattcaaaattgagagaatgagtactccaaaaatgtctgaatcgtaaatgaacaatgtagaaattagtaataaattatattcatttaatttatcctgaagatgttaattaatatatataga

SEQ ID NO: 62077 - DNA, 1137 bp, Cannabis sativa
  modified_base (897)..(898): a, c, t, g, unknown or other
gcagctgtgctaaaacgacttaagtacgccttaagtgtttcgtcgggctgctgctttatattggttagcgaggctgcttcgggtcgcctatccttagtggcttggaattgcttcttaagatccctggacagctgctcccaggaaattattgaatgacgagtgaacttgttaaactagctactcgctactctaacaagcgaggtgggaaacaaaatacatcataaattgttcgtcacattactcgcttggattatcgtgttaaagttattcaaatgcgatacgggatctgtggttccgtcataggatgagacatgcgggtttttgaatcccaaaggaaaggggtattcataatatctgggtgatacggctcaagctcctcatcagagtcgtatccagatgatttccctatttcccccacttgatatctcctgaacttgtcctccagctcgtttatccgtaattggattggatcctcttactttggacccagctgttggcgaagatcaggtttcttccgattcaagtgctctcgtagatctagttgggagtaattgctggcagatctcgtctttctcattaaccgcgtcctacttatagactttgtttttaagtggcttgcagatttacttattcccatactctcccgatcattgactcgttgagtactttctcctcttcgagttgatcagctatgagttttagatcgcctcgaagtcacacttaccttttcacgctctattctttcctcccgagagcagtttgtcgtattttccccattcgggtacgtacgagtcctcgctctatgggtttgggaagaacgctggtgattcctagcaagtgatctccgttcccccggctaagttccaagatcttcctcattttcatgagggatttctnnttcatcagttttcggttgtctcctttttggctgttcatcctgattttcaagaggtgtctcattttccccgggtaattcttcccaggcctttttttgtctcctggttcgtgagccacgaggtctgactcgccactactacaaaatacactatttacgtcggtcaacgctactattcacagcgttgaccgacgtgaatagtactcaaataattggggcgtcactttaaaaatgacactaat

SEQ ID NO: 62078 - DNA, 2277 bp, Cannabis sativa
ttgactaaaaaattatttcgggtgctaaaacagataagggtgcatcaaatatatccattttaagagggtgcattgtaaaattttcctataagattatttaagggatgtttgccaacaaaattataattacattttaatattaaaaaaaataaacttaaattaattttaaaaaatcactcatcaaaatatattttttaattttcttttttttttttacattattttgtgctaatttgatcaataaagattttactttttttttcgtgtatcaattatatttatttttatttttatttttttgtcataatatttaaaatatattttattttaatattatatgtatattttttaagaatataaaaaaaaaaaatacaaattaaagatatgtattatataaaataaaaattgagcatctttacaaattttgagtgcaaataaaatttcccttctatagctatacttctatgccttgattaatctttatttagataataaatatagttcggtaattttactctattagagacataaatgtgaatttttatgctatgatttcaacttctgcatgtatggttataattaataatgactaaagttaatattatatgtaaccatttaattatccaccatgcatttgcaattgagctcatttctatagtataaatttggtgttttaactcaacaacttaattaaggtactttgataacattatgggaggtactaactgtcaaattttgaatttgaaaatagtttactaattaaacaagaatatatataggaattatagttcattacaatatatatttatatataaagcttcacaattacaatttcttaggagaatttgagcataatgacaataaaattatacaaagcacttgtgacataaagtactctagaaaataccaatattttcaaatcgaaaatattcttattcttatcattattagctctaaactaataataattaataacattcatataatttaatatccattttgagacgaaaatagaaagcaccctgaaaagtatcagtctctaaagtaacaattcctctagtcataaaaaaatctccagtaccaccaatcactgatagatctctagttttctcagacattaaatctgctcccataatgtttaaagtacctttatactcacttgagttgaacaccaaagtgtaagcaaaccaagcactatactcattttttttgtcatagaagaaaaacccttgtgccctaccaactgggggagaaaggaaatggttgtctttagtcattggatcatcgaaaaccaccagtttcccgaaattgaaatcgcctagacgagttttgttagctaccgttgcagatgtggcattggctacatttgtgccgttgaagaggttgtcatggtagtagagcacaaatctcttgcaaggtaatttttcattgagtggtagtttcttggatgccaaggtagattgagatgataatacaatgatcaatatgaggaagagaatgaaagaaagggctaacttttttgaagtttctcctatcatcatcatgtttgaaatgatgttattgtatggattcttaactatgtttctagactatttataggggaaaattttgaattaaatagttttactttgttgtgagaagaatacaatactagaaaatataaatgacaaaacttgcaatgataatttttgataaagatcacgttaggcaaatacaattgcaaataaaatgaattatggtgattctataataaacctctttaaaagggaagtactgatatactttttaattatttcggcatccagaaattttttttaattttttttttatattcatgtacgttataaccatttaaaatatcttataaaattttaaaaaattcggaataatttataacattgaaaacaatattcaaacaatctattttaaatgcatataaaatattcacgcgtgcaacacactgtttgaatgtagtttttgatgtattaaatttttttgaatttcttaaaattttgcatgatgtcttaaataattataatttacatgactatgagaaaaaatttgacgaaaaatttatttcggatactaaaatagataaaattatatctgtgcattattcttataagggggtgcaatataaaatttttccaccctatacaacccgaagaaaacctaaaaaataaaacatgtacactttcctaataaactctcttttcatttcaccgagagtttttgtatctatttttttttatatataaatgtatgttattttaaggc

SEQ ID NO: 62079 - DNA, 1100 bp, Cannabis sativa
acgtttgatctctttctctctctcagtagtcatatagaagtatatagaaccctattttggtcattttctttaaagaagttttgatgtgtgttataaattgtaaagtgtcacgtacttgttacttgtttcgatatatcatatatatatatatatagggatataattttgttccgtgattatattttgtgatgtactgtagccgttacatgagggagttatttgatttgagggctgagattgatagggtaattagggttaaaaaatagtaacgtatcctgacagtcatttaatgtaacctgagacccatttaatgtactacggaatacattccatgaaagcacagggacaaaatcgtgtccctatatatatgtacatatatattgagagatattttgtttcgattttaaagcgtgcaaaaagttggctttgtgttagtttgcttaatcatatgactaagctttccttacgaggcaggttttggtccataacgattcccatgtatgcatccacaagtcgaaatgcaagtaaaattaaattactactacaaataatgtgttaaaaaaaattactacaaataaatatcataaaatcaatttgaatgtggtttgtgtaatttttgtttttgaattccttacaaaaaatttaaataagtggaagaatatctattttttgtattcattaattaaaaatatttttatattatattttattaaaatatatctactttttttgagtggattgcccaatataacctcactctctacttaagttcaaaacatattttacattaacctaaaggatataatatgaacattatctataaaagtgggtataacttaaaaaatatgaaaatgaaagtaaaaattaaaataaataaagtaaaatgggtatacaatgtaattttagttagataaattaacaagaaacccaaaatatatttgtatataatatagaacccgataacaatatataataattaggtatatgtgattgataataattaccgcaatttgatagtgcaatactatcaactaagtcttcttccctaaatctctatatcagaagcagtttatttttctaattatcaaaaggtatacaat

SEQ ID NO: 62080 - DNA, 1105 bp, Cannabis sativa
  modified_base (628)..(632): a, c, t, g, unknown or other
aagtgtcttggagaacattttgttaagatattcctaaattgtttgcaatattaattttgacaaaatgatagatatgaagatcattgtaattggttaagtggcctttgaaactgcttacaggagaaactactcttgtttgtggtagagtagtatgtacaaagaatcaaattaatttttttcttgaatgttagaagattcttctttactttgatatttatttggttttattaagtttggcatggtgtaattatcattttacaatggactactgtgatcatgtaaaggctactctgtggatcttaaatttcagccaaataattagttgttatgaaaaagtgttgggtatgtatggcaattggcaataactatacacaacttgattgtgtcaattaattttaagataattgaaccatgtgatatttaagtgctaggatctccaatctaacccactattgataccaatattgctattaagtattattagtgcttagtactatctaaaaattgtaccttataattggttattaatatttttaaaaattatttaattaatttatattatgagaattgctaaaagtatcactagtacttagcatatttttcggtgtcatattgttattagtgtaannnnntatcgagtctcatataacttaaaaaaataacttttaaaaaatatcgttcaatcaatcgtgaaacaccatttatagaaagtattagagaccactggtgcccccataacagtactcaattcagtcacacctataaatgcacacatttaatgctcatttgtatgctagttggccttttagttagaccaggttggacaatatagattttgatacttttcacagctgaattaatagaatgaaaacaatagcatataaatattgaccatatatactacacttactaacgaaattgactatgtgaattttgcaagtcattagaccattattgaatggccaatgtgttaaatttggctaaaaaaaattagactaatgctatattttaatgtgaaaattacatgaaatatgggatttcataacaaagttagaaaaatatggcatttttaggtttaccactcttctatgacattttttcacat

SEQ ID NO: 62081 - DNA, 1178 bp, Cannabis sativa
aattttaaagcgaaggaaaatctactttttgttagaaaataattggtttgattactgattaaattatgagaatcaatatatatataaatatttttatatacacgtaagtggattttgaacacttaataatatctcaaatatcactaaaaatatctgttactgtcatttctactatcatttttaccgttaaaatattttattttattttattaccaaaaatatcaccatttttggaatttagagttgtaatagcttagattaagtaagtatttctctcgatctcacgcaattcccacgggtttttgacctcgttcttcacaatctccatactacaataacaatttgtgcgcttgcaagttaataaatgttaaacgtaccacttttggtacagaacacaatccacttgtccagcgagatgtagaaacttgaaagttgtacgtggatggagcatttaatgaaaattgctcgggtgcaggggtgatattgatctcgccagataagtttcactatgccctatgattccaatttgacactttagaaaatgaggttgagtatgaagccttgatagttggtttgaaaatagttgaagtgttaaaagtcaagaatcttatgtgctacaatgactcatagttaattgtaaatcaagttctaggtgaataccaggcgaagggtttaaaaatggcaaaatatttagagaaggttcggaagaacttggaaaagtttgattactttaaagttgagtaaatcccaagagaacataactcaattgttgacgccttggcaaaactggcttcgcaaaatgaacttgataacttaaattttgtactgggggaagtgttaagcaagccaagtatatgtgaaaaggaagaagtagagatgattgacgcctcgcctacatggatgatgcccatagttaactatctacactcaacggacaacttccagtagagacaaaaacaagacacgaaaactcttgtattcaatacctcgctacacgatagtagaaggcaaattgtataagaggggttattcaatgcctctcctacggcgtgtactcccacagaagctagcgagagaatcaaagagatccatgaaggcttttgtggagaccatgcaggttggcaaagcttgtcaaagaagataatctgacaaggtactattggccaacaataaataaa

SEQ ID NO: 62082 - DNA, 772 bp, Cannabis sativa
aatatttattttttctccatgtttaaagttttatataaaaaaccggttgagaaaacaaatttcagtaaaacgctagtcggagcatcaacgtttgggtgtccaaaaattaacaggttagtttttttaatatttgtttatatgtgtattcataaaaaaaaaaatatattatttaattttgtatttatatatatatgatatatatgtattatatatttaatacatatataatatattgataaagaaatttaagatttatagttttgtataattttaagttatgagtaaagttcttggaaatcgatcggactatcaaagaggagtgggttataaattgaaagactgctcggtaacaagttctcgtactcaaagtcaagctcaatcacaaggcccttctccatccattagtgcggaagatatgagagtctttgctgaatttatgttaaaaatgcatgataagattgatcagtctggcacctctagtgacctttctttacttgacccacggtttgaaatttttttacaaatttttttaccatcacaacagcaaggtagtgcgtccacttcaacccctcatccagtgtcaatgccacaacaacaacaacaaccacaatcgcctccaatgcctcatttctttcaacaacaacaacaacaattctcccaacatgtctgctagctcctaaaaaccgcctcaattacattacatgttcgggcatccctcacagtctcctcctatatttttctagatgccacaggaggatctcaaacacaacaa

SEQ ID NO: 62083 - DNA, 1512 bp, Cannabis sativa
ttgtatataaaggagtgatccaccatgaaatgagacctacgaaactcttgctacagtggactaagcagatcgtgatctgactgaaccactataatcttttgtcttcttgttatttccagtctttgttaagtgtttacgttcccagctcgagtactcgccattttaggttgaatactcgcatttattcttcatacaatttcttcttattattagtattattatatacttttggtattgcgaattttgctcgacaacaaaagtatttaaaattttagatccagcttattgcaaataaaaatttaaatttgtattttataaaataaattataatgatactctgcattttgcaaatgtaccatcatgatacattgtatatttatttttatgtttaattttgtaaaacataggatcaacaatataattaaagataatctatacatatttaattttatatttatttcgttgatattaacttttttaatttttttgtttatttttatactataaatggtaaaatattactataacaatactataaattaatattacatatctatatgtacaatatttaccttgtttttaagataatgatgaggtgagaaagattagagaattcatgaaccatgaaactttcttttttgatatataattaatttaacaattttttatgcattaataataataataataattgatttgtggtgtatcatttttattgtaaacttatttattaaatatatatattattaacaaaatcacattaatttcatgtccatttatcactacagaaaatagctacttttagtgataattttttagtcacaaacataattttttttttgtgactaaatgtctattagtcactgaaaaatttacttgtgactaaaacattgtatttagatacaatttgtaactaattagttttagtctcaacaagtattgtgactaaaaatatatttaaatttgaggataacacattttgctcttgcgctttttttgaatctgtcctgacgtgaggtccaccaatgcgaggagctctggagccactcgcttcctctgcattatttaaactatctgcttagagattggcttctctgttgttcttcatgtattggccaaaattttctcatcaaattaattcttctatttcatcttgcaaaaaccaatattcaagcgttatgtggccaatgtctttgtggtacttacagtttttttgggtctcttttgtcatgatttcctcttataggttgcggtaatctgaaaacactcttgtgctcttcgatggcatatatatgatcgcaagagacacaaagttctgtgcaattgacaaatcatagacctccattctgctttggggaactctctttcctaattggttacttggcaagctttgggcttcaacgccttgtagagttgcgttttcttaggctatgtcttggactacgtcccctagaacttctagatcgtgggcttctggaccgcattctcggtattggagatctttgtttctcc

SEQ ID NO: 62084 - DNA, 1398 bp, Cannabis sativa
tatgaatgcatcaaatataaaattgtgacaaaccctaaatgtaaatgcatttttatataaatataacatgacaaaaaataatgaaaagggttgatttagtagatacccaaatctagtgcctgcatgaccggtgagcttggaaagtgaaaagaacataatatcatcatcagctggagctgaaattgcagtaaaatgtggccaataatagactctatcatatatggctttggcatttgggtgttgaaaacgagcacgattgagcttcccatcaggattgtttggtgaggtcacaatttcaattatattatcatcattagagcagttgttcatcttcttcatccacaaagatgcatcctcttcaaacttgtattcaacctcttgaaaaaactcagtttgttgcttgtaaagctgcaaaaattttcaaaccaattcacatttataatcatatatatatatatatatatatatatgacattttccaaaaaaattaagggacaatattatggtaattaacttgtctaaatgtatataaatatatacaagaaaaaacatattgcatgtgtagttaattaattaatgtacttcttggtaagtaatcttaatctaacatggcatctggaacatctaagtaagatgattttaattaagactgtcagttgaagaatgattaaatagagtggtgggtataatattagggtggatgatttcctgagaagttttctcaaaaaacgtgtgagtgaagacaaatattagtttgcagggcaagtcgtcatgattccacaaaacaactaaagtaatgtacccatgtatatataacagccataagtctagcagttaggagagttcatcaaactgctcaaacgcccgcaccgcaaaaaaaaaaaatgtggtttgaaattctttgctgcgatgcggtcgcgatttgaatttttcctaaaccatgcggtgcgctttgcggttttgaattgttaatatgctattcaaaccgcaccgcacattatataaagactaatttttatatttatttaggtccaatatgtgaatgttcaactcaaaacccactaattattgtattgttaaaacttaattttttttttatatatttattttcaagccttatatttgtgacaattgttgctcaagctttattatatttgtgatagtttaattatttggtgatagtccaaataattagaaaaaccgcatgtgcaagttagtttgaaaaatgatcaaaaaccgtactacccgcaccgcgaacactcctaccaaaaatagatacttaataaaggcttgaggcggcaaaattacaaatccaatcaacattttaatagaattactatactgtataattaagtagatttgatggaaagagatactaaccgggtaataagggattaa

SEQ ID NO: 62085 - DNA, 1406 bp, Cannabis sativa
tttttttattaaatatataataaaaaattagaattaataaaaataatttctaatacaacattgcattaagttatatttatggtaattaaattaattttcaattttccttatattacacttgaaaaaataataaattaaatatatatattttattcagtgagctaaatattaataataacatacttttaaataatttaaaatatttttttaatcattaaaaataatatatttacagttttaaatatcatttaaccaatttaatatttttttctataaattatataaattaataaacgcatgagcagttgttgtaataattgaaagataaaatttaatttatgattattttaattatttatgtataatttttaaaaatttacacaacacacctaaaaacagactttacttttgatatttctataattttttttatatatttttacggactttatttttcttttatttacagttttaaggattttgttttttttttttttacagaaaataacgtgaaaataatgttgttctaaaaataacgttgttttgaaacaacagattaattacactctgtattgatgtaaaaaaatcacgttatttttccatagcagtaatgtcaaaacaacattgtttcaaacataacaaaaaaaaaaaaaaaacaacactctatatttttatgaaaaaaagccataaaaatgtaaagttgtcatttttttatatttatgaaataatccctctatttttagggtgtgaattttatatttaagtaattgttaatatttttactaaataagtaacatataattataaatcttgattgttagcaattttataattattttttaataacaatcgaataatattttaattcctattatattaccttaatatttgtaagggaatcaccccatacatcactttttaacttttttttctatttttacgatttttttttttttgtttttttttatttttataatttggggtgctctgttggttactatttgggttgctgtgtgggttgcgatgtcgattgcagtttgaattgagttgcgatttaggttgcttcgtagattgcactgtatattcagtaaaaatacaaaaaaaaaaaataataataatttgaaatgtataaattaaaaaaatctcttttttattatttttttaattattattagattattatagagaaattggttacctattctaaaatttaattacatttggaatacattctatcattatttatatgttatcgttgtacataatattttttttttgtaagtttatctaactttactttaaagagaatgaataaaaaaaaatcctaaaataataggatggtacctcaaagtttttaggcttacaaatatatatatagactagcaaaaagttacgtgcgaggcacg

SEQ ID NO: 62086 - DNA, 4094 bp, Cannabis sativa
atacttgtgagtagatctaatattctggtaaaataatttccaacaaattcttactagtagtccattaatataatcaatataagtagttcgctctcctattattagtacataattagagttggtcaaaattactatttttacccttctaactatatcttgattccttatgtagcattaattcaatataaactgttaatttataacttattatagatttggatccactcgttaacactcctagaattaacactataagaaaactaatattcaatcatttcggaaagcttggattacttattgtgtaacatgttcctagccactcatgttattgaactcccaaaacagaagttgtaagaatcaacttctctgagaaactttaacgagtgaatcaaagaactcaatgaacacaaagatgagttcatgtatataatattattacataccggtccaaccttgtgtaatcaaattatacacaccacctttacttcatgtcttttcacatatgtgacccgaatcaaaatcacacacacacacacgcgcacgcgcacgcgcacgcgcacgcgcacgcgcacgcgcgcacaccccacacacacacacacacacacacacacacacacactaaagtatagtgtatagtaaaccgtacttagtaattctatatttaaggttcatttactttaatgcactaccaatttattttatttatattgtataaccttaattctcttatacatccttacaagattgtaccaacttcatatgaataaagaatttttagatatttattaattatgattttataattaatgtattcatttatcttataattgtatttcatatattccataatatattatccatcaattacttgcttttaagacataaatccaagcaatctcccacttgcactaaaagtaagtgttgtatgctctataactcttatagatgttatatctcattaactattaaaactaagtcatgtgaatgagaccctccacataatgtagttacaagtcccggagaccaccacatcatcattggatacaattccatttgtaaaagttgtactgactatccctaaacttgaccaaacgagtaggggtggtgtcgaggacagtaggggaccatttgtaaaaaataagatgattacctcggggagccccttctggagtcttggtagcttcccgagtggcgaggttatttttatagcaagagcgagccacataaccacggtcctcatcatcaatattcccagggacatgttcccaggcaaagtacttgcgatcttttacatccatagtgctttgagtccttctgagaaggcggcaagccttgagattattatcattcaataaaaagttagctgcttgcagatcgattgagaggttaaacagttgttcatgtcgacgttggatagcagcagttgaggtaggtcttttcaaaggagctgaaaaatcaaagacaatatacaatgagtaacgagcatgaagtcataacacaaaataatttaaacaagaaagaagatacacttacatattaattggaaagtggtggttttgacgggataagaccacttgtccaaaaaaaatcttgcttgaactctttcttatttggaagtctgacgatcatcttattgtcgccgctatgtgttcccaaataatagaagctgctagaacattttttcctcgcagggcaagctttaatggcgtagaaacatgtgacttctagaggagaagggcctttccatagagagatttcaaatgggcaaggatcctgtaagcattggggttaagttggagtggtgcgaccccaatgtagtcgtagaaatccttgaagtattggcaaagaggaaggagggctccaaccttgatgtgctcaatactccacactccaatacgcgaggagttgctggcactgcatccagacccacttagcaagcgagttgaaggctaacagttatgctgacccttctccaccgagcagacagcaaatttattatttgtttttataccacaagaatctacaaagggcccaacatatggggcaatcgacctaacctttgactcaataagtttagcctcaaacttaacattcgaattttgaggcatcttggatttacgatctttcgaagccatgatgtcaaagttaagatcacctggtggaaaaacaacaatgactcgaggtaaaaataatggcctcgccaaggggattttcactaagctaggtaattcagcataggctgcttctcgcaaacaatgttgactaccctcaattatttcatcaatacaatgcctatagcgagctgatgtttcttcttaactaatcttaaggatatgctctctaatattttcatcatttatttcaactatggatcgagggttgtaggtttgaggtttaaaagcaatggcttggacttgggggttaccaagttttacaagttccgggtgttcataatcatgctcaaaatgaggtattgtcttgtttaaaagaaaaatgcctcaaaattttgaaattgcaaaacgtaaaaactccgagcacataaatcgtcaaactctaattttcaacttcaaattgctaagacctacacaaagacaaccccatacaaaataaatgaatagtgcaaataataatagagatagcaaataaataatagtcaaggatcaaaataaaacacttactgggtattcggatgaaagggaaccatgaagaattcctcactggaaactttctataccaggggtctggaatataatgatgttgagattgtgaaaaaaaatggtggctaaaattcgaaggaagaaggtaagaaaaaaagagggcattcaatttcgagagaaataggattagcagttttgaattctctgaagcttaatgaaatggaaatggcagaatagaaggtgacatcttatattcaagctatggtagtcgtttgattgtaatgatatttgatcgaacgagtggaactattgggagaaaaaaagtcaggttattaaatgttgaaatgatattctctcaaaatactaaaaccaccaaaataaagtatgcatccaatattaaatgaagaataaaataagaccatatccttcatttctaaaagttctttttaaatcctaagaaaaatacattttagggagcacttaattatatttatattttgaacaccaatatgatcacaacacgcgcgtaaaaagatagaaaataaaccagctcgagctataataaataaatgtgttcaataactcgcttcgaaaaatataaatggtagacattggagcatctccttaaaaaatttaaagatgatgtcagctgaaaatgatagataatgaattctttaagaacttgcaagttattgatccacatacttgtgagtatattgaaagactaagggatatacacagaaagtaattattaatactgcaaggcgtagaagcttagtcagcataactatattttaataaagacgagcgatggtaataattatctatttatctcatgtgttataaatatgaaacatgtaaattgttcatgtttcaagagtagttacaagaataggatttcgaagaaataactgcttatcctagacatctataaataaggaaacacatcccaaaattagggacggcaaaaattgggaatcataatttatgtaaaaaaaataccatacgaatttcgttttttttttttttttttcgaagaggacattaaccttcctcagttttagggcatttattgtaatttctcataaatatatggaatcattaaataaatactaatcaaaagttttcaaaaatactgttattttaaggttgttctaaagaaaattatgttgctgctacattaaactatgttttgaaaacgcaaaaacaatgttattttctgaaaaaaaaaaataatgaaaaacatctgtaaaaatatatatgtatatatataaaaaaattattttaggtgtttttgtaaatttatataaatatacacacccattctcaatctttttgttcagaaaaccaaaaaccaaactgcgggtgcaacaacacatgcttctgatttttttggagtctgtaagtcagattcgagagtttttttttttttttttt

SEQ ID NO: 62087 - DNA, 842 bp, Cannabis sativa
cacctcatttttcattttcacctactcttcctcgttagggggaggataatgatttgttggtatattttgtcacattctctgtgcctgatacatgttttgaagaatctcttattccttcaccccccttcggtcataactcccacaaggcctacacctccaccacttcctaggcctcctataatgtacaccaggcgtccaccttctccacctcccttttcatgtcctgcacctgcatcttcgtcatcagattcgaaactcaaagatgacctacccattacattacgtaaaggtaaatgtcaatgaacttttcctatttcttcttttgtttcttatattcatctctcctcttcttcttgctctttaattacttcttttttttttttttttgaaaatagagaaagagaccacttgtcttagactggcctcccccgatatatattgcaagcctaacttaaggcggaggaaaaccatggtaaacaagcagtaaacaaaaataaaaacgaaaaaaactgtagaaaaaattgtgacatcagtcacaaaaacctaggattattacttcttttgattctatcactattcctaaaaatgttcgtgaagcaatgtctcatcttggttgacttgctgcaatgataaaaataaataaatgctttagttgcaaatggtacttgggacttggttaatttacctttaagaaaacgggttatagggtgcaaatgggtgtttacggctaaattcaatcaagatagaacgattgctcgcttaaaaggttgtcttattgccaagggttatgctcaaacatatggagaagataattgtaatactttttctcctgttgctaaact

SEQ ID NO: 62088 - DNA, 1245 bp, Cannabis sativa
ttatttaattattttttaattttgaatttatatattaattttattttctactcaacaataattatagctaaaagagtacaaaatattcaagttatgtagtcctaaaagaatcaatacaatcaataatataatcatagtgtaagtggttaaattctcttatatcaactataatgtcataagttcaatcatttgtaaagacatgctttttattaattttaatttaaaattttaaattaattgaataatttgattttttttccaaacaataatttaaattcctgcaatcattattagtataaaacaattcttatactatctaataatttaaagtttgtaattattgtggtgggaaatcttcaaattttttttgttaatatatatatgggtaaataccattttaacaccatgttttacaaaagttaccaattagaccctctgttttattaaatgaaaaaatgaccctgtatttgttaaaattgtacaaataagaccctgaattgattttttatcaaaataaaatttaatgataatttgatcgagagatattatgataaatctggttatattttctgtatctattcttgttagagatattatgataaatctggttacattttctgtatctgttcttgctagagatattatgataaatctggttatattttatgatctagagatattagagtttagggtttagggtttagagtttggaaaaattttaatattataaaatttttaaaatttataattattgtggtggaaagtcttaaatttttatttgttaatatatattgatagttgtattacataaagttaacaataacataacacatgcaataataataatacaatgaaaaattttgtcaaatgagaaattgaataataaattttgtcaaataaaaatgcataataaatagatgaaaagttttcactaaaaaatatctcaacggtctcaattaccgtcgatctcatttaaatttgatagtctatgacaatttttgataattataaaacgtgtggtaagacattaatatcatccaaatataatagtttattattgtaaaatttatttactttgtaagtacacacagtggtaatttatttgctatgcaagtacacacagtaaaataaaactaaacatttctttatacagatgatttttttcccttgtgtttgttattttttgttttatttattttaattttttgttggtgatataaaataacaataatttatttttatttt

SEQ ID NO: 62089 - DNA, 1209 bp, Cannabis sativa
  modified_base (343)..(343): a, c, t, g, unknown or other
tttaacatagtattatataaaaatatgatatataatcaaattcaatataatacaatacaatacgacctaatacaacgttccaaacgagctcttaaaggttagaacatctgtaattacttttgtatattttgtattaagtactagaatttagggctgtacaaagaattgctaaactactaagcatgttttgttcatgactaagagttaattgacctttcttagaagcccaataccgtattgtgttacttttgtttagggaaatttatatggtatgttaacttttgtcattttttcacaaaaatactgtcaagcagtatatttaacttttttactgtgttttttnataagtttcatactgcagtatacagtgttaagttttcacttgtgttctacaggtattttttagttgttctactgttgttttgaattgttatgttttgtattttactagtgttttataaaaacacaatatttttgaaaaattttccgatagtatttttgtaaaagttaacccaaattccaatatttttataaattttcctttgtttattgttgtacggcaactggccacgagttgtttgtttggtttctaatcatcgctcggagctatctcagcattgaattgtcatttttattattattattattatttatttttatagaaccttatgggaggaaagaatttgaaagtggataaaagtatccatacagcttatgttaaggcgataagatcagctcaacacttcatatacatagagaatcaatattttcttggatcttcatacttttggccatcatacagaaaagcaggtggatgacactttatattgttaagttcccttgactcttataaatcatgctaatattattatttactactttatcgttcgatcaattattgttgtttttattttgtttcaaatttttcataaaccagatcagtgaaaaaaatataaaagtaaacaactttgttaggaatagactattatgtgtagtggtgtggggaaagtcatccgattcaattacaattcattgattcaatcctaaccgatttaatggattcgaatatccattcgtaattggatcggattggatataaattttaaaaatctaatcggatcgaatcggttgttggatggaacatccaatataaccgaaccgaaccgatttaattatcatccagtattagtcatccaattatatttatat

SEQ ID NO: 62090 - DNA, 1054 bp, Cannabis sativa
  modified_base (717)..(720): a, c, t, g, unknown or other
atgttctggtctgaattcaggtctaggttcgtgtcttgagtcccagttcgggtttggatttagattttggacccaatcccatagtcggtctttgaccgagtcttggtccaggtctggttacagttttggctctatgttcatgtccttgtaatggtcttgttcttaggtcctgatctgcttctagtttcgattccagttttaagtcacggggtacgggttttggtcgagtttggatctgagtcttggttcgggtcgtgatttgggtatgaggcaaggtttgggttaaggttttggtctcaggtagggttcgaggctgggtctgggcccaggtcccggtcccgttcaaagatcttggtccctttctaattcatgtttcgatttttgttcctgagtgttggtcgtagtcttcgtatgtgtccaggtcaaagtttgagtttgagtttgggttcgagttctggtctatatccttgatccagacactgaatactggttgggtccaagcatcgagtcccggatcccaggttccgaggtgggtcctatatccaggtttgggtctggggtcgagtccttgatcccgatccaagttctgagaccaatttctggtcctagtttgggggcccaattcccaggtctgggtccaccatctatgttcaggtcctaggtttcggcctgaatccaagttcgtgttcaggttcgggttcgggttcggtccgagtnnnngtcgcgatttgggttagggtccgagtatgggtcacagtcccattctaggtctgggcctcgagtcccaagtctcagtctggttcttgggtcctgagtttggcacggatgtccaagtttgggtccgagtaccgtgttccgattttggtctgggttccgtggcttaggtccaggtcccccatccaggttcgagtcctatgatccggtttggggcctagtcccagtttcaatttctattcagtgtctgggttcgagtttgggtctgggtctgggttgaggtctgattcctggtccgagtctaagtctgagtctaggtccaggtccggatcccgatctg

SEQ ID NO: 62091 - DNA, 1368 bp, Cannabis sativa
tgtaacattaggtatttttacctacaaaaataaatattaggtatttaagtgtataaaatctgaaatattaggtatttatgtcataatttacccatgtaataataataatatatatttattaataaatattcaattatataaaaactaggtaacataaccgcgcttcgcgcggttattatactaattaataaataacatttttggttaatttatgattttttttgtgtgtttttataatttacagtcactacactaagttatacaacaaatatctttttattgtataataaaaaatgtattaagttttgtgttagttttaaaatagtgacgaacaaaggttagtttggcaggatttaacaattttattaacaattataaatttcatattttttttcataaatttattgaatgaaaatacaaaaaactgatctctaaagtacagaaaaggcttaattcattcctcaattttgattatttaaaaaattgagactaaatttatgaaaaattaaaatatataataacaaaaatatttacatagataaataaatttgtaaaaatagtgatattatattttgatgtagagatagtaatcaaggttcatcccataattttaccacaatgagatttatattagtaataaaaatgattatattatattatataataaaatgtacatgtatatttattgtccaacattatatatgtaattgaaagatttattatttattaatataaaggaaaaatttgccaatatatatatagaaaaatttattacccacaaacataattaagaaaaaataaataagaatctgaaaaagaaaacatttattattataactgctaataataataatcattaatatatattctttattttttatttttctttttttattatgaaataaacttttcattaatcaaatcgagtatatatacgctttatttgtgttaatgggacattggtaatttttttaaaagaaaatgtgttgcattaaagaacatttttttaaaaaaataaaaagagctcatctagagagctcttattacattgcaagatataaagaaactcacataaagaacttataagacatatttctacattgcaaggcaaagataagttacagtagtagttgtattacaatagatatcttctagcaacatgtatgaaaaaatttactaagttgtaagggttaataggcttacaccactgataaaaaaaattgattccactttctcaagattaatagacacaatctactcatccactaaacaaatattgatgtcgcccgccatcttttagcatccaaaaatgtcacgtatccaaccaggctggcttgctctgcacacaccaaactttcactcacaaac

SEQ ID NO: 62092 - DNA, 1441 bp, Cannabis sativa
  modified_base (238)..(241): a, c, t, g, unknown or other
tggtagttcaatggagtgggagcgctaatcatagatacggaatccatagcttctatctggacataaaagtcaaacgatgatttccttttcagtggcatcatcagcgagttcaagcggtgcacctattctcaatgttaagtccactctcataagagtcaaatttagcatgagggattcaacccactgcttgtggttggttccatttagcgtcaacatggcagagtttcttggaacgctnnnngctgaatgagaaacaagagcaataaccattaaatggatgttataacaaaatcatgtcatttgtgctcttttctcataaatgaatgatcgcaaaataacaaatgatcaccgtgtatgctagagttcttagacaaaacaataaaatagaactcatacacatgtaacaacaatctattaaatattatattcaaatacacttattaattattaaccatcccattatagttgttgacaaatattgaacacattgttattgattgtgtttatagtattaaacttataattatattagtccacaatattaattttaacattgctagtcccccagtactgacgcagttcagaaataaattcttacatgcatgagaggtatatcgatcaattgcacacaaaggatgctaagagaaaagtagcagctgctaaaaagggcactttgaaaataggtgatggaaaggagaacaacatcatgaagatggatgtggttagattagcaaaaatactttggtttctgatgatgctagggaagctagggaagctatcattatgcttcaaaacataaagaccaatgccagtagtaactcttctgatttggatgatgatgatattcttagaagtgatgatgatgatgatggtgagagttaaaatggaaattagttctttttttctttctaattcttctccacttggtttgaatattttaatgtatcaaatcatcttgtgtaaaagcaaatttctgaagtagttttgttactttctaatgtctgacaaatcataagcttagttgctttagtttgtgaacatatagagttgtcttgtatagttgtatggcattaaattggtgatgtaacttttgttgtaaaaacctgaaattaagagaatataggaaagggtgtgaacttgaatttgaattttgagcatattctttgcagctctgttatcctgatatgcatgccagcaaagatataataatgatatactaattgactaattctccatcatgacattcattgataaaatgcatatatccctaagtgaagttgttatttgattaaaatgtccaaattttgatttgactgagaaataaaggatgatgatatgtttaatgctatgttcttcactgtagtttgatcgttctattctgcttcatttttttccttttaaagtatattttcttgaataatgagtaggttgaactcaaata

SEQ ID NO: 62093 - DNA, 771 bp, Cannabis sativa
caaaactaagaacaaacccagtgttaattttaattggctcctaaattctaatcaatcgaaaatgactcgtgtttggctttgcaaatcacaaaacgacatgccgtttctgaaaatactttataattttcaatttatttttgcaatattgtttcactttggctgagtgtaatatctaacaaaaggttagtattgttttttttctttttttttttttttttgggaaagggaaattaattaaccaaacaattacaatagaagagacaagtcaattagaagtcatcttaactaaatcacgaagctagttttcttttaagggaaaatacaaggacctttacagagaggaaggcaagtcctgaacagctaaaggagtacttgtgacactggagagcatcccggtccaacaagcagatgctttagagtttagactctaaagcatacttagcgatataatgaacaagaaggttcacatatctacgctcgaaactaagactacaaccaattacaacaaattgtactattaacgtctctacagcccctagaattagaattaataagttaaatagcagctagacaatcagacgccatagaaacatcctccaacttgaaatattgtttaaataagttaaaattttggctgaaatggcacacgtcggttcgaacttttaataggttgatgatattgattactcgaagtaaattgactccctttcgcaaggtagttttaactaccattagaaaagagattattgtaagagatattgattgattact

SEQ ID NO: 62094 - DNA, 3801 bp, Cannabis sativa
ttttttttaaaaaaataagtctttaaatttgttataattatttggaaactaagaaaagagagtattgtatcaaatattatacaatttaaaaacaaaaactttattaattaaacaaataatataaaataatttttttttttaaatttgctcaaattatttgtactactagtatagtaataagttatattaagaagcttttattaatgaatatgtgtatataatacataaatacatcaaattataataaaataaagcaatagaaaagtgagactttaaatgaaaaagataagaagtaagactatagtttaataaaattgtatattaaatatgtacaaaaataattatattatatatatagtgtataacatatatgttcaattggttttcggtttaatcggtcgttttgccatttacactaaaactgaccgtgcaaaggcagttttttcgattttcagttttttcggtattgggtttttcagtgttcgaacagtcggtgtactcaatttttttaatttcttaaattttttgctcaaccctatttatatcataacaaatatgttacatgtcattgtgttagttttatgcttgttcatagagtaagttagataattagattctgttataatttcaatatttactttctactaactaatctcagtatataagagctaatgactctcctattgagttgtaatgagaatcactctttttgttctttctttctttctctctttttgtttctctcaacatggtatcagagtagtttttttttcctactttcgcacaatttggatctttcttcttccctattctttcttcaacccaaaaatatttatttaattatataacttttttagtcgaacgacgggtggtggtctggtgtgtgtgagttctcaccaatgcgcacaaaactgtgacccttaataaggcttaaacctaagtcgcggactatgttgctctctttaagacgtttcacggctctgtccgaagtgtgcacgatagtcaagcaaccacgacatccccaagataaaacatcttctgtgtacgattcgttctccaccgaacgatattgctcgattacaccctaaaaattgctctaagaaaaatcgtaaaaaacaaaaagaaattttttttcctatattttaaaagatgtattcttctgttattatgatacaatttatatagagaagtagattcaaaataaattaataatgtcatcgtgcaaagagtcgattcacagtataaaaaaaagggagggggcggggaatgtgctctaacgatatctgatatggcacttttgttttaatcatggaatcaaacctttgcattagtagttagcataggagctacctgtgggaaagcgcaagcatataccatgacacaacaatgtatgacagccagcctaagcattaattattactaattaatcgcataataaacattttgtgcgcttattagatatggagaagctaccgttaaccttttattacaatatctatgtcaacatctaaaaacatatgttggaatttttttttttttcaatttttcttcacgaggtgttcgttatgcttacaacatcatccttataattttttaaaaatttcgaatagtttacagtgtcgaaaatatgtttgaagttttttgaacacgtgtggtaaactgaaatattaggaactctatttttcggtacggtaaactattcggaatttcggtattgtaaactattcagaattttttaataacttacagagatgatactctaactataacgaacactgttatgaaaaaaaatttgaaaaaaaaaatatttcagcatgtgattttgaacatagaagttgactaaggaggttgtaattagcactcctcttaaatatatcatactataataacgacgcttcaaaaaataaataaacatatatatgataccaaacatatcctaaaaaaaaaaggaaataaccaaacaaagctttgttgatttacccgtccttgttaataagaatattcagtaaatgttgttaaaagtgattcgatttctcatcttaagcaaaagtatttataatgtttatatttgtagtgtcattttcacatccaaaatgattagttgcacatggtttttatcaaatgagcattgcttattactattaagcaagcattttaaggtgcccaataaagcgttttgtgagaattcagattaataattaatattaataaaattctaattacagtgactgcgctcgcagcactataaggacaaattaattaagtaaagaacaagaaggcgataaatctggagcagccagggacgttgaaaactaagtctagctagctcatgtaatattgtcatctgtatatgtgtatgagctatatatacccacacattttcatctctattttctactctacaaaatctcaccaccacacctttttttcatctctttaatttgtccaacttataatttttaatcatggtaagtgaattcacaaacccatatttctcttcagtataaattataatttaataacatacgttttgtcttacactcagggggaagtagaggaggctaataagacaggtagtgatgataaaaagtacgagtcccaaacccaatcccaagtaaaaggaggattcaatgcttgcaaattcatcttcggtacaacaaatataatcaaactaattaagagaattaagcaataaattatttatatataattttgtgtgtatatttatacagtgttggcagcatttgagaacatggggttcattgcaaacatggtgagtttggtgatttacttcattggagtgatgcatttcgacaacgcaggcgcttccaacactcttaccaatttcatgggaaccactttcttgctctccttacttggtggcttcatttcagacacttacttaagcagattaacaacttgtcttatctttggagcactagaaattctggtattaatttcacaaaacttagtagtgatgatactttggggttaataatttggtacataaatcttgtttatttacaggctttgatgcttatgacgattcaagcaggcacacaccatttgcagccagaaataggaagtggtgtgaaaggtggtgtatcagtgttgctctacgtgtcattatacttgttagcattaggctcagggggcgttagagggtcacttacgccattaggtgctgaccaattcgataaccataatccaaaagaggcaaaggctcttgccacctttttcaattggcttttgcttagtataacacttggagcaagtataggggtcacagtcattgtgtatttgaacactgaaaaagggtggcaatggggatttatggcatcaactctggctaccttttttgggtttattgtccttgctttaggcaagccatattatcgacttcgacccccaggagacagtcctcttttgagtatcacaaaggtctctcttcttcttcttctttttatcttaatgatatatataaatacacaaaaatacatagctgaaaactctttgttttttgttttaattaatgttattgaatcacaggtcattgttgtgtcaattaaaaacagagggttgtcactaccagagagctcaactgaactatatgagatcagtgaaaaagattcattatccacaaaagagaaacttccgcataccaaccaattcaggtgagcataataatcagtgctataggcaaatttttgtaattgaacctaaaaaaaatgcatatcactgcacttacattttctaattaaacaaatagttataattttattagtaatattgtatattata

SEQ ID NO: 62095 - DNA, 1122 bp, Cannabis sativa
tattttatatctaaatattatattttaatcacaattataactttttgttgtgataaaaaatcacatttaatcacaaaaaatttatgttataactaaaagttgtcactggaagtatctttttttgtagtgcagcttacccttaactattttttgccattattttttttttatttttcctataaaatatttttttttttcaaaaaaaaggtcatatttttgttcgtattgtaaacatccataattgtaaggtgtaccagatattgtttttaagttggttatcattttaacactattgaaatacatataatgaattataaacacaagatcatttatacaaaatgtgatacttatctaattcttatattatatatccattgtattagaaaaaatgacattgtttttctaatttgagaccctcatctaattaatttgtgaaatttacatgatatactaacttttgctattttttttttataaaaatactatcaagtggtattttttttacttttttactgtgtttttttataacttttatctgtgttaagttttcactggtattctactggtattttttagttgttctattgttgttctgagttgttatgttttgtattttactggtgttttataaaaatacagtacttttaaaaacttttctgtgtgacagtatttttgtaaaaattaactcaaattccaatattttttgtacatttccctctaatttttgagtgagatattatattaaaataatgtcatataataaaatttatttggcaaacttaagtgtataatgtataaattatttcaagtcaatattttgacatttttaaatgtgtaaacaaaactggttacaaatttgcaaatccttatttgatcacaaaatttatttgtgcaataaagtgacttgaatttaaaatttaaatatatattgtttatatatagtattagaacatatttagaaaggtaatgatatatttgtctgactatataattacactatagctgtgtaattagagctaattgataagttttattacattcttcaattctcatagctatctatgagaattgagtagaattacactttataattactaaaagtattttatttaaaaatattaa

SEQ ID NO: 62096 - DNA, 818 bp, Cannabis sativa
tgtttaagctctttattcttcctagcctcgcacgtgtcttcctctaatgtgctcgccaaatttcgagtataacaccttcaattttgctggagccattctggtgctcgccaaattttgggtatcacaccttcaattactctactcgatacataagaatgagtagctcctaaatcaaacaatatagtacaggaatagccatttatagataactgacctgtcaccactaacagactagcatctgcatcagcctgagtcatagtaaaaagtcgtctcgggttctgagtagtattcttttttgactcctctttcctggcctgaggaaaatctttgatgaagtggcccactatgccacactggaatcaactgttggcccgacattcacactgatggtgtttcttgcattttagacactcaagataagattagaatgaagatctacggccctgacgaccacctctgcttccccaaaactttttattatcccctgatgttccgaaagcatcagccttccgtttgtgatcagggttaccaccgtcggtctccttacagatattaccactagaaggagggttggatgtcgtggcggcatcctttgcagtctgctattttattacatgttgctcagcctcctcagcaattagggctagctctacaactactttcttgtataaagtttcatcagttttggtaattttcaagtcccgactgattgtggcattcagtcctctcacatatttctgtttcctggtaaaaactataggcactagatcaccagcaaatttggacagccgattaaactccagagtgtattcggccac

SEQ ID NO: 62097 - DNA, 1913 bp, Cannabis sativa
aatatgggcagaatccatagaaaatgggaaaaatagagagaaattctattattttcaaatattaagatttgtattctgttatccagaaaatatccctaacaagaaggactcgtagactatgtagattttaactacaaaaccacgtaaaatatctggtgttatttattattattaaattatgtagtatatttattgcaaaaaaggatattaatttggttaatgaaaatctacgttaacagtttggtactttcattgagagtcttggtaataaaaactcagaaaaatccctccttataaacacaaattcaaacccatattaaatggctgataacaatcaacacaacggtaatcatcttaaggaaacaacttatcgtcctaacaaggaacctatgggatctcaaagaaccaacacatataaaacaccacgttcagggagaaacgatggtaatttcaatgctgttgaggatcaaatcctaaaaatagtgagtgaggacgcctatgatcctaccagatacgtgccactggtagaattggaaaataggcaacttcgacaatgtctggctgaatcaaactgatgaaacgctgagttagagcgagaagcaacagcggccagggcatcacaaggaatagttcctcaaaaccagcctgatccaacagtgaggagaccacgaggaagacctcgggattcccccaaatacccaggaggagcaacctggggatacaagggatgtcccaatggataatcaatctaaccctaataatacaaggaatcaagagaatgagatgttccacaaacttcccatggattttcaaaccaagggaatgaacaaactgacatgccagaatcatctcgcatgaatgaagaggcaaagcagcctcgaccaaggaactagggattacctcgtgataatgagagaaccctggaaagtaacataggtccagtggtctccctccgagacatttgcaacagccatctcgcacggatagggaaacacatgcacactttcttgagcaggggatgtgtgtctactctccagccacacaagattttttctctttcctgcgattcaaattgcttagtttcatatacgatcaaaatcaatcaccaaagatccttcatcaagaaactgatttttttcaaaaaaaaaataaataaatttcttcatcaagaaactgatttcttcaacaaataaaattgtctaaaaataaataaaaacattaaatatgggctttagaaacctaatttacatatatatgacatatcaaatactataaaaatacctaaaaaatgttatataaattggtcaaacctaaaagtgtcatatttaagtaaacaactttttaaaatctcatagtgagtgtaattttctattttaagaatgtataatatattttttcacatttttatagattttaattttttttacaaaaataaatagtattttttttatcgttaattttatattattggtatgggatagtaatgtaaaaataacatttttttttctaaaaataaaaacataagtaaaaaacctataaaaaaacataatttgtaaaaatattaaaaaaaaagataatttcacaaatacacaaaaacaataaaaaaaaaattatgaaaatacagttttacgaagttttaaatatttttatgatttttttgattttatttatagaaaatatgctcattttatgttttacttatgttaatttgttgttgttattagatgttatttttattttacttttatgtagtttttttttgttattttttgtgttatttccatggaaaaccgtaaaaatgtaaaaaaaaaaaaaaaaaaatctctaaacaaaaaatagtgctttatgtaattatcccaaaaaaaatataattttaagtagtttgggtaaagtagaatatgacacaatacatg

SEQ ID NO: 62098 - DNA, 1090 bp, Cannabis sativa
atataaatggaagcttaattcaagaactgagtagtgtttacaattctttgaaattcaattcaagaaattggtccaaataggaattgtacagataagctactcttttatggtatcacgaagcctttgactccggtcacacatggatccttgaaacccataacgcactaattctactccagcactaccaaatgctctcattcagccaattgctcatatgcagcaatagaatccttttcagaattcattgaattcttctctaacaattcgtcttgatcaaatgaactatcttacgtggaaatctcaagtgatttactatcatcggccatggcctcaatgacatcttacttactggcatcgcccctgttcagcgacttgttaccgatgatctcaaccgtgaatgcactacctggaagaggaaagatcaattctcagctgacaacgttcgtccatgacagagactgtccttggatctttggctcatcacaactcatcctttactgcttggcatgcccttgaataaagattcaccagtcaatcaaaagctagatttctccaaatcaaatcttagctatcgacaattcaaaagggtaatctttgaatctctaattactctgataaggtcaaaacattagctaattatctttccaaaactggtcatccaatggaagagagtgatttaatcatgcatttgataaatggattgggtcttgaatctgaccctattgttgttcatgtgaccaactttgttgataatctttttgtagattctatacaattgttgttactaactcatgaaagtaggattgaaaagcataataatatcaatgatcttgcttccaagatgtctagacaccttagcattaacacatcaagaaatggttctggtgcttccaatcgctcctatgtacaatagaatcaaggttcatatggctacaaaaatctaccccctagtagattccctggtcgtggtcctccttcaatttcttgactactatgtcaagtttgtcataagcctggacacactactactgtttttcattaaagatttgataaaaaatttgctaaccccaaagttggagacttgaaagcc

SEQ ID NO: 62099 - DNA, 911 bp, Cannabis sativa
agataattcaccagcctacaaaaacataaacacatgagttttacaaaacaataccataaatataaagaatctaaaaaaataaatataaatatagaatgcttacttgaaaaaatacaaaaacgtgagttttactgtctccatataatgtaggatttatctgttatatgatagtaaaaatattaataattgatcaaatatttaaaattagtatacgtttgagttgaattatttttaatacaacaatcaattcagttataaaaagaaagataatatagttgaaaataaaactcactgtccaaccagcttgaatgctatcaactccattttgcaatttcattcgacccgaagtatattgtaagccaataacatccaatgtataaaagcttgcatttgtccaacctccattgtattttttgctcggatcaaattttgttcgaacaatcgcatgctattgttcaatttcaaacataaaaatatttcaatacactaactaatttgtcaaaaaaaaaaaatatataaaatacacttacatgaaaactagcattttccgaattaatggaacgaatttttgcagaataagacttggtaaataatttggctctaacaagatcttccttggtatatcttcttattggaacggttccagatggacatgtttcattgttaaacacgctatttattgatatttgctccacatcatttcgagacttttcattcgtcatcactttaggacgagaagaaggttttatctacaataaattaatattaatattcttatatatatcaatataagtaaattaaaataccaatttattgtgataaatttacttttttttttcaaaaaataaagaatgtaaaatataacttattagaaaatatatatttcgaaaacaaacctgagaatcatatat

SEQ ID NO: 62100 - DNA, 1243 bp, Cannabis sativa
tttctatgttaggtagttagggtgaatgactgcttggattttcttttcttgtacagaaatcatgcctaaacgggtccatcgagatgaagctgacttggaggaggaaattataaagcaagaaaatgctccaaaattgatcctaaacattagtccatgggagatggaccaacacataaacaaatttaggatttataataatctgaggaagtacaagacctaatgggggctcgaaagtgttccaaagctgttctggaatagattctccgttcacggtgaaattcctagcaagtgcgtggaaggaggcttcgtcatctggagctgggctcatgtccaaatgggtgtgcactttcctttgaggtgctactttgctaaattttatgttgttgctagagtagcacctttttaattcacccccaagcatatcgcttattgtcgaggtggtacattttctgtgatcagcataataagtctgctccaatgccggaggagatcttgtacttctacaagatccagtctcaacccatgagaggccacaatgagaaagtagatttctaaaggatggaacgctactccaagagtgtttcttttccaaccagctccacgaagtacacacatgacttcagagattactacttctacacctccggcttcctgttgaagagagttcccaccctcaatttggattttaacccagtaagtaagtgttattccctatattgaaatatagaatttcatttctcctcctgtttgctgtattctgatatgtttttttttacatatgtcagattgtcttccttagtcgcccttgaccctagagttggaagagatgatggccttctacaaatccttttcgtctaaggagttacaagtagaaaaactcgtgaccagtgagaaccttcaaaatgtgggtctcatcgcttctcattgggacgtcgaacatctttctgtgaaaaaaaatgtccaagagtctctctgaggggattcagaagaggttaaagaggttattgcagtcataactgctgagcatgccttaaaggtagtgaatgccaatgagaaatgactggtggattggaggagacaattccttgaaatcttgagcgaggccaaagcactcactattagattcaaggaggtagtgcaaaatgaagtttctccaagagcgagcacttcccgtagtgatgagacaccctttcacataattaggctcccactttagataacttagataatattgaccaaggta

SEQ ID NO: 62101 - DNA, 2112 bp, Cannabis sativa
aagtctctatttatacattactcctacaaaagtcccccaaaaagctatagtgatcttgaataggaatcctacaactggtcaaaatctaagctaattgatcgaagtgggtagctccagtagacccataaatcatggaacaaattgacttagattgcattaatacacttcttcatatttcacacctattaacataacataagtgggtgtgaaatattatgggatcaactaatattttcatgtttggtcaagtggttaatgattgtaaggcgttattaaaagaacttgaaaatatttctatcttttttattaggcgatcagctaataaaatgattcataactttgctagagcttctttattctattatgattgcattttcaatttggggtctatcttagttgatttgctaccttttttgatagctgaatttaatggttaataaaatgaagatttttcattaaaaaaaaactaacataagtaagttaatcaaaattaaccactagagacaagtcaaatcatttctaactaaaacctgaatttctccaagttcctttgaattaatattgcccatgaaaatcactttggtgcagcaagtaacatactagcaatcccaagattcattttccaaccaaagagaaaaaagatgaactaataaaaaaagtgtgttatagcaaaatagatctaactgatcttcacagctaagctatgatcatggcaattcactttcctattatgttagaaaatgaatgaccacagatccttaaactcaagccaaccaaactacatgggcaactcgatacataatctacattgaacaattggtgggcaaattttggacaaatgatgaagaaacttactcctgtttagttccatatttgcactcaatgtcttccccttcgatgagcctctcaacagcgtcggaaggtagaccgatcaattctagtgtcttttcccacactttatgagcagttccagtgctgtgtgcttcctcggaaggatttgtgggatgacaatcgtgagatatgaaagcgcatacaggccagtcgtcggatttcaacagctcacagtactcgggaatttgaggatcagtggctgcaaaaagtgtgcttctggcacctgaaatggatgttaacaacttcagttttttataacaattacagaatgttagagaaggctcccaatgccatatatgtgtcagtttttgtttcttcaggatctgttctaacacgatcaacactgttcatttgtatatgatctttagacattgagtcaggaatgaaagcaaaactcaattgaccaaatatgttaacattttgaaattagagaccactagtttctttctaagtctagcccccaaactcagaactttatgaaccaaacaattattaatacatagatagaattgttgacaatccattaggtaaaaggtgtttgcatttacttgcagacattattcaatttcgatcttcaaggaaaaccaaaactcaactattttcaagctaaatatttctaatcaaaatgtgaaataatcaactaaattctatgcaccagaaataaagacttgtcctaagaaatgaagacaaataatttggctcggcataaaactcttccgaattaggtgtttcagagagatgaaagagaaggtggtgagatagctcattatccagcctaagctaatgttagtttgtcaaaagattaaacaccattatatcatattgcttggagatatacattcatgattttgaaacagatgtactagagtttacgaagcatcaccttcttgtggactaaaaataaaatagggtattagatggtaagcagcttgaacaagttttggcagatcccttgcctgcaattgaagttcacatcaaaatgatagaaaatgaagtaacaccagtcatttacaaactttgaaaatcattgtattgtgatgcttaacaatagaaagctcacttacaacatttgtgtggacaattccaggcgatacacaaagtacactaacacccgcttcagcaggcagacgtttaaagagaacgctactaaacataacctgcaaaagataaatcttataaatgtgcgatagcagatttatcactcccaatacttgtaaagct

SEQ ID NO: 62102 - DNA, 1087 bp, Cannabis sativa
actttgcccttacccttgtctatgagagggtttgaagttccagtgttagtttgctcacgaacttgctcttcagtcacagcttctacagatggttctccatccgtcctagtcaaaccagcaaacatgctctaaagttgctccatggttgctttcatcttggcaataagcctttgttgcttttctagggctgcttgtgtagcctccaactctgcggttacttgcaccagactagtgtcatgttcatgatactgaccatctttataatatccatctttatagtagtcatcgtcatcgtcctgatcataatcctttaaattgtggccatcaccatgtctctctacgacgttctcgatattcttttcttgattctcaatagtggtgtccctctcatagttttacgtagcagctacgccttctccatcattgtccacctgtgcgttggttgcatgagaggtaccttcctccatgaccgtgtctaatagagttcctttgccagctgcctttcgcgtctttaccatgatcaaaggacaatgaacactaccaagcttccttcaactctcaatgaaagcaccaaaatgtttatagagtttttcgaaaaccaaatgtatttaaagcataaagaaaataggaaataacaaatgataaatagatagatttttacgtggttcaagcgttaactatccttagtctacgagtccctagccttggcctcattgggcaaatgtttatgagattacaaaatagctactaaaaagactactctgcttttcttgagagaactttgttagaatttttgaagagtgactgtaagtgaaataattgttctccccttgcgtcaagaaaaatgggactatttataggcagtcatggggtaaagggcgttcccttttaccccttgattaaggctcaaatttctacattttaagcatttaattgtttatataaaattaatttaattaaatattttcatagttttagttgtaaaattattttaattgaaaatatttaatttattttaatttttatgtcatttttcagatttatagtacagagtgagtaagaaggcatgaaagcccaattcaatggc

SEQ ID NO: 62103 - DNA, 2420 bp, Cannabis sativa
  modified_base (180)..(180): a, c, t, g, unknown or other
aatgggttttatttagggcaaaaccccccaacacaaagagccagagactccagctgtttgaatgctttcttcttctatccgtttttttatcttttcggcctggcctctttttaagacaaagtgaccgaccaagcagtcttttaatcccgggttttcatgcttttgttatctttaatgaanttcattctctgtttataatcatcatgcaaccgtatttattttattttttacaaaatgccttgtactggtgtaggtgcgccccaagtgcccgagcagacttatgactcttggtcactttttatattttttgcaagtgtgcttttttgtctattcggggttttgggctcgaccaaaccttttgtacgcacttgatggtaaattaataacatgctaatatatttaactcaatttgaattttgaaataaatatctttagtcatttattgaccaaaaatatgtctattagcgtaataacttacatcaaagctattatattgatctaatccgatctttagcttaacattaaataaaataaattgtataaattaaaagtcgtactttcaatagtggtcatctgacctgagtacttgaagattttatccgaacctttgggcgtggtccgcccagaaggccattcacttaagaaaaaatgttctcgtgtttcatactttacattgtcatctgacctggtacttctaatggtagtattttcttaaatgttccccattccaataccgtggtaccagaacgagttgtattttttcatcatacttacccaatttgtatgcccctgatttaagaacttcgaccacctgatatggtccttcccagttaggtccgagcacacctgttgtactgtcttgggtgtttaaaaatactcttcttaagaccctatttcccacaaagaatttccaagccttcacttgcttgttgaaataccgagctactttttgctgatgggccattagttttaagtttgttgtggttctcatctcttcaatttcatcaagtgatttggcaaggagtacatgattggcttcttggctatacatcaatcttttgtgggatggtggttcgagttctatgggtagcatagcttcatatccatatgacatggcaaatggagtttgtccgattgccattttctcaatagtctggtatgaccaaagaacttcaggaagttccttcggccagtttcctttaacatcctcaagtcttttctttaatgtatccttcaatgtcttgttgactgcttcaactagaccattttcttggggatgcgccactgcggagaaacttttgatgatgccatggttcgtacagaaatcagtgaaggattggttgtcaaattatttgccattgtccgaaactattttgtacgacaatctaaaccggcagattatgttcttcacaacaaagtcttgcacttttttgaacgtaatggttgctaatggctcggcttctgtccacttggtgaagtaatcaactacgaacactacatattgcacacaacctttgcccatgggtaattgtcaaatcaggtcaattccccaaatgggaaaaggccaaggactttgcatttgagttaacctgttgggcggtgctcggggtatcttcaaaaatctctagaatttataacattttttaacataggccttggaatctttgatcatcctcggccaaaaataaccttgccctacaattttcttaaataaactctgaccagcagcgtggtttccacaaaatccatcatgtacttcagacaaaagtcgtgtagcttcttcttgggtaacacatctgagcaatggcatggagaaactttgtttgtacataattccctctagtatgatgtaccgtgcagccttccttctcatcttttgagcctcatttctattatgtgagagtttctcagtgttgaggtaggttcctattggtgtcatcaagtttggggatgtattaatcatttcaatctcttctgtgcaagtgatgctacgttctttgagaaactgaataggaatcaggtttgctctatcacttacgttactactcgcaagccgagataatgggttagcactcgtgttttcttcccttggaattttcctgagtgcatatcttttgaattgtgcgagcagatcgtgtattttgctcaaatatgctatcatcttttcccctcgagcctcgtattctccagatacatgatttaccaccagcggtgaatcactgtagatctcaatatgttcggccttcatctaccgtgctagtcttagattggtgatcaaagcttgttatgcagcctcattactatatgccttaaatccaaacttgactgcgcgtacaggtgttgcccccaggtgtgacaagggagattcctgcaccagatagttgatctgtagccagcccgtccacatgtagtttccaagt

SEQ ID NO: 62104 - DNA, 1368 bp, Cannabis sativa
ccacattttagttccaggaagacgcactcgtgtggtgggagttagtgtccctctcccaagatgtcactgtaatgacctaggaagagttccgagagatattcaacgtcaagtattacaatgaagcagttcacagtgctaagtggaaagaattcactaagttggtgcaaactgagggtatgtcagttactgagtatacaacaaagtttgaccgtctggccaagctagcctctgttgggattttatgccctatccttgtaaaggatatttactgagcttccattatccaccaatgccttttttactcttttgttggcgaactgaatagtaatgatgaaaggattgacgtgcggatacctcacgtgctttgtgtcttcctccaaaaatacaattgtaggttcttcagtcctgacatttttagaagattttagagaaaaaactaatcgctcgttttttatttcattgacatatctcttctggccattactgctttgtctagcgagatacggccctcttgagatgaccaatatgtcctctccttccacaggaggaggttataatctttggttgcctgggttattgggcgagtttggctggttttgtctattaccctatcattttacatactgttgaaaatagctgcgtgagataaggctctctatctcgtctttcaactgacgacattcatccgttgtattccttatgtccttatgaaatcgatagaactttgttggatcccttttgtgtctcgaatgtctcatgggctcaggcttgcgaaatgcaaccttgtgctcatgtgcgagaaagatgttttctcgagtttcattaagctcggtataaatagtgtaaatcagcacatacttattgtgctatttctgtttctttttatctttggctgattccctagagtcatcttttctcttagtgttagagctagctggattttcagtctttgtcaagacaatgcttgctgtgatagtgctaggtttatttcttgagctagtctttaacaatttcatctcattcctcgcttcttctttctgtatgaacacttgagctctttcattaaactcactgatgttcctcactaggcgaccttctaaatcatcccacagcgcgcgtccaactgttgagaggtcagtcgtgatccttgcttgaagagcagtaagttgaatactatccttcaagtttctaactttagcagcggcagtactaaaacaacttaagtaagccttaagtgactcgcctggttgctgctttacgttagtaagggaggatgcttcaagttgtctatctcttgctgcctgaaactgtttcttgaaatccttagacagttgttcccaagaagtaattgaatgatgggtaaactta

SEQ ID NO: 62105 - DNA, 674 bp, Cannabis sativa
  modified_base (305)..(309): a, c, t, g, unknown or other
gaaaagcaccaccttgtcatagtactagacattattggtatctaataacaacactctaataaacaatgacagagtcagccaaaaaccttagggggtcccaatacatgaggtagaaatgacaaattatttttttacttgtacaatagatatacactcaaattgtacatatttattacacataataatgtatataaatattagtcatttttattagagaaatgctaaagggcaccagtagtgtctaacaccctcttatgtgtcaatatcgctattggtccaactaagtatcaggtctcatataattnnnnntaataacttttagggagtatcgctcgtcaatcgcaacgcgacatgtcaagaagatgttagattacttttaatagtgtagttaggattaattactcaacatctgtgtaatttaaaagtgtctcaatcattgtccttaattaatacaataaagaattgtaaaaaaaattggcattaaattattatactcttatcactgagttcatatgaaaatttatgagagttatgaaagtggaataatgtttaatttatctttaatgtcgatataaatataaaatccaagaacttaatgtatatatgagtcacaaacattaactccacacaatacattgcattctgatcaatatgataatatgtagaatcccaat

SEQ ID NO: 62106 - DNA, 1053 bp, Cannabis sativa
aatgaacccaaataaattaaagtaaaaaaaaatgataaacacacaaattttacctaaagttcaaaccgttaataaaagctaatccacgagtcacttgtattatgatcgaaattcttacagtgataaaatatatagaaagattttgacagcgtcatttagactgaaatttgagatccattaattattacaaaagatggatggtcctatatataggtatttatcgagattttcaaaaattaattagttaaataagagctcacaaagtaataaaagcaataaatgaagtagacaaagatttttacgtgattcggacattaactgttcctagtccacgaatctgtatattagccttagaaggcttgtctaatgtattacaatagtgtttacagtaaaaacactaactctagtctcttggtttctcttgatgaagaagaaagcttagagagattttgacaaagcttcgactatctcttttttgatcccccctttgtgtagaaataaaggggtatttataggataaagtacgagcatgggcataaccatgactcgtctagggtttctgcaaaaagctcactcactattggggtaaaatacataaaatatctaactattgggcccccaagatggttcttcctcgtgtggtgaatcatctgtatagtggggaccattgttggtgcagggcacgtgtcgggcaaaggcttgcacttggtggacaaagtgctcagaggatccatcagacaaagatgagtatccagagagtggtgtctgcactaccatgttctgacacagggacaagatctgattccgtgtcataaaagaataatcgtcataaagccatcagctctcaccttacaagtggctttcggttctccttgcgcaatttgcatccgtcttagactcttcgcatggctctctggcatttgcctgcacttataggtaagttggtcttctccgagtcccgaagcaatgataaggcttccgggtctcggatggtcatttactttgtaacaaatctctgtgcctctcccaaatcaaacctttcccaaacaagca

SEQ ID NO: 62107 - DNA, 700 bp, Cannabis sativa
  modified_base (510)..(513): a, c, t, g, unknown or other
caaatgataagtaagaaacctactcgcagtttcaacgagtaattactcataacggtaatgaccgtttcttaattcattcacaacaacggtgataaccgtgttcttccttcaatcataaaaattcacaaacaacaatgatcatttctcatcattacctcgatgaccatcgagtcacaacaactacgtattattaatctcgatcaagatcgagtcactacaaatacatatcgttaatcttgatcttattcgaggcactaatgattataaccaattcatatttagctacttaacggtgtattaaacttttcttacctcaaaccaataccgagtgtgtgggccgaccgacctgagtggaactacgctcgacaatcccaggtcctatgtcacgataacaaaactcaataaacaacttattcaaaaccttagaataaccctaactttgcaactggatttatctaactccccactggtttagaataactcaaacatcattaaaatatcctattctannnnctgggaaacaccccgaacaaaaccggttttgaagcctaaaactagggcttcccctactagcaaaaccggttaaccggtttcactgtgcctctgaaactggtttactgatgtccatgctgcagaaacgagaaatcttgatttttgctccaaaactgaaccaaatctcctccaatcctaatgaaacctt

SEQ ID NO: 62108 - DNA, 697 bp, Cannabis sativa
attcttttactaattaaatgtgaccaacaagaaaaagaaataagtatttatgttagtttaactctacgttattatcaattgctcaaaaagaaaaatactatactcttcgttattatagtttcaacttaagagtaataaactgtcaaaaattaaagattaatttatttttttcttgtaataaatttataatatatcagtatcgaattttaatatcaataataaaaaagatttccttcttttttttctggtgttgtgttgttcatttgaacataattacccagaatatacaaaacacagctgaaactcctaataatgaagccgatagaatatctaacgttccttccgtcctcactttcctctctattctcctcattttcctttctaaatactcttcgtatcttttccttcctcccatttcccttctcccactatttacccttttaccctccaaagcttttcgtaaaattaccaaactctccttccctttcatgtgccttccatccatgtcctcaacggttaaacacacttccctcacctgcaacaactcccggccttgggaaactccgcacgtgaccacaacatcgtacgtgacagactccgtcgacgaccctttatccccgccgccctccaacaccgacgcaaaacccacccgaacctcaccgctcagccagtggcgttgtacggacactggcttgtg

SEQ ID NO: 62109 - DNA, 2834 bp, Cannabis sativa
aaatcacggaccataaattgattggttcgaattatttggaatggagtaagtcgattcgactgaatctgaggagtattgacaaagaggatcactagacatacgatccacttcaggatattgtgtatttgttgagggcaatctgatctcttggaagagtaagaaacaaaatgttgtgtctagatccagtgttgaatcacaatatagagctatggtacaatctatgtgtgaggtaatatggatttatcaacttttgactgaattctggtttaagacttttattccaacaaaattgtggtgtgataatcaagctgctcttcatattgcaaatttcgtgttccacgagcgaactgagcacattgagattgattgtcattttattcgtgagaaaattcaacaaggtctgatctccacagaatatgtgaagatcggagaacagataggtcatatttttataaaggttttaaatggggtgcgggtatgctccagtttgagggggagtgttaggatattagctgtatattagttgtaaaaattagggtaactttaaaattaattttattctattgtatcctcctcatcttctaaaaatatcattttcttttctaaattattttatcatcattgatttctttccccctcttttttttttttcaatctaatccactgctatcagaaacaatctaatccactaccatctcctaggttgtaaatatagcattcctcttatagcaatgttctatatatatctccgctataaaagccatatactttatattttatatatttttaatacatgtttggtatcagatacatcatacagaaaccatttttttttttaaaatatattaaataaaatcagaactattagaggccaacaaaatgttaaataaacataaaaattactctcactccatcttaattggacgtctttggaaaaatattctttaatatatcatcagttgttaagtagaggagttcaaactggatagccagaaccctaggataacttttttttattaatttaattttggaataaactagtcagtaaaatttcccactttcagtatgtattatttgtttagtagtactttcactccatcttaattggacctctcatggtctcataaatggagctttagtgacacaactaatattggcttcttccgctgctagtttattcacctgtaggcataattgaagtctatacttgtaaaagtaattgatgcatcttttgattttgtaatctcttctggaactcaatcaggctgcagcatattattatcatggattgatccttgatgagggaaacacagaaaaatcgcatgggatggctgtagctgctttgcaagcagcagatgagtatttcaaggaaagtaaaaaggcatgcgaggcatttaacgcggctcctcctttgtcaaggtaaattcttggtcaacattctctcttttgttgtgcctgttgaatgatatttgtattattactctaacatactttgtacgctcgaactcatgcatgctttaagttatcagttactactgcgagacggttctctgtatggatagaacaaatatattctatgcatagcacccacaagctcatggacttttacttttgtcttgtacaccatttgctaatgattagtactttcttatctttcatagttttacaatttttaagcgatgcctattattaggaaagaaaacagagcaaggagatgagagaatattgctgtaagaattctctttttcattgactaagatagcatgatacagagaattgtttatatactgattagtacaatcgagagagtcattagctaactaactaactactaactaactgaacagctcagcactaacaaccttgcttagataactaactaatcttgatactccccctcaagatggagtgaataaaggtttagttggctaagaaacaaaggtttagtcaacatgtcagcaagctgttcttgagatgaaacatgagaagttttgatgatccctgcttgaagattttctcgaacaacatgacaatcaatttcaatatgcttcgttccatgatgggaaacagggtttgcagcaatgtgtagtgcagcttgattgtcacaaaacacatcagcaggtcccttatgctcttgttagctctttcagtatggacaatagccagacaacatcacaagttgtgttgaccattgctctgtactccgcctctgctgaggatctagaaaccgtgtattactttttacttctccatgaaatgagagaatcaccaagagtatacagaaacctgtggtggatctccttagaatcatggcatgttccccaatccaaatcagtatatggtgaacctttgacaaggctctgataccatattaggaaaagaaaacagtcgagaagagagtattgctgtaagaattctcttattcattgattacgaaagaatgacagagaattgtttttcagaaaaaaaaaaaagaattgtctacatactgattagtccaattgagagagtcagtagctaactaactgaactgctcaacactaacaaccttgcttggttaactaactaaactaactaatcttgatacctatgtccaatttgattgagaaagttgatatgggttttaaagtttgcaatatttttcctgcattggcatgctgagtgatctgttttgtttctagaaattagtgttcaattccttccctgctaccgagatatagtttgtcatgacccagtgtgaggactctactaatttttttttgaaaaagagaaaagatccttttgtcattgacaggatccttcccgataagtattagaagcctcccttgtggtgg

SEQ ID NO: 62110 - DNA, 2806 bp, Cannabis sativa
ttgaatggttagaattgattgccatagaagggatggataaagtaaagagtattggcattgaactttatgaggatggatatcaatctgtcctaccatttccatccttagaatccttgaaattttgagaatatgttaaattgggaagactggttttcttcttcttctggtattgaaagcagcaaagagtttcatttcctacaaaaaatcgaaatacaactgtcctaagctaaaacaattgccacattgccttgttgccttgaaaaacatgagtattatgggatgtgaagaactaatagctcttccaaggctgccaacaagtcatggaaactttcaagaagcccaagaacatccttgcctcctagagctatctatatgggcatgtccaaacttgaggcagttacctaccactcttccatcattgacaatgcttgagatagatggttgtcaaagcttgaaagaattgcccaagcttccttcaatacacgacgtagagttaaagcaatgccaagcagcagtactggaaatatagttgcgctcaagtcattttcccacttgcgcatgagtcaaattctcgatctcacaagtctaccagatgggtttttccaaaacttgacggctcttgaagagttacacattacgcatctcaaccatctcaaagttttgcctaacaagattggcttgcacaagctcctaagtcttcaaaggatggaaatttcaggatgtccattactagaagagttgccccaaagcctgcacaaactcccgtctttggaagagttgagggtttggaaatgtcctttgctcgaatccttcccgagtacaggattgccttccccacttacaggccttgaagctctctctgtcacttgaatacttgactgttgaaggttgtccacttcttacacatttaccaagagatgaccttcctaatacactcaaagaatttgaaatacatgattgtaggatcttgaaatcccttcttaaagatctaattcatggcaattctcttgaatttctcagtattgttggttgccattccattactgaccttcctgcttctcatcaacccatagtcccctccaacatgatagcaaacctgaaacaattgatcatcaacgattgcgcgaatctgaagcttttaccaaatggtttacagaacctaatacatcttgttcatattgaaataactgactacctttgatgatgctaaaatctctaagactgtccaattgttggagtctcaactccttaccaaatcatatgcacaacaacctcacatctcttgaagaactatccatagaaggttgctcaagtatttcttcatttccacagggtggtttgcctattaatctgatctctctgtcaatcttggactgcaagaagcttaagcctacattcgaattggggctgcacaaactcactcatcttacaaatcttgtgtttggaaggtgcaaagagttggtgtctttccctgatgaatggttgttgcttagcactttatcctctcttcaacttcaaagactgcctaatcttaaaatgcttcctaagggtattgaaaacctctcatgtcttgaggatttggaaatatgggaatgtgacaaccttcagacattgcttgatgatcagcagcctaagatgcttcagaattttaatttctaggatgaactttaattatgaaaagaatttgaaacttcaatggtattatttttttgtgataactaactatgaatttatagcttcttcttcttctttcaatataattatttgagctacctttgtctatgtattcccatcacaggcaacttatttttgttggtttagtgttgtttgaatttgtgtttagtgatctgattgactttgaattctagctctttgatgtacagattgagcttatgttctcttttagtattttgacactcacaatgtagcttgagcaaaacatattctggcataaaaaagaatcattgaattttatacataactaattaatttggggtgtaatcattaattcttgggatgcaagtattccttatgaaaatggaaccgttctctttattttttccttaatttgtatagactctactaatttctctcattccaaaatttaataaacaaattaatgggattcaattgattctcattcccctttataatgaggaattactgggagtggatatcaatcatataagagaggtggaatcggtaaggtagaataatggaattaaatatcattaatagtatttaaagcatagaataaaaagtgaaattatcgttattagaaataaaactgataataataaatgaatataaatacaatgaatatcatttatatgagagaggggaattcgattgacaaaaagcgactaaaagggtaagaagcatatttattggaacaaagaatagcaagtgaatatggtaattacataagtaatcgcttagaaaaaacagttaaatgaaatcccaccaagataggcccaaaattaggttaagaaaaattcttaagattttcccctaaattaagggaaggattttgaaaaacaattaaactccattaccactcatcacaactgttaaaacatattgtagtacattatctataaaaaagggttgtaataataaacacactgattttcaattgatttagcaaaaattcatgaaaagacaaaacaaaatataaagttcttatcctttaacaattagattttaaatgataaatagcatataatttcgactgagaagagaaaatataccttgattagagcccccaaatcttcagggaagaaggaacacaagaaaaggaaggttg

SEQ ID NO: 62111 - DNA, 763 bp, Cannabis sativa
ttatttatttccttaaatagaaatttatttctttaaatagaaatatatttccttaaataaaatattcttataattcgttttactcaatttgttgtgtaactaattttatttttgatttatgtttcagtgttttagaaaatgatttcctctttattttttttaattataattggtttgagttattctgtgttatttgtttgtgcttattatgttatagtaccgattttattctaattataactggtctgaattattacgtgttgcttatttttattcagtatgttatagaacggttctattttaatttatatctcagacatgtaacttcagtgactgtttcaatgatgacacaagtctgttaaatttttagatgattttttcgacgacttttttgatgttggtgtcttctctggtgactttctagtgatatttgttattagaagttttatcaaatttatctatggtcttttttttttctcatattttaaagtttaattattttaatctcatatctttttgcattatttatttatgtcatataatataaaagtaaattccattaatttttttcaataaaaaaaaccttattaaaatgagcaataaatctccaaacaaatccacaatgggagattaaaaaaagaaaaatttacactataaataaagttttttctaaactttacatttatatttgacaagtaaatttttacatttatactttctctacttaatttttttcttttttactgctttttacttattaaag

SEQ ID NO: 62112 - DNA, 805 bp, Cannabis sativa
cttgtttctctccaggtcgtgtgtttcagttggaagattgttcctctgaagttgattctattatttttaacgatttgattagttaattaagatgtcgatttgagtcaaaaaaaaataatattcaaacaatattaaaaaaatgacatataaataacaaaaaatcagcaataaattaataagtgtataacataaaaatatatcaaataccgtatttttctgtaaataatatcataaaaattttaaaatatttaaaattccgtacaacactatttttattatttttgtgtatttgtgaaataatcatttatttttcaacttctctacggtaaaataaagaaacgagttatatacaccctacactacattaactttttttaaatggataatttgcaagaaggccattattcttttatgttttattttattttataattaaaattttttagttataaaaatatgcttgtaaaattttaaaattttaaaaaataaatttgtttagcaaaaagttaaaaaacaactaaaaattaacaataaaaaattagtcttataacacttataaataaactagaaaataatttaaaaaaataacattatgataactataaataaactataaacaaccaaaaataataatttattactgaagaaatattttataaataaaaaagtcgaagagaaaaaaaaacattccgtattgacgtatttatgtaatttttttttttcaaatttgtgatatattttttaaaatttttccttcttaaaatacatcacttattaaaatctctccttcaattttttaatatat

SEQ ID NO: 62113 - DNA, 880 bp, Cannabis sativa
ccaggattcccgaataattgtggcagcttcagcatcctttaaccacattttttcgaacccaaatcgagttttcctgtgaggagaggtctgatttgaaccatgctctataatgttgactgcaatggctcggtgatctgaggaaaagtagtccaagtgtgaagtaactaaaggttgaaaatgagatgtccatgaattattggtaaaacaacaatccaatctttctttaatagtgtccacattgtgtcttcctttaatccacgtgaaaggatctccattaaaaggtagttcattcaattgacatgaatcaagaaccgatctaaattcatccatttgatttgcacttcttaagttccctccttgcttgttatgactgtaaaggatttcattaaaatcccctataaccatccaaggaagtaatggagcaatgtctttcaatcttttaagtaaagtccaagtatgtccacggttagacagagagggggcaccataaaaggctgtaaagtgccaagaaggaccattgttgcaagccatgtaacaatcaaagacatttacattaaaattgtttaaggatacatcaacatcatctttccaaagtaacatcaaaacaccactaagaccaactctaggaacttctaaactgttattgaaatttaaaatactacgaaaacgagaaatagagttacaagctaattttgtttccataataaaaagtacagtgggggattgctctttaacaagcaaacgaagcttacgaatagctctctggttccccaaaccacgagcattccaactaatgattttcatggctgcccgcgggactgcataacagtctccgctgaaaagacttcttcacctgccgaatccatgaaatcagtggaaa

SEQ ID NO: 62114 - DNA, 1484 bp, Cannabis sativa
agtagtgtttctattggtcatgttaaacggtctgctaacaaagccgcgcactgtatggcacgtggtgcttgttattggtcaggtcgttgttttactaagagcgatgttcccattgctcttcagtctattgttttagcagatatttcagtctaataaaattcattttcattcaaaaaaaaaaaatatatatattttctttattaaaaaaataataaattagaaatatagaaaatctatatatatatatatatttctttagctaaattatctataataaacaattaatgtaataattttagttttcattgttaattttagctaaaaaataacaaaattcgtcaaaacaaaaaatttcacttcccacacttttatatgtaaagatagtttctcatatgattttaaaataatatttcttaccacacccctcttttaacatattattatgggacaccatatttttatccactcatggctaaatatagctgaatgctagcagaattgataataaacgtgacaaaatgatttaattaaaaagagtaaatacatgtttatacaataacagtagtctcgtgatccataagaaaaaaaatcgggagttgtgcaatcctacattctttggaaaaaattaagtattataattctgaaattgtgtagatataagactacacagttgaagatgacttaaatggatttattaatgctacttgtatcaacaagatgcatcttcttttcagtagcccatcatgaaaccactctaatattaagcgcgcttgaactaagataatttcagaatgagtgacctcttgagaagttttcttaagaaacgagcgaatgaggacaaaacacgctaaaaaaatatcgaagagatgtgtttgggttaccataaaaagtgctacttctgcaataagatcatcatatgtgaaatgaaaatgtttgttagtgaaaactttttactctaagcttgaaatttgataagaacttgctgccaattactcaaattaatagcaaaatctccaaacagaagctagaaatcgtagtagcaatagaacagtagcgatggaatagaaagaaagtgtagtgaactgttgttggaatatagcaaatgtaggcagattatgagacaaaatctcttacaatggtggagagccagagctctccatgatgcagagagactttaatctttggatacagattcttttctataactcagttatttatactattctattctccactaaataaatatcttaatacaatgacaattatacccttccctaccaaccatgatgtttcccattaccggtcgcccaactttcaccttgtcctcaaggtgaaggacaatagcgcatacgcgttgttgaagtgcacatggtagaagagggcagagtgagtaagcttcttatctaattatggtcgtcgagtctttgtactcgaaagtcagtcttcttcccaccaaaaaatgacagtacatcgttcaacactag

SEQ ID NO: 62115 - DNA, 1093 bp, Cannabis sativa
  modified_base (59)..(73): a, c, t, g, unknown or other
atgtgtttctttcattgttttagagaattcatattttggatgttaatcaacatacttgnnnnnnnnnnnnnnncctggtaaaatattcccaacagtaggctacataaagttttaaccatttccttgcgagcaaaatcaagtacaggtcgagccggtctatctgcgataaaataaaaacaggcattagcgactatacaaggtaataaaaatatatattaagtgtgaggatacatgacgtactaggttgacgattgaactcagtcctaacttttggtactttaaacgcatagaaccatttgaatttccaatcttccatattggaaaccgtaccttctaccccgttaattttggagttagcccatttactaaaaaaataaaagtcgttgtcatggccaacactctttatgttgtagaaatagcttaagtcctccattgttggttccctttaaacatactccatgtacatcgcatagaaccctagtattatgcgataattgtttggagttagttggaagggcgagacatcataatgtctgcggatggccttcacaaaggagtgaaaaggcagtgtcacccagcatcgcaagatgggaattgaaaccactacatctgttgtaaggatgatcttaaggtccctatggaaattaaattcaaccatacaaaggtgtgcaggtatgattttgtaactcacgagaccagatcctcgcaagaaaatggttcattcaattgggtgttgtcaactgaatctttctcacttccattagcattcccctcttcctcgaaatcacgattaggcatctcaaagtcccctcccatctcttcaacctcaacgtcaggggcatgtcccgaatgaatgaggtagtcatgggctgacaccgtggacttgctattgcgtatttcaaccgtcactggttcagtgagctcttgaaccattctatctatcttgctagtacatagcgagccttgacagatccgggcatcatggcattcatcctcagatattgaggtgggtatgaagttatggcttccttctagctcatcagcgaatgcccctcctctaaaatagagcatctggctatccaataagtcgctc

SEQ ID NO: 62116 - DNA, 563 bp, Cannabis sativa
  modified_base (50)..(56): a, c, t, g, unknown or other
tttttgaaaaataaaaatatgttcaataactacttttgttttttaatttnnnnnnnaaaaaataaaagtgtgttatgtaatttttttttttaaaattttatttaagtcagatttgggtctggggtcgtgttggggttggccgctagggtttgagatttgggtttgagtctgggatccaggtgcagatttgggttcgggttcgagatctggttccaagtctaggccgaggtcggtgattgggtctgaatccatgtgtcaaagtcaaaattgaagtcggagttcaaaatattgcttaaaaaaattatttaaaaataattgaaagttacttttttctgtttttcaaaattttatttctaaattataaaattaaaaagtaaaacatttttataaaatatgtttttacttttttaattaaaaaaataaaaaagtgtaatcacacttactattttttatgtccattttttttttgaaatggtgaaatatatagagtttaggtgaactattaatgtgtatctatttgttttttttaaaaagaaaattgtgtatctatatataaacatgga

SEQ ID NO: 62117 - DNA, 656 bp, Cannabis sativa
tatgatccccttgatatctttatacttcaaggtctgccacaacaaacccttaggtaattgttcattagttttattttttattatatttcttatgctttttattaattgcttaatctttttatatatactttttttttgtcttttattgattccttgttttttgtttattgcggtgattgtggtatatttattatcaagtactctgaatactttgcccatggtttgattgaatatattccaaatcctttggatgtgaagtttgtacggaataaagtttgtgtggagttgtttgtgcatggtatgacaaaataagtaaatggatacatatcttccactaaacattctgggaggacaccagttaaggatgatgatgcagatgagtagatcttgatagtagtgctcttttaggaacgttttgtatgtaatggttccaaaccttttacatgtaattgattaagtaacaaacatttttttgttacatcttttgtgataggcaaactcgttagagtttgtaatgttttagaagattatggatacgtaaaggtactatctggcttggagttttttgataagcatactctttagagtttgttatcttttggaaagtttatggtttttctgtataagttctttcttgttggaggttgttgaaaaac

SEQ ID NO: 62118 - DNA, 942 bp, Cannabis sativa
aaatagtacacggtggcactcttccacaactgccacgtattaagcatgcagaaatacaaataacaatattatataatgatattaacttctttgtatatataaatatataatatttttgtataaatcaaaatttaatattatattatataaaaatataatatataatataatactatataatacaaataccatctaatatgatacatcaaactaacacttcatatattacttgtgtacttttttttttttttttaatttttaccatttatttcgtaaatgtattttttaagagtcatctagtaaaccttaagagaggagagaagaaaagagtcatttaagtaatcaaataagatttaagctgtttttcaaaataatagtaataagatttaagttgaggtcattataataaattcgttaatgctattaatagtttggtcatgagttgtcaaaagaaattgtagtactttttttagagggtttctgataaaacatttgaaaatgacatgaacaagtcttgttcgttgtcactaggccaccaaagtaattttagcttgatgttctcacactttctctataaagaaagacttgtttgcatgtgaaatattgtacattaattttagcttttagcttacacatttttcttcatttaaattaatcacaacttaattatatcgacaaaatatcatattcagttgattagggtaagtagaatctttataatgcaatttacccaattgcccactataactacaccaacttaaatgttcacaacttgacacctttgtaagaagggactacctatttttcatacttattagtaatgccaaatttaacaggaaacttacaaaaatactgaaatttgaattaactttcaaaaatactgtatttttataaaaacactagtagaacacaaaacataacaactcaaaacaatagtagaac

SEQ ID NO: 62119 - DNA, 1676 bp, Cannabis sativa
attggaatgaagttcagcttgaaaccgattgccttcttgttttcattcagttcgtatattcaccgcaagtaatgctccggtggatcttttgaatattgtaatggttgatgcaatttgctaataaaatgtcaccattttatcttcaaaaaaataaaaaaaataaatttataaatttgtaaaaggagattttatttgcaccttctaaaattttataaaagtacttaattttaataatctttaatttatataaaatatacatatttaatttacactaatattttttaatttttttcctttcttttcatatatattcttaaaaaatgtatatataaaataataatcgtacacgcgtcacccatccgattaactttgtgaccgagtaagtccacgtgcgactaagaagatctcactcggacttgggggcaaatattatccaaatttctacacggtgatgtggcatccatcttggtgacacatagaatacatttcataacttagacgggcaattctactcttaatgagtcgtacatggagatttgacactcaaggtcataaacaggaattgtaacatcagagcagagtatgtgaagacatctgaccagcttctgtcaagcaggtggctcatatgcaccggctaggggatacgagttgtgaaaatttcatagataaatcctatatatcttcatgcttgcaagacacggtactatccctaaactcatgggatagatttgaagtattgaaaaataaaggaaacatgcctaagtttcctattctactaattgttactataaaaagtagatagaattctgattttattccttgttaattttgagaaattaatatgatgtaattaatccctataaatagtggactcatctcactattcaaggatggaaaattcatttagagaaaacactctagaaagaaatctagatttaagagtgaaatactcagagatcattgtaatagatttcaaaagatttcaaggcattcttattcattttctcacaagtcaatacaactaaagaggagtatgctattaccatcaataaggggtcgaacctttataaatctaaaattttctttaatttatattatctatatacgtcatttcaattatccataaattgctttaatttgactcactgtcgttggctaaaaatgaggtcaacattgtacttagaccactaggaattattcacccttaaattatcacacagagatcctaccatgtctgccaagtgattaattttttctgcaagtgatagtgtattctcctcaacctgaaatggttgtggtgaatttgggtaataaggatggtattggtgactccaacgctgaagtgatggatcacagtgccagtcgtaatcaagatctgccatgtcattcaacaaattcatttcatcatggcttctccttaataaaggctctctagttacatttgctccataatccacccaacttcttatttcatcatcaagtccattataaaagaatagagtaaaacacccacttgagaaattgggataacatctctctccaagatccttaaatctcccccaagcatgatagaatggctcattgtgttgttgggaaaaattcacaaggtactgatcttgatataacatttatatcgatcttgcaagtcaagaacattcagtaaaaaattagtaaaa

SEQ ID NO: 62120 - DNA, 813 bp, Cannabis sativa
tatttgttttaatctacattattataagatttagtacaagtttgataaaacaatattagtaatttcaatatttcaagtctcctaccctaattcttattattgctactcttattaatgtgcccatgtgataggatccaaaacttacatgcatttaaaagtatttttttggcataattaaattaagaaagtcaaataagaattaagaagaattttgaggttaatgaaagagaaagagatagtgtataacataacatatacattaattaaattaagtacaacataatagcagcaaaagataaaaaaataactcagcttaatgaacatatatgtcaaccatcaaaataaatactcaaattgaatctaaagattagaattttggaacccaatgaaaagaggcaaaactagcaaagcatattggaaaataataataaaaataaataaaaaaactctcttaactatcatttcatttgtatttaatcttgtaagcttaaattttggtgtaaaaattttcaaactagtgaattgttagtaaatttaaggtgtcttctattttttcacagttaattgctaacatatactacttatgtatacacttttatacatgtgacatgtttatattggtacacctaatattattattttaaaatttatgatatattttttttaattatttgattttttacttttataattttatttaattttaaaataaattttgaaaaataatattaggtgcactaatataaacgtgacgcacataagtagtccatggtgacaattaaccgaatgatattttaaatttgttaacagttc

SEQ ID NO: 62121 - DNA, 735 bp, Cannabis sativa
ttgactacaacaaaattaccctatctaggtcatattaatgtgtcttctcttatgagagtattattgtatgagttctatgtgattatttgtttactgtttaagactgttcatttttgtcctatggctttccatgatcgaggcactatagggattgaggaaaggtaggagggttttgccatggaggacgaagaggaagcattcttgcaatatgaaaagaactatctgttattgatgaggaatggtatttggttggatgatttctcatgaatcggacatttaatttttttcaagttatgcaacataaaatgacatcttcgtggcaactagggcacaggctgtatgtgaaagaattgaatcataaccatttcttatttcaattttatcatgacattaatattactagggtggcagaagatagtccacggacgtttgatcgccttcctttgatctttgagcgagtcaaacaaggaaataatacccatttgatcgagttgaatttgctattgcatgagatgaaagtgggttttatgtaaataaaaaaaaagtagttcaagacattgcaaactatataggaacctttatcgaaaaagacctaaagaattttataggagtgtggggagactatcttcgtgttcgagtttcagttcaagttgatcaacctttaaagcggaaaatgaagttggaaaggaaagatggtttgttctgtacgacataatttaaatatgaagatctccc

SEQ ID NO: 62122 - DNA, 887 bp, Cannabis sativa
ttaatgtattttttattaagttttcttttaaaatttaagtattttttaatttttcagctgcataaataattaaaaatttttaatataaatattttttttattaattgataaagttaaaaggacatttttaaccatcctaatattacaaaaggcgtttaagtaaagtgacagaatttaaggagaaaataattttatttttaacacaaatttttatttttactaactgataaaattaaaagagcatttttgatacggcaaatatcattttgaaccttgtgttttacaaaagttaccgaatggaccatgtgttttgttaaatgacaaaatgaaccctgtattttacaaaatagtaaaaataggaccctgagcttaatttttgataattttttttaatataaccaacttgaagacaattcctagtacgaacatatccagaaaatgtgaatagttttgtcataacactttaagatcggattataattaaattttattttgataaaaaatcaattcagaattctatttataccattttaaaaaatacatagtctattttatcatttaataaaacagaaaatcttattagtaatttttacaaaacacatagtataaaatagtatttaccttttttgataacacaaatattacagggtaaactagtttttattttatattttcttaacatgtgagagtgtatagtgtaattataaaaaacttcccataaacttgttatatttttagagataatttaattaagatgttaaaattagaattcaaacaatttgttatactcaccttaaataatgtaagcgtacaaaacaaaattatgagttttaccttctaaattatctcgaatttaatatcaatttttttatatataaataccctat

SEQ ID NO: 62123 - DNA, 850 bp, Cannabis sativa
  modified_base (431)..(433): a, c, t, g, unknown or other
caactcaattgaaaatttaaatatctttctttttaaatagagaaattaattataatctttttaagtttaaacaataattaatataataataataaaaaaaagagtattgctattaggcactttatgctacccaacactattttttttttattatttattaaattaaaaaatgcaagacatgatattaatttataccaatatagcaatgttccttaacttttctcatataaaaattactcattgtcaataagaatctctcctctattgccaacgcttctcttataaaagaaaaataaaaataaaaaaaaattagaaatagtgttttcattttatttttaatttataacttttctctaaaattattttgggtaaatatgattttggaccccgtgttttgtaaaaattatcaattagactctctgttttgttannngacaaaatggaccctgtattttttaaaatggtacaaataggaccctgaattaattttttgtcaaaataaaatttaataataattcgatctacatgtattatgacaaaattgtttacattttctgtatctgtttgtgttagaaattgtcttcaagttagttatattaaaaaaaagttgtcaaaaattaagctcaatgttctatttttactattttggaaaatataggttctattttgtcatttaacaagagggtccaattaataacttttgcaaaacacaaagtccaaaatagtatttactcattattttagataaacttagataattctaaacttacatggctacttctaattagtcagtaacttataaaatcagttcaaccgaccatttaagaaaactatataattcgtgctgctg

SEQ ID NO: 62124 - DNA, 922 bp, Cannabis sativa
gatttggagcaccggtgacaaatgtgacagcaggggaatccctgtgagaaagatgtcgtcatgaccgtgccctataacagttggaagcacctgagatttccaagacaagaagttagatcaatcaagtttgattgttaatgttgaagaaagagagtgagaaaatgattccaggaggaattctacggattcatgtggtcgtcggttgcctgagtaaggactggggaagccatgggagcttgaaaaggatcagtggacgtacactccattgaagacgtaggtcaaggcgactgataccacgtagtacaatagagttgcagagaaagaaaaagaatgcagaaacaaaaagaaaaatatgaacaactcactttattgaattgaaagagattagtatttatacaagtgaaatagactcaagaaaagccaaaacaaaaaagctaaaataacagagcagttagttgagaagacacctcaactaacttttaacgactttaacagaacttagttatctattacaccatatgattacaagagacaagctaggcatatgcatattatacattgtccactagattcttagctcctgatatctatcatggagaaacattctaaaccaggaagttgaacttgagaaccaccctaatgctaatattgagactcatattcactttctatacatgtcttaataatgtctgcccctacaggtgagcgcacatatgtgtacttaataagatgatacaaatgttaggatttataaaacactcaagaaatataaatatcacagatcgaaaacatattcctaaaagtactttaatgtagaaaaccctaaattagaaatttatagaacctttgctaaattaaagaagaagatgatgataaaagatgagcgaaagcactaagctgaagccattgttggagattgcag

SEQ ID NO: 62125 - DNA, 610 bp, Cannabis sativa
cttcagcaagttaagttggttcgttcgtttaataatgctgatgttaaaaaatctgtcaccctattgcttaggcacgctacagtaactttctaattactgtgcaaacctttactaatcaaaggatttctctaaaatcgtgccaaatttgaactttttaattaaactttaaacttttgcaaacatatatatatctgtacggaaaggtgagatcccatttttaaaattacattcatattcaaaatatattttataaccatatcgcactgcgactacaaaataaagcccaagttgtcctaagaccgaacactctagggctaaccatcttgacatgtacaatcatcccctagctctggactcactggtactcagccttagcctttcatttacctacacatgtaaataaaatatgtgaatcgacagactcagtaaaaaatcatataacacataacatattaccgacttgtatttaggcactcatacacctatctacaaggcttaacagatgatcaagaacattcttaataaaaatacgacctctgtaccacatgcacttagtacttgtcccgtactattgtttgtagggacgaatagtactttgagtaccactgac

SEQ ID NO: 62126 - DNA, 844 bp, Cannabis sativa
gaacctctaaacacaaagaacccacacttttaatttatgctaggcttgagtctaattgacataaaccgagaaaacataaatttctctaattccaaaactgttgcagtgaaaacagagaacgttcgcccaaaaattctaaaaggagaaaatccaaaattgaagataacgaactcaataaacgagaaatagagagagaaagagagagccctaacctttcttagattgaagagaaatcagagaaatacttccaaccaacaggatcgaagacaagagatttcactgacccattgtttagggattttgatttaggtctgggcgtttagggctttcctttttcacggggtcgaagagaagagaattagcgcctttttcatttttacacttctaaatatatatatatttttttttttgcattttttacgaaattctatatagaaacccctattgcaactagcactgtaacctaaattgcaacaaaaaatcgtacagaaacccctattgcaactagcactgtaaatttgaaaaaaaaaagttaaaaaaaatagcatatgaggtaattcttttttttttaactaatgtctaaaccggggcgggtcagccctggtccaaaatgaaaagtgtcaggttaggtcggggcagcgacctggataagtccccgctttcacacgggttagaggttgtttcttcgagaaaggacccgacccaacctacgaaaaagacccaatttaccatccttagtaacctgaaaagccaaaaccctaacggagttcctcctcttcgattctcgattagttggttgatagtatttttagcatactgctgatgattacggtgtcaaaaccga

SEQ ID NO: 62127 - DNA, 620 bp, Cannabis sativa
  modified_base (38)..(46): a, c, t, g, unknown or other
catatttagggtgttaaaaaacatacttgtgagtagannnnnnnnnctggtaaaataaattctaacacacatagcagacaatggaaggttgccaaaacaatacctcatcctctatatcctctaatgtaattttcacctttgctttttgttcctcactcttaaaagacctatccagattcttcatcactgaaccagatcgaagaacagggggaatggaggacttaccatgcttaacgtcactgttacattgctcattcacccgtaagaagtgtgcaaagtcacttcgaatctcatcttgcctctgaatctcctttaatgaagctcccggggatagaggaggttaaagatcaagaccagagtctttgtcgaacatctcttcctccgaaatctccaaatccagaatttcatccttctcagcaatcgaacattctagcacctcatcagtttcaacacgtccagctttcttcttccctctcttgctagcagatcgagactttccttgaattccagatctcgttttcgccatagccccagcttctcagctgcgagagcaagaacacgagaaaatctcttaaatttaataaaattagatgtaccttatgatagatttaattaaacaa

SEQ ID NO: 62128 - DNA, 748 bp, Cannabis sativa
ctaggatttcaccggcctcaaacagaggttggccatgttcattaaagccaccaaagggcaacctctaagctgcaccttccttctcagcttcagaagaagtatcaagactaacctcgccctaatcctccaactcttggacttcaacgtccccctcaatgtcttcctcttcagtagcaggctgagcttgttctgtactcagcattgtagcgagccaagctacatgtgggttagaaagagaagacttccgcatagtctatttggttcatgccatcattttattcctagacagagtctggtgggtatgtttgacaataaatatggcaaaagtagtaatgggtgtaccggtagcagtaggatttggacggcctactggcaaagtatcaactgtattttggttggacaatatatgtccaattggacgatagatatagtctctatcttttattactcttctaggaagaatgaagatttgactccaatatgcatggatagtcaacaatactgaatcgattaggacaattcttccagcaaaggataaattccttgagctccacactctgaatctagctgtcatcttctcaactaggatattgcactcagtagcttatattctcttggcacagatagggatgccaagatacttaaaaggtatatcattcctttgaaaaccagaaacatcaacaacccttctgatctcatcctccttcatgcaactgtaatagattgtagttttactgctgtttggatg

SEQ ID NO: 62129 - DNA, 1827 bp, Cannabis sativa
  modified_base (92)..(95): a, c, t, g, unknown or other
  modified_base (731)..(736): a, c, t, g, unknown or other
aactcaatataatacaatacaatacaatacgacctaatacaacgttccaaacgaactcataatgaataagagaatatataatatatatatannnntatatatatatttatatatgagatgagatagttcagctcacttaaaccacacccaatatcccaccatatataatatcccttatgcttcataaagtaacaatatatatgatatgggtttgatgtgtatatatgttcacactaatacatacatatatatagaactacatacacttatatagatagtgaccaaaccagtcctacatacacacatagatattaatgatagggagccctaaaataatattatcaactgaaaaattatatacgtacaagacataataatttatttcaactaatcacacatattgcatttattaatttgaataggtttgaaagtaattgtataattagcaagtaatataattattagataataattatactttaatacgtaatgtaatgtgtatttaaatatacattgaataattacatatgaatttttattttcatgtttggcttagcacttgaacgatttaatattaatttttttaaaatggtaatggttggtaattacactctaattctcatgagagccacaagaatctcgtggaagagtgtaattgaaaatttttaattatttttaggttgcgtttggtatttagtaatacttttgtttttaaattttttaatcacaannnnnnaagtaaaatttttatttttaaaattttaattttaattttaaaaaacaaaaatgtgttctaaaaccacttttgtttttcaattttaaaaaaaaaataaaataaaagtgtgttctataaattttattttcatttttatttgttaattttatttaagtcgggtctggagccgaatccaaggtcgggaccgagggcaaggccaagttcaaggccagggtcgaattcagttttcaaggtctaaattagggtcggtatctaaaatattgattaaaaaaatctctttacaaaaaaaattaaaaagatttttttaaaaaaattaaattcttaattaaaaagttgaaaactaaaaataattttatagaacatgattttggaaaatattttcacttttttaattttaaaagtaaaaaactgtttaaaaaagtattaccaaacacactcttaattactatgtaatttttaattaaataaatatgtcaaattttataattattatggttaaggagagattgaattttaattagataataacgtaccaaacgtgacctgaggtgaatatggtgccaacagatactatacaccataactaataaatttaaattaaattttacaccaatcactaattattattacaccatttgatattacataaaatatcttaaatgaacactcatattttttatttagccaatgccaacctcttctttcactttaattatcacgcttgctttgcttctattatagatgcaatactatactccatacattaaaaaagaaaacatatataaaatgtaaataaatgaattctcttccctatacatatttatcaataataaattaatagaatgagaattaatttataacatctagggttgttatatgacacaaaaagagagaggaatcactctattattctttttaacttttttttatgattttttttttataatttagtgtgctgcgtaaatagcgctagcgatttgaatttagttgtaatttaaattatttcgtaaaatgcactgtatatatattttgtataaatgaaaaaaaaaacctcatataataataaatttttacatgttttattataaatt

SEQ ID NO: 62130 - DNA, 726 bp, Cannabis sativa
  modified_base (112)..(112): a, c, t, g, unknown or other
ctaccgatcttggattgcaaatcccgtattggtacccaagccgaacaagaaacgacgagtgtgtattgatttcacggacctcaacaaagcatgccccaaagactgttttccncttccaagaatcgatcagctcgtggatgcaacagcagggcatgaaatattaaccacacttttcaccactttcttctgatttcccatcttcaagcctagaagagacatataatactttttttttaaaaaaaaaaagcaccattcacaacatgaatcaaatccacccatacaccattctcatcttgaattgaataaaatgtattttacgttctttattgcttaaaagtttggtgaaaaattctaatattctcatctctatccttaagccaaaaaaatttagatttctgctaaaggaaagaaaagagatctaatcagcatctgttatagacctccctagcatctttttcttctttaattaaagagccattcatcagttttttgatgcatcttttccttatagtcattcatttgattaagtgcttgatgttcccgagcatgaacatcaccaaaagccccttattaatgtctttaaagacatgcttcaactgtttcaacttcatgttaggttataattagcctatgttacgggtctaatatgtaagcattttctcggttattgatgtcttttggagcggttttacgcttgattttccttgtttcaggttcctggggtat

SEQ ID NO: 62131 - DNA, 512 bp, Cannabis sativa
tccaatatcacatgcttttaggttgcagagcatgtaatctcggttcttgaggagtttaacagcaagaaacctgcaatgcctctgttgatttcttttgatgcagaggaagtcaggaagcaagctgcagcatcgacaaaaagatttgaggaaggtattttggatcatattatttttgcttgaacaatttctgtttctgcttcagttacatctcccgaagaacattttgagtcatattttatttgattgaggccagggattcttaccaacagaggtgtatagacaaatcttaaaagggaaacaaaatccagttatagtaacctatgcctaaagcaattagtaaaaacttttttcatggaagaattttatttttcttttttaaatgtctcgccgaagatttggttggctatatccattaataagttaagagacaccttttgattttggttgtgcaggcaatccattatctatcttggatggaatttttatggcagttaaggatgatatagactgtt

SEQ ID NO: 62132 - DNA, 782 bp, Cannabis sativa
atgattattgtatgaagtgtggaattaatgaaacatatatgtactctataactataggatcgaaatacctcaagctatttaatctttgagcttcaatctcacacaagttttgatatgcaaaggaaactaattattgtaggtaatctggcttccaagctctatctactctctttagatagatttactgtaattagaatattttaattaattagtaaataattaattatattttataaatcaaataaaatatttaatttgttaccatataaaaattattctaatagtacacatacttaattattatatattattattgtggtctctaatatatacaaatagatcttgagtttattattaatttttctaacatagacattaattaaactttagttgcaagacagccactaaaagcacgccataaaaattaatgaacttttaaagaaatttgcaaaccccaagcaattttctacaaaaacacctcattattacttaaaaaagaccatcatttttatgtaaaaacttataagcttccttaacagaaaaaggccaatgaatatcaaatgatcaataccaaccatatcttcagcaacaaaagagctaagataaatgttaaagatgagttcttaatctctctcattaaataaatatgtaatgattttggaatcccaagttcttgagtctaccaccttaagatcagaaattgaacaattatcaagaccaattaacgaaatggtaacaaaaggaaaagaggcatcagtaagccatggattcctaagaacatt

SEQ ID NO: 62133 - DNA, 834 bp, Cannabis sativa
agaaggaaaggagttaaacaatcaccaacaaatattttttttttttgaaaataatgaatatatcattgaacaaaaacagtatgtttgattacaataacgaaaaaacctacgaattccagagcaaataaagaaagttgtctaaccacacaagttgtttattccttcgaaaggcatgtacagttaatccatgcgcagccacattggctgttcgacgaacatgaattaggaatacccttgaaaatttagacaacaaacttaccaaatcaaccaacaaaaatccaaaaccattaaaaaatattgcctcttattaaaaaatattaatacactagattccaacaaaacgttgcactgaacgtgtttgaacaagagtagtgcataagaaaggaatgtgtccattggatcctttaccaaaaggaatgtcatctactcaattaagtgattgttgtccgtagtgaaaacttaccatcagatggtagacctaatatttcgccaattacttcactttttttttcatgttaaatttaaagacacgggtagcaaatcttgagagaccaatctaagatttcatttataattactttgtaaaagtttgatctcgtacatgcaaggtgaaaagattaatatcattttggctgttaatcatattttgagtgaattaaactagagaacttttggcagttcttttccctttgaatgtaaaagttaaaacaacttttgtaaattatacattatgggaccaaccatcaaaacgtttcttcgtcttaattatgcttgttcaatttggatctaccatacaaaagaaaatattcgtcacttggcatacgtgatacccac

SEQ ID NO: 62134 - DNA, 692 bp, Cannabis sativa
aaagaacaagttttatagctctctagagcaacactttggtaaaattttcttaccattagttgtttatatagacatggtttatagtagcaattagatgaggtgtaggagaggagagaacctaacccttttagatattatcaacatacattctttctttgcctaaaaataatatatattatgtaagattcatcctatacttgtgtagacacaaaaatctatattgaacaatcatcacaacatgtaagccaattaaatatttataacaagaaagagtttgtatatactacatatatacagatgagagccaagaaaagtatgtaactagtcaagcttacgatccaacaaggcaacggtttttcaaaaaaattggtaatagtagagcccaaatgagaatagctaacacaagattattacaggcacaatctgaaacataagaaactaaatgtagtttgctcctcaatttgatgggttggattgtttttagacctttgttgcttgatttattgataattttatatcatgtatagtgtttaatattaggaacatctatatgtgtgtataactatatgtaatttttctaagatttatcattagagatagatattaaactttaatatgtgtaattatgctattattcaactctctatacttaattttttttataaagaaactctctatacttaatttgaatt

SEQ ID NO: 62135 - DNA, 883 bp, Cannabis sativa
gtcttaattattgtctgcttgggcgacccgctgatttagatcaaccttgacgtacttttgcaagtgcgggttattctttctaattgagaattcaatttctcgcttcaggttgtttcactcattcgtgttgtgcccatagtctccatgaaaatggcaaaacttagacgtgtctcgcttacttacgtccttcttcatgggagtagatttttttgtatgcgaccatagactaggttgccatatagatcgtctctacatcatcagttaggacagagaaggcagtgaatttggaggtattttctctaggggtgtgttcggctttacctgtgaactttcccttcttcccattgccttgcctgccattgttattggaccttttgatgctcaaatttgagttgctaggatattgtgggctctgagcaagtgctcatgctgagggcacctgtggttggcccagccgaggttcgacatctactcgttgaatggcctctttgagcttgataaacccatctgctcggtctagaaattctgccatagatcctacgaggccactctttttaatatccttccacagttctcggagtacctcgatgcctcccagtatggcagccagtctcccctctttagttaatcttgctacttttgtatcttctatcatgaacctacttatgtaggctctaaggggctctcctggtctttgtttcacttcgaccaggtcttctaaatgtaatgggagttggcaagaagaggagaactacacatggaactctgaggaaaaagctttccattaatttaatcttcctagtggtaacttgaaataccactattgtacggcttctgaaagtatggtagggaataccctacaccgcacatcaccccgtacccc

SEQ ID NO: 62136 - DNA, 997 bp, Cannabis sativa
ggtcgaccgattctcgcagactagatttccttgggttctctccttcaaattcgacccaaaacttcaccaaagctaatcaaactttccagaacagtataataacataaatataacatatcccaagcttcaagttacagtagttcaatctctaactcaaaatcatatgctcaagtgaaggaaactcaattcccttagcttcctcactcacaaaacaatcccaacagccatgaaatcaattaaaacatacacaaacaaacctaattcaactaagatatcatacacagacctcatctaagcctacaaccctgaaaacttacaaaaactaataaaacctagctttagaaacctaggaattcactaaaaacataaggaggaacttacctcaagattctaggttggcttggggattaggtccagctctgaaatgggaggtttcctgaagaaaagaagtccccaagtggctggttcaaatttgcacgagagagagaaggaaaggaatggaataatgaggttacttagcttccaagtcacttatatagtaaaagttctcatctttttttctttcttttcttttctgaaaatcatagcccctaaaataacaataaaaggaataaaagaatgtttatttaaagaataattaaattaccctcaaagctaaataatctgtaaaataacctaggggcattttggtaattttactaatctatgaaaccgacattctaaaattctaaactagtctagaatatccccaaaataattcttccatcaatgtcgtgacatttctaaccaaaatcaccgggcctgatattttatttagaaaaataatggtatcgtcgatacccacatatctcaatataatctccgtaattaataaatcacgctttatttgtcattatacaaattctcagtagttgccctaagtaagatcacaatcttacttcgtgaccaaaataattatatatttaataaaatatgtctatttaaatattatttattt

SEQ ID NO: 62137 - DNA, 1027 bp, Cannabis sativa
gtgtaatccagataataattaagtttattaagatgtgtttagattattcaacatggctgaaagtacgacctaaagaattaggcatgggtactattgaaaatatattattattattattattattattattatagaatttgatcttattttattaattgctcgtgtaggtacttatcatatttaattaaaaaaataaattgaatttttacttctcaactttaacaacctccaaactattagaggttgtttggctttacattttaaaaactgttttgtgttttttaaaactgaaaaatagtttttaaaaattattaggagtcgttcggcaaaaatttttaaaaaatgttttttaaaaattgagttttaaaaaactagaaaatagaaaacattaaaatgttgttttcaattttcaaacacaattttttttgtctaacatattatattttatattttgctcacatactcggatcctaaacccgaaaccatacccgaacctagacccggatggattaatgtcatggtatggtgctaaaatattgattttttttttaagaaaaaatctaaaaacagtttttaaaaatttgtgccaaacaccattaaatttttaaaatgataaaaaactgttttttattctcacttaagctccaagtttctcgaataacttgggattttgtttttactcttgctcttatcaataaactacatttctttcaagattaattgtgcacaagtgtgtatcacaatgcgaaaatgatggtgaagattctaaaatgaacaatgatgctaaattgtgtttctgatgatatgcttctctttgattgttattcttatcatatcatcaccatcatcatctatcattcaaattgaaaaattgaatttgattttgaacagctctatcatgtgcacaactatgaaatggccacaatttgctttgaaaaagctcatgacacactttggcaaaggaaatctaaagttgctggcattcaagctatggctaaccaaatggatacttccaatcctgaagtaa

SEQ ID NO: 62138 - DNA, 2036 bp, Cannabis sativa
ttttctcactaaattcacttatggtatttttttctcaagatcatgatttggtcacagagcatccagtttcaggtgtcattgactattctaaactatctccaaagtttcatgctcttatcctggctatatctactctacaagacccaattttttttttccaggctcatggcattgttgtgtgggattcagccatggacaatgaacttgaggctcttgaagccaataacacttggaccattgtgaggcttcctttgcatcatcatgtgattggatgcaaatgggttcacaaaatcaagttcaatactaatggatttgttgaaaagtttaaaggaagactagttacaaaaggatacaatcaacaagaaggggtggactattctgaaacttttgcaccagctgctaagtttgttattgtgaaactagtgcttgctcttgctgctgtaaaagggtgcttgatgctaataatactttttggcatggtgatttacatgaggatgtgtatatgaatatacctcaagggtatagtcctatgggggagttaccaccctatggagtgtgcaaattaaacaaattactatatgatttaaaacaagcttctcaacaatggtttaagaagttttatacagccttagaccatgaaggatttcaccattttgcaactgatcattccctattcattaagcattttggtgataggtttattattcttcttgtgcatgttgatgatgttattttggtgagcaatcatgcacaagaactagaagcattgaaggttagactgaacaacaagttcaagctaaaagaccttggggaattaaagtatttccttgcattggaaatagcaagatataaacaaggcatttttgtttctcaaagagggtatgctcttcagctcctagaacatttgggttacttagggagtaaaccagtaagtactcccatggaagctaatctcaaaccatctcaagatagcaaaggaggactggctgacaccacactatacataaaaatggttggtaagcttcaatacctaaccattacaagacatgatctatccttttctgttaacaagcttgcttaatttctagctgttccaaaggttagtcacatgacaacaactcaaagattattacagtatgtcaaagctaccgctagacagggtattatgctgtcattaacaacagagattaagcttgaagcctatgctgactctgattgggctgcatgacccgatacaagaaggtctactacaggtttttgtattttccttgggacttctatagtgtcttggaaaagcaagaaacaacataccatattaaggtcatctgtagaggcagggtaccgagctatggctaatgctacctgttaaatagtgtggcttttgtctatactaaagaagttatagattgatcataaagggccagcagttctatattatgacaacaaagttgcacaacatattgtagcaaatcctgtataccacaagaggacaaaacgcatcgaaagagattgtcacattgtgcgtgaaaagatacaagaagggattatccgaacagtacatgtttctagtaaagattagataaccgccattctaaccaagctcttacttcctacacagttcaaactactcaaagacaagatgggactccttgacattcatgctccatcttgagggggagtatcaatacaagaaaagttgagttagtaaggagtgtgtcttgtccttgttagttagttagaagtgtttgttattttcagttggttgtaactgaattctgttacttcatcttatcagctctgctaatatagataagtgtattcccttcatttgataatgagaaaaacacttttcttcttctagttttcctctctctgttttctattttgtttgtaatattgttccgtcagctggaaaaaaattaagaaaaaagattttcttgaccaataaaagataaaaaaaatttgagtttgacttaaatattttgtatctagatatatttttgtgatagtgtaaaatatttttttaattaagtagc

SEQ ID NO: 62139 - DNA, 808 bp, Cannabis sativa
ttttgatttttgattttgtaaaataaagacaatctatggataaaggtatccaatttatttgtttgcggaatgagagtattttttgaatgagaacattcattttaattttgtggcattctatagatgagtagagaaaaaaaaaatgaatacaaaggaaaagaaaataatatattacatgtatacttacccttacttttaacaaatgaaagaacaacaacaatagctttttctttctctctatccctttttctcctttcttcttttggtctgattttttttttcattataaactccaatttttttttacatgaaaaataatgagaatggaaagtggttatctcagatacacaaaattcttttttgccaaatcgtttgatcacagacaatgtccttgttgcctttgagctgatcaataccatcaaaaacaaaacagcaagccgaaaaggaattgcttctttaaagttagatatgagcaatgctttcgattgcgttgaatgacatttcattgaaaaagtcatgcaaaaaatgagtttcaatgatagaaggatatctcatattatgggttgcttgactacgaacaattgctcatttctcttgaatggagaggtcacaggctcataattccaactagaggtattcgacagggttgcccattatctccatacttatttcttatttgctcagaaggattatcaagaatgttgcagctagaatagaataatggtcatctaagtgggttcaaacttactagacatgctccaccgattttccatctatttttttgctgataatagtcttcttttctatc

SEQ ID NO: 62140 - DNA, 1830 bp, Cannabis sativa
tgtagtatatatgtaataaagttagccttttgtatttttagtgtaaaaattatttaaattatcgaaaataaatataaaatttttcaacacgcttattaaattaaaatatcaaaaattctgtttttgatactataaattattcaaaatttaaaaatagtgaatattaaaacacccaatgcataaccggtccaatctgttgttgagttcattttttcaagtcgagtttgtaagggtgttggttgcatcgatgcgtggatgacattaacattttgctctctccttgcgttcatcccaactgaaatgacaagcatcaaagcaaaaccatcaacaactttagtaccagaaaacaagaagatatcatcatttactgaatccaattccacatgctcatcctgttcttcggagcagctacctttgttgtccctctccaattttaaagaatgggacattattagcaaaccatttgctggaactttatccccataatttaaacaaacaacatctccaactacaatgtcaacaatagtaactttctgacgaattccacctctcacaacttcaatattgattttataactatcatctagtaacttttgaaacactttggcatgccaataatcactagtggcaacaaatataatagccataaaaactccgacaataatacttacaccatctttcaaaccttctttcggcccatctactttaatgcctaaaccaagagagactgcgccacaaattatgagaacaaggattttgacttgtagcaaggctcgccaaaaaaagaagacaaaagttctactcagtggattctcaggaatgttagcaccaaacgcaatgcgtctatgagcgacagtttcttcatcaattccattaactaggtcacttttgagatgtttagctatagcctcaacacctcctattctttcaagatgtgcttgccgatcttccttttcagtgagataatttagagtagtcaatatttgatcatcagtctcaagcacattatgatttggttcaacatcaacaacagtatcaagggaagaatatccaacttccttgtggcttttttgtttgacatagtcttgagaagctgattgaaatcttaaagctgagacacaaagagtgttagcaactcgcaataaatagctagtaccggtattatttgtctctttcttggatgtttcattcttctcttcttctaataattctgtaagctctatttcttcatggttcagagaactgctacttgacatggttactgagctcgacagcaagcaaactagaaatgtgcctctccccctaagagagtcatatgatttctggaaagaaacgaatagaaatgattactcattcatgtcttgctcaaacaatacaaacttaaaaaatgagccaaattaatcctactatattatggttatttagtatatttttttccccaaaactatgatctatgtattatagtactcttaattttttagggtgtaagaagtagtccacaaactattcagagtgttgttaattggtcattttgtgaggttttatcacatgtgacaaacagaatgatactgtgactgtgtagacaattgtcacgtcaacaccacaaaataatttacatgtttttaatttttttataatcattaattgattttttagtttaataatcttctaaaaatatatttttataaaaaaaagaaatttttttaataatatacttaaaatataaattatttacaaaaatactttaataaatctcaattacaataatattttttcacgtcattaaaaagtaccttaattctaaaataatatgcctgaaacgaaattaat

SEQ ID NO: 62141 - DNA, 1059 bp, Cannabis sativa
ttcttcagtttcttaaacttctttttcattttctttttcatgtttagtgtcagatatcattttgagattttgttcattactctctgattttgttaaattttaagttttgttgtttagtatgtgctattcggtgttaagtattatatactctatttttatattttttaacggttattttttttgttgttctgaattgttttttaatttatttggggtgaggagaaatttttcaaggtgaagggttctctcttgtgatgttatggtagtccccactggtaaaagaattattgaggtgaagtatttttttttgtgattttatttgattattttttttttgtagttttaatgttattctactattgttttagtttatttttttatgttattattctaggattagaatcttaaatacttacgttttgactggaataatgattagtttttggctgttctggtgttgctctggtggttcagaccgtaggtattaaaaatagaggtttcatatgtgttttgggatgtctacagtataaaaaatttaaagtaatagcagtatttttataaaaatttatgtgtggcaatataaatataaaactgccttcaaaattcattatttttataagcttatttttttaaaaaatatagtacatacacatgtatatttatatagacataatgagtctcaatagtttcactaaatatttaagatggtggtatagtaatatactttactattaaaactaaaaaagcataactcataaagatttccttaagcaaaaaaataaaataaaataaaaaaaatattaccaactcaatacaacaagcttaaaaaaggatacatttttattactcatggatacattcaacaaatatgtgttttgacaattttgctccaataaacaaacaaatcaaataaaacatattaaatataaacattaaaaatattaaatataaacattgtacaattaaaaaagtatcaatttctttcgtatccggtcacaaaaccaatttttctaagtaaaagtaacaaaagttacttattgcaatagtaaattatttttt

SEQ ID NO: 62142 - DNA, 948 bp, Cannabis sativa
agagggacaagtgcagacttagaatttagatgaagcttggagtgagcttaagagtcaagattaggaagatttgcggtccgtcaaggcatcgacatgttgaagtggggaagaatgtaacatgtgattaaagacgacacaatacaaactaggtgatgcccataaggtggccaagtggtgatcaagtggtggcgcatgttggtgtgcatgctggtggcatactgatgcttagtttgtacgacagtggtattttcataaatatcttcaatattgtttagatcgggacaggacttgatatttgctatttatttgggtctatgaatacaatgacataatcggatttgagaaactctatgatttggtatatggtgatgaccatatgtctacagagaaaaaatcatatatgttcctagtagaaggctaaaagcttagaatgctctttaaggggggagtacctggtgtcagctctccaccaccccctaccaccttggtgctaagtgagctactactagtcagtgggactaatagagagggaatatgagaaccacaagatgactcatatgtctccatgagttggaatactcatggacattatcaaccgacccggtagtgcatctaagaatgctattagagattagcaggtacgttttcattggcttgttggtatgccgcttgcaagagacgtggcctaaacctctaagagacattatggtgtgccttggccatgagtcttgacacgagaagacacaagtagtcatttgtgggctagtttgcatacatgcatgggacgaatgcaccatgctagaaagagacagaggtcaaatgtatgctactagtttggtgtcttatcttaagggcttggcaacatgtgtggaggcatggtgccttgaggattggaccatggacgtattggagtccttgggcaatgagggagactgttcggacagtatc

SEQ ID NO: 62143 - DNA, 765 bp, Cannabis sativa
ctaatgcccatttctaaaaatagggtccacaaataattaaattcataagtaattataaaattaccaataattaatgctaattgcctttactaatctaaattaaaaatgcgttcattatagtgatggaggttgataccgtcaaagaggtcacctggatgaccccgataatagattacttgaaaataggagtccttcctgaaaataaagtagaggctagaaaactacgatatcgagttgctcgatatgtcatttataacgataagctctatcgcaaaagtttcagccaaccattgctcaaatgtatcgatgggattgaatgtaatatatactccgtgaagtgcatggtggcatctacggcaaccatactgggggtaattcccttgctttaaaaataatgaggcaagggtactactggccgccattgtgaccagatgcatctagtttcggcaagaaatgtgacaaatgtcagcgaatagctacacatatcaataagccaccaagtcagctaaactccatcacaagtccctggcctttcacagtctggggcatagacctaattggagaattaccaacagggaaaggaggagtgaaatacgttgtagtctctgtcgattacttcacaaaatgggccgaagccaagcctcatgcgactatcgctgctgctaaattacgcgagtttgtgtacagtgtcatcatctgtagattcgacataccatacaagttaatcttagataatggaaaacaatttgactgtaaggagatgcg

SEQ ID NO: 62144 - DNA, 4314 bp, Cannabis sativa
aagaacttttacaaatggtaatgcttttaaacaataagctttttggctctaattaaattaaaaaaagaaaaagaaaagtaaaagggtagaattaaacaatttccaacaacaagaacaaatcaactatatgataaaaatccaatatatatataccaacagtgttacagtagtactcatccaaattagacagttgttctttctttaattaaacaaactaatcacaataattaaaaaaatgagaagagctagcagctggattggaatgaaagactaacatttttaatgtaaaattttaaaaattggccttttattttagaaataaaataaaattcaaataaatttttaaatcgttttagcaatagattttttttttatggaagattttgcggcctaatgttaaaagaaaaaaaaatgggaagatctcttgggctgagggccaggggctataggcaatagccacaaccaccctatccaaccctgattgtatgttgtacttttagtggtgtaattgtttcattttcctgagttctaattgcacatttttctttgagctaactcaaacccggtgggtcgaggggccaacaataatacagaataaagagattatggctcctgtgcaggtctaatcctgagcataagcaggttaggcctgtgcttagagcctacttagcccaggagctcaaaattttattttccttttagaaatatacaattgttttattaagtttaaaaaaatactatatttttttttttaaaataaggggctaaaaataatttttaaataattttgactatattataatattttttttttccttttcttatttatctaattaattaggaaaacccaaaaccagaattgtgacgatctcttaaaaaacaaaacaatatatgccttcttatcattataagtcccttaatcaaaattattaagaaaatataatatatatcatgtgtgtcacaatacaaacattaaacaaattaaaggccaccaaattaccaacaagagcaaatattatataatatatatagaattagtaagtaaataaaaaagaagattaatgggttattagtacgtacaaatttaattaattaggattcgtttgatacgccgtattataccgtattatattatataatattaaattaaattgtatgctatataatatttttatgtaaaattatatgtaatattgacttatatggacacataaatatataatattttagtataaattaaaatttaacatagttttatataaaaatatgaaatatatatataatcaaatttaatataatacaatacaatacggcgtaccaagcgagctaatgaattaatatataatatgttaccttggtcctcaaacttcttaatcctaacttcaaaaaaaaaaaaaaaaaaaagtaaaggggaagaaattagtggcatttttttcggaaacaatctgattacatttcattatacttaattttttaatattaattattatttattttttcagcaaaaaaatattattatttatttttggaaacaatttgattacattttattatgcaagaaaactttttcgtttctctctacacagctagggcaaaaaagttgtatgtttccttataaagttattattttctatttaatttatttatatgtatattaattagtattaattagcttattagctagcatatcattgatatcaatctattgtttgtaaagataattaattaatattgttattccttaatatcaatctattttgtatatcttcaatattaattgatgaattttagccctaggagaataatgagtatatataataatatagtctttagggccatcataccaaaattatagtctttaaaaatcacattttaataattagttaattgcattaattatcatgagatcacaaatgataggtataataaaacaactttattacaccccaccccatatgaatgcttgtatcataaaggatatcgaaatgttaaaagatattaatattacattacaaattaatattgttggtctagccgatcgcaaggtaacatgtctagagatggtagttactactggtacccaataacaatactctaaaaaatatatatgacacatttacatggccacatgtaacctttgtatagtgccatgtgtccctacttgatttaaatgttttcctcatctcaccatgaggtaaagagaggtagaaatttagaaaataaattgaatacaaattataatagaaacatgtatatacaaattataatagaaacatgtatttttttcgaaaacccaaacacaacttatgttattataattagaaacatgataaacaataattaatgtcatgaattgtgttctacatatcaaatcctccatttagattactagtaagttttatgcaactagtatcttgtacctgaatggtggttcactttcactgaaacatgtcactgaaaaactatactaaaacaaaaatgagttatcaagaacataaaggagatagaatagacaattggtcagatttagtgtggatcatacatagatggtagttaaagttagtgactcttttaggattcatcgtttggagagtataatttaatataataatttttagagaaaattattagtcaatcgcaaagtgacacatttgaaaagttacagcaccactcgagtggtgtcaaataacaaagctctataaataataataagatatactagggtgcaagtgtaaagctagaaccaaaaatagaattttagttaaaattagactaatcaaagatcaaattcaaaccatatccatcaaagcagagaaatgaaaatgaaaaaaagcaccatattaagaaaatatagtacttattattacataatatgataaacaaaaagtaaaaaagcaaaattaaaagctaattaaacataattgaatcccttaatgaagattaagaaagcataattgaatcaccatgtagggaaaaatcccatagtggaatcactctgattgtaattatgccattcatgagtagtttcagcagctgagctaggcatcaatggcagcagtggttggctcacattgtaattttgttgttgtaaaggcataagaggattatcaaacaacatcatttcattctgatcattttggtgcataccctcaactccttctccagattccaacacattaatgttgttgttatgttgatcaccttgatcttctagaagaagattagtattattatagtattgatcatcaataccataatcatcagagttcaacagcttagtgaaagagccataattgttgttgtgaacatcaaacgacaccgtttgagagcttggctgaccataaatccaaggcatttgatggttgtggtgaaaatagtggtgatgatgagtaagatcattaggagaatagtattgaacattatggttgtaatcgtagagatgaatcaaatgtctcattctctgtttcaattcttcaattttattatccaaaacaaacatagaaagattgttaccactttcattattatcaatgacaataccctttgattttgaagaagaagaagtttgagattgagacacaacacttaatttctcaatttctgagttgactttctcgagtctttcgttgacgaaatcttgcattgtatggagtctttttgatggtggtttcttcaccatggcatttttgtaatcatttattagagactttactttgtgaggattctctggccatgtgactattggatttgaaggttgattgatcaaatcttttactattaagcaaactttaacatcacaaagtgtgcttaattcataagccttcttgattagcccacttcttctcttcaaaaatgttattcttcttgctttttccttcggtatcaatttcaatggtaattttccacgtcccatctttacttatttcctattaagacaaaaaaaaaaaaaaaaatgtagaaaaataaaaaataagtcttttaataaaaccaatttatcaacatatatatataaaaacatctatagctttgtaatgaactcaaaataaataaataactatttggttaagaaaatactgcaacaaaattctagagagccttacattagtatatatatatctgaaatagagaaaaactcaaaatggtattcatacaaaacctattgaatatatataaatagtgtaggcacctcaattgttcaaaaacagaaatttagaatgaagagagggatagtgaaaagcattcaaaaccaaattaaataaattaattcataataaaaacacttacttgagagagagagactcaaaactgttggag

SEQ ID NO: 62145 - DNA, 801 bp, Cannabis sativa
ttacctgctgtgatttgtagctggcatctccatctaattcttgtaacatgttgatgattgatggtgaacgatcaagcatctctgaggcgagcttgacagggacatagctttaattttaggatgaactcgaagatcaaatctcttgtgttcattatgtgttttttgtttatctctaatcaacaaagattgatctagatcatttttgttttgtggctctagttttttgtttggattgcagttgaaggtttagggtttgaagcttaagatcgagcttgacgaagaaggaggaaacctagctgctagggattcatgttgaagatcgaaggatttctcgatcattcgcacaatggttttatatcaaaccaatacacaattattttagggattacaaatctcattctgcgtgaatttgcaaaaagtctgttttgaccttggttaagttggtgtagggatatttttgatacataatttcctacaataatgattatttatgattcgaatgatgtgaattaattactttataaaacatactggttaaataaagtcttaattcacatcttataaaatgatttttagtaaatcaatttaaattttgagcaattatgtactcccaattatgtttattaaagtttttatttactcgttaaagttcctttgataaagaaagttgcaatttttgttttaggaatataaaaaatgcaaatggttaaacataatttacaataatgatttacaatttttgttttgggaatttaaaattacaaatggtacgtaaaacaaataattagtactaatgcaaaa

SEQ ID NO: 62146 - DNA, 1591 bp, Cannabis sativa
  modified_base (969)..(999): a, c, t, g, unknown or other
tatgtgaatgcatgtatattagtacttgacgttaattaaaaaaattactttgcattaaatgtgtgtcattattatgtttttttttttttttaaatcagcttcaaatttttttttttttgacgtaagcttgaatttcattactttacaaatcaaataacatctttaacagtggctatttatgagcacttatatgagaatctgtataaatctataaaatgaaaattacaaaaaaaactcaagactagcaataatgaaaagaaaaaaaaaaaaaaaaaaactagtgtgagttttcaacagtaactcttttcagccaaacacataaaatcttacttttgctagcttttttacaaactgtacaattacatttagattttcaatgatggagccccaaaccttttcattttcggcctgctagatgtgataaatcaggatttctacgacagccaaaaatgttagcttcctaaacttagaaagctttaatctttcaatccacctcagcaggttagaaagagcagtatgagacacacttcagtattgtgaataataatatttactctctcaaatttaccgctcttttttctctttgagtctacccctatttatagaaatatcggttggcagttgtttttctggggattaatttatttataactgttaatgaaacgaggacaatttccaagttaatttcatttaatcatatatgggataatatctaataactacctaatcgctctttatttttatccattagatggttatgttgacttgaaaggttgtgtctcgtcacacatgagctctcctttttgtccatcttgatgggaaaaaacgctaagtgttagaaaataattcatctcatcatatccctttattggtatattaatactacaaggtgatcttcacgctatgtgtgatgcgaggcggctgagtgttgtcacttattgttgggaatattttaccacgatctagatnnnnnnnnnnnnnnnnnnnnnnnnnnnnnnnaatatgaatatctctaaaaaaaataaaattaaacacataagagtttagaaagtcttacatgttacagcgaaataatatgactccttccgcgcgctcagatctctaacccttgttcctttctgtcagagagtattatcgatctgagcttgaatctctttctccccttcaagtttggttgccaccgtcttccgcactatgattgagtacttgacttgctatgtgtcggcatgacattctatcactataggccgattatgaagaataatgaaggagagttcaaaaactgtatagaaggtgtctctcatctactagttgtctgacagagttagaaactagattttggcaagttgaaaatcgttggatgagatatgttccttttatactgtttcaactaggctttaggtttgaattatatggattaaaaaagaataaaaatattacaaaaattagagtggccggccacttaaggacaaatctctagctagttacaatttaaccactttatttcaaccagttattcttctttcaatgataccatattttccaattttaatcatataaatgccaaaactaattatttaataattataat

SEQ ID NO: 62147 - DNA, 986 bp, Cannabis sativa
gggaatgggaataggaatgcgaattgtaatcagaatgggaataggaataggaatgggaatggggatgggaatgagaatgggaatgggaatgtgaataggaatgagaatggcaatgggaataggattagaaatgggaatgggctaaggaatgggaatgggaatgggaatgggcataggaatgggaataggaatgcgaatggtaatgggaatgggaataggaataggaatggtaatggcaatggggatgggaaagagaatgggaatagaattgggaatgggctagggaatgggaatgggaatgtgaatgggaatgggaatgggaataggaatgggaataggaatgtgaatggtaatgggaatgggaaacggtataggaatgggaatgggaatggggatgggaatggcaatgggaatgcgaatgggtcagggaatgggaatgggaatgggccagggaatgggaattggaatatgggtttggggtttgcgagttttggtgtttaaacacaaaaacttgcaaaccccaaacccctattccaattcccattcacattccccgacccattcttattcccattcccattcctattcccattctcattaccattcgcattcctattcccatttctattcccattcccattccctagcccattcccatttctattcccatccccatccccatctattcccattcccattcctattcctattccaattcccattaccatttgcattcccattcccattcccattcccatttctattcccattcccattcctattctcattcctattcacgttcccattcccattcccattctcattcatatttacattcccattcccattcccattccaattcccattccaattcccattaccatccccagtcccattcccattcccattagcattgccattcccattccccgacccattccctgaccctttcccattaacactcccattcctatttgcattcgcat

SEQ ID NO: 62148 - DNA, 873 bp, Cannabis sativa
ttcctaaacaatttataatattgtaaacgggtcttcaatcaagttttgttacaagtgataaataaaataatgacatgactactgccacacgtcaacaacatgtgtataatttgttaaagaataaaaaaaataggtattttaaaaagaatcattaaactaaaaattaattaatcattaagaaaattacgtaaaattaaattaaaaaatttttaaattatttttttcaaattaattacatatgtagttttaacatggcactgatatgacaattggctaagaagtcatatcatcattttgtttgtttgacacgtgtgacaaacttgacagaaagactaatttacaatactgtaaatagtttagggactatttttaacaggatgaaaaattcagggagcacaataatacataagttatagtccaagtgacaaaaaccctaaataaccttaaatatatgtggacacgtgaatcaatattcgtatctatttatttaatgataacaaaaatttgaatgattaagaaaataattaaaaaaaaaaggttaattaggatttttactctttagattttaacatgtaccaaattatgcctcttaaaatttttgggcgtttaaaattttcctgaacttttaagattattagatttaagaatttttattgaatttcattcaattttactattttagtgattgtttatggactaaatcatgctctccagaattaaatatctaccaaatcatgccccttaaattttgacatatactaatcatgccctctgaacttttatctatatgttagatttttttttactaaaattagacaaaagttcttaaatccaacaatctcaatagttcatgaggtatttttaacgacctta

SEQ ID NO: 62149 - DNA, 583 bp, Cannabis sativa
tggttttgagtgttttagtcttctgtctgtgacataattttgaacatttttgttttgtctctgtgacattgttttgagtgttttagtcttgcctgtgtgaaatgattttgttttttgttttgttgttggtttattcattatttttcgatgacttaccatcaaatcgttgttagtggttgggagtaacaagttttcaagctacgtaccttacacaatagttaagtactcaaactacgagattgaatgaatctgttgtaacgatttttaccgttgtgtctgttaaaagaaattaatctttgatgggcattttagtcactctgttaatactctgctaatcacactgtgttagtccaagtttcttggattcgaatattcctctagctgtcatacatctctttaccgttttcatagggatcccaaattattccttttgtaacaaacttgaatacgtggcacctgcctatttgcttagcttgattctgcaatgattgtattgattgtaatatctgtctataaaaggaatacgatttcctcagctgtattcaagctgagttttctccaatttgcatttattacctaattt

SEQ ID NO: 62150 - DNA, 646 bp, Cannabis sativa
aattatcatttatctaattttaatttaaataaaatatttaaataaaataaaaaaataaaataaaaaaatttaaaagttagcaaaatatcttgttacattttaaaatttaaaattaaatatcttacattttaaaatttcatgatgacctgtgccataaaaggtatgagaaaccttacaatggttgcagcggaattaaatgactcatctcgctcagatctctatgtctatttgaataaaaattaagagatttatgtctattttaccaaagggtagtatgtacttttttgctccaaatctgacttgtgccatgtcatcatgatctgtgacacctaattatggcacaggtctaccgtgcatgttctcggacacctcaatgtgtgttttttacttgtttttttgatgataaattatatttttgggatctcaggatcccaaaatctcattttaacgtctaaaaccttaacgagagacatgtgccaaatggcacgggtcgggtagggcttatgggaagcccttgatggtgtttcttgcttagtttagtcatatggatgctagaaaaacactatgaccacactagttcttggccaattggtaggatagaaatgtgccatcttttgggacacaaagattgttggaatatatttta

SEQ ID NO: 62151 - DNA, 572 bp, Cannabis sativa
atagtatttaccctaataataataataataataatagctattgttcaaaaatactactaaagatcatgaaaaaagtgatctgaaataatttttattttatttttatgtttatgtacagtttaaagccattctaacttttaagcaagattctttttgaattttttatatacgttttaaatttgattttattctatttttatttatatttttgttttaaataagaaatttttttcaagatgaaatatttgtttatttattgaatatttgatatattatttaattattttgaggtggtttgtaagataataaataataattggtgaatgagatgattttgttggagagaaaaagagaaagatgagtattgattgttaagatggggtgcacgtaaatatttgcacagccctattatatgcctatgtcacaagcaatttgtactactgctcagtaagtactgtcagtcttcataagtatggactatgctcaacttttttatacttttcacactccattccctactcaacaactttacactatgctagtctctactctactaccaaatctatgagata

SEQ ID NO: 62152 - DNA, 1018 bp, Cannabis sativa
atatttatcttggagattattcgacatcgaactagaggttgtgcaaggtcctcatttgttcatgaatatttgaagaattcaattgtcctctattgacaacattttctttttaactcgatagaataaaacacattatgccttttgcttggcttttgtttggtgtggatttaatccaacacaagttttttcctttatctttgtctaaattcagggcttatgacaaaagcagccatcaattgtaatggaagggatgcaattaccaactttgagcatagtattaatctgggtgagataattttagacaccaatgcacaaggtactaaatttaatgtatagaaaagagaccaattaatgacttttaggccactaggagttgttatcaatatcggcttcatctcttcgcaatcgagccttgtagttgcatgctcgacgatttcatcccaacctcaaagatttcgtttgaagccaagcccaagctcaagctcctcctcctttttcccatatacaaggtttatttctctatctatttcattctaatgtaacaaaaaaaacatgtttttaaccatacaattatctatccccaaatgtagttaagaaaactttttgtcattcatttattcattcattattcatctttgcaatcgagccttgtagttgcatgctcgaggattcattattcattattcatttagttaagattggtaatgtgccctgtttgaagttttacaaacaaatccgtgaaatgtttaactttgatttctttaattctctattaattatgtatatcttgggttcattatgtgtgttatgtactatatggtttttattctttaaaagtatttaaatcaagtcaatgtttgttttgttttaccaaacgccgagaatttatatgagaacatcaatattaaaattagtataatcaagtgattatatatattttatatagagttatacgttggcattataagcccctaactcatacttacaaagagactaagcaagtaggttttgcttgctt

SEQ ID NO: 62153 - DNA, 625 bp, Cannabis sativa
gcgggctcatcctaaagaagatgtgaaatgatcaagcttagtgaattattcttagttcaaaactgattgagaaaactgaaaaaggtgattataagtttgcactaaggcagcttaagaaatgtcatgctttgcagaaaatgatcagttttatgaatacccaactttctcagagatctaccttatccatggttctatctatgtgtgttcgaattgtcactcgtaagcaggaattgaaaaactatgatcttaacttttagttaattgctagtctaggttcttggtctgctgaccgagttagtttgttagttgcctaaggaacggtcagattgactgaccggtttctctgttataggcattgtattccctagttgtaactattcaacactcattacaataaagagaagtactcattcactttctgcccaagaattctgagttcgttttatgtcctagtgtgatctgtttctggccaactcagtgagttggatcaaagctttgagactcaacattaacagttactgtttctatgcattgaagcaaaataatatgtcatatagaagtatgaaaggaaaccttataaaatgaaactcaagtatatcaaattcagaccttccaatttggaggg

SEQ ID NO: 62154 - DNA, 611 bp, Cannabis sativa
aaataaaaaaataaaaatagttgttgtatgtattgttccgtatatattttctatataaggattataaaaaatataaagcaaattaaaaacaaataataattaattgatgaacaattatactgatgatttagtacatgtgtatatatatataaatatataatgagtttcaaacatattatattatatgaaaaatgaaaaattactaaattgaaaaattcttcactcatatttacatatatttttaaatattaaactaataaataaatatgaaaatatatttttaaatgtaaatatatataattttttttaaatatttcaaaaccgcgcgaagcgcggctttatttcctagtctaatcatataacatatatgtttttgtaactataaaaattaattagcccattaaaaagcgacttgaaaaataaattaacattaataatgcgtaatttatgtcatgatcaattcacaattttatttgaggctcttatcataccttaatcattaaaaataaaatagattataataaattagtactaaaagttaatggtttaaacttatgtaattactatccaataatcttattaatgttataaatattaataattatgtggat

SEQ ID NO: 62155 - DNA, 697 bp, Cannabis sativa
ttccaagagagaataagagattggagatgagagagatggaaaagagtattgttggagtgaataatgccttgaagcccactgcatttgaggtcaagacgtatgacgtggcctgtgacgtcatcgcatgtaactccagtccatctgcagcaatccttgctccttatgtcccatgaaattgtataattgtaattaaattcggaacattccccgtagaagttgtctgatgtattgaagagggtgaatgggtttttaaagtggagcagagcagaggattcatggggatggcacaatggagaagaagaagaagaagaagtaagaaagaagagaatgaagattagagagtagaagtatggaaacagacccatcatttttagactgagcttattagataatgtggatgataattgtacggaattgaaattggattgagaaagaaatataagttgtaaatacttgaactttctacacagataaggatctatcatgactccagatccagaaagatccaacactttaagtgggctgctccaattatattgtggaaaagaagcagtgagattggtattgtatctcaaatcgagtcgttgaaggtttggcaaacggagaatattttctggaagtttcccctgcaaattagtcccactaagatcaagagatgtcaaagaagttgagagattcataaaggaatcaagtgaag

SEQ ID NO: 62156 - DNA, 1405 bp, Cannabis sativa
cccgtgaaaaaaaaatgaaaaaaaatattccaacatgtgttttcgggcgtgaaggttgactaagagattgtaacaagaggttaacggtagcactcctcttaagacatttgatctcatcaattatactccgtattaatcattaatacaaattatttctttttttcttcctatccaattaataagttaacaaaagcatgctcttcggttagacgatgagctattctggttcgaggaggtgcagccgccgattatggattgtcgcgttattaatcatgtgtgattttgatcaccgcgtcaaaaaaaaatctatatttatataataaatttcacaaagaaagcactaaaaagtattattggtgcttaacacttttttcggtgtcatactactattagtgtaattaagtatcgagtccaatataatttaagaaaatagtttttagagaatatcgataactaaacgtggcaccgcctatagaaggtgttggacaccactaatacccaataacaatgctcttattattacttcctaacgttgtataatgtttgcattaccgaaagaaaaagaacagggacattatcgtccaaagaaagtttttattgattttgaactgtctcctcaatcgaaactaatgatagaagagaagtgttaattataaccttctattataataatctcttagtcaacttctacgtctgaaatcatatgccatttttattcgttatagttacaatattatacttgttaatttttaaaaaattctaaatagtttactgtactgaaaacaaaatttttgatattcttctaaatagtttacttataaattattcgaaaatttttaaaaatttagaaagataatattgtaactataacgaacaccaccatgaaaaaaaaaaaaaaaaattgaaagatgatattccggtatgcattttcgggcacaaaaatggactaaaagttaattttgaaggttcagcaaatgcttaaggagctttctctctcagaaagtgagtagccatagtaagagagagagatgagtagtccgaaagagaattgcaggaatgagcttcgaactgctattcgtcaacttagtgatcgatgcctttactcctcttctaaatggtaaccccttcctaaaaccctaaacctctttatacatacatttatacacctatatatacaagtatttatagaatttgagtataaagtaatatgagcttacatgatgggttttagaaactggggttcttagatagatataaaattgaattaagttattttggtttcttagatttatatacctatatctatatctatatatttttatagaatttgagtttaaagtattatgagtttccttgatgtggtttttagataatctaaaattgattcctcttatgcaaagttgat

SEQ ID NO: 62157 - DNA, 1165 bp, Cannabis sativa
tcataattaaatcttaattatctgctaatttccaaattaaaataagcggtctttacattaagagaccgaaaaaaataagagaaatactaatgagtacttactcaacaataacgaatttggattctaagactctgatgatgtttttactggttgaattatgtttttttatgtcttaattaggtgcactagagcttgacatgaagtttgagatatttttgagttaaaaatgagatttttgggaaatatgaagtagaaaatggcagatcattttctcaaaaatggtctaccatttttcctggaagtaaccaaaaaaacggcctacgcttttagagatacggtatgccgtttttggggaaatttttccaatgtcttgtttttggtattttcttaatatttagggtatttttacgctatctatcgatagataaacttttagttttgagtttaaagtcccccaaagtgatttagcgggtcacttgctagttttacgtaagttgtgacttagggccttaaatcgtcgagcaacagtttccactcagagttatcaacatacttgcattcaaaatcatagtaagattagtatactagttgcatatatgtatacatgtttagcgtgcatgtcagttaccatcagaataacatatcagggtattagtgagatgtacataaagttccactgagataccaacagatatatattaagcaaatcagtagccatcagattagtatttcaggatattagtgaagtgtacatagagtaacattgagatatgaacagataaataataggctttcaaaaagtatgaactaattgctaccatatcagtatagagtaaaggatggatttgtggtagtcatactttagtcgagaatgttcctaacctagttataggatcgtgattaggtgtatatgcgcctagttacggtctagatatatgtttatgtttatgattttcttactgagtctgttgattcacagttattacgtgtatgtgtaggtaggagccagaactgaactagaatgagtctagagttagatgaagattgtacatatcaagacgattagacttggagtgtttgtgtctttgaaaaagtttaggctcactttttgttagcaattgggcaaaacttttgtttaaaacatattttgaaaacaattgtaaac

SEQ ID NO: 62158 - DNA, 708 bp, Cannabis sativa
atcttttccttttcaacttaaaatttgaataactccttgagtgatttcctttgatttgagatacttctaaaatgtgtcaacattagaatatcaacacttactctgatctttggttgttgtctttgcattttctctcttgtcgcattgtgtgtttatgtagatatagatgtagtctttgtcttctcttgggttgtagccttgaagttctattccctcgactgtgttttagtgaaggtggtcttatttatctcctcgatttgataatagatgaggccttcgtcaactccttagctttacaacgtaggaggccttcatcatctccttagctttacatcgaaggaggccttcaacatcccctcaactttacagtagaggaggccttcatcatctccttagctttaaagcggaggagatcttcatcatctcctcatctttacaacagtggaggtcttcttggtgactatcaacaatgtgtcaaagtagtcgttggtcattctttagtcaattgaggatgtgatcaactcccaaattaatatactcaagatgagggtgatgtccatctcgggtgcaccttagagtgattgtaggtgcggtctccattttttccttcgtcttaaccttagaggtgttcatcatcccttctactgtattcacaatggaagaggccttcttcgtccccttggttgtctcgacagtagaggaggtctt

SEQ ID NO: 62159 - DNA, 740 bp, Cannabis sativa
  modified_base (26)..(34): a, c, t, g, unknown or other
  modified_base (672)..(679): a, c, t, g, unknown or other
acccactccgtaaggagctccgggtnnnnnnnnnctcggaacccggaggagaagaagaagcgatggcggtattccttgacgtatttttgatggttataagggaccacgccatcattcgaagggtgggcccgaaagccgtaaaaactgtccttaagtttgtcctccttcttggggacagaaacaagttcgtaaaaataccagatctccgccggactgggagaaccccgtccctgggcggagtaaaaaataaataagcctgaaagcaggcggtaagcttgaggaattagttgtatggcgcaaggtcgacaaatacaaggaaattaataaaataatcttgaaggggaagcatagcttcggtcatcagatgcgtctggctccaagccccgaagcctccgtaaatttttttaggggtctccgcatctcggggcgggcggtggtacgtcgcgggcttgatactagccacctccacgatgttctccagttggtgaggacaagtcagagtagagtgaagctcagccgcttcccatcccatcgaaggtggccagacgttttcctcccttcttggaagatttagaaccggatgcagacacttctgattctaaaaaagagttaaaattccagcaattaggccccataccaaagcctacatcaaaaaagggaatgggggtcccnnnnnnnntggaaagaggcccccttcggacggttgtcaacaagaaagccctagaaggatttcctggaca

SEQ ID NO: 62160 - DNA, 660 bp, Cannabis sativa
atgtttggtgtataattcggggtcatctcaagtttgtacaaggccttaggcgaagcttgaacaaggccttagacaaaaataaattatacttttttgacaaaattattaattttatttttcaaaaaagttaattttaaattcttatttttaacagttttcttatttatattaattttattttattctttacatgttttattaataatcatcatattagactgaactttaattcatttataaaaaatttcataaaaaacaaatcaataatcataaaatgaacacaataaaataagtataattataagtaaaaaaaatattatgatcataaaaaaagatatttgaattagaaagttctccagttaatatcgaaatagatagaggaatcatgtactaaaacactgagtgtactatatgttatacccatatttcgaacaacaatatggtgttgatacgtgtaaagaagctagaaagtaaactacctcatgttataaagtaataaatatatttaataaacttgccttaaaaaatatagatggtagaaatattcgaactcaccctttaaagataagggtaagctatgaataataattgctaatggatatataaaaccaacaagatgaacaacaaacaaataaagtccatctcaggatacacaaaata

SEQ ID NO: 62161 - DNA, 2345 bp, Cannabis sativa
atgctgatttgaatttggagaaaagaaagagtcaatctttttattaagaacattggaaatgtacattgaagggtgaccaaggcgattatgccattgatctacattattttgtaaagaaaaaaaggaggagattgacttgtattggccatgacagcagcctcatgtggcagtggaaagagtttgtcatgccttttagctatcccaatcacccgattctgagagtgctgttgaataacacaaatttcaagttgaaaaagaactggattagtggtgttatcagtgtaagcaatgacagaaaaaaaaagttaatatggaactgttgtacataaagaacattatgtaatgttatagcagagttgattttaatagtaccaatgccaaggactggtgtattgtgattattaggtaatgtaaccgatttaggaaagtgttgatgtgaaaaagagtgaaatagatttttgttgaagcacatgtggtgagttgcaccactatctattatccaagaattagacaaggtaaaagaatggttaccagccatgtttgaagctgctataggaacattaggatctgttcgaggagcatgctgatgaagttgttgacttaggagagaaattagttgctgacactgagtggacagatcaactgaaaccgaggtgttgttggtatcttcagagtgaagattggcagtggcttgattaccagctgccttccctttctcttgcctttttttgtctccataaccaggtggaaaaccatgcaagaaatagcacttttcgaccaaatgacctagttttccacagttggaacaagagggtcttggtttgttgttttttgggggattggtagggtgtgatggtttaaccgatgatgcaaaggaggatacatctgatgtgcctaaggttctttgacgttcttcttgaactatcatggagaagacccttgaaaggttgggaataggctcattaaggagaatctgagccctaaccgaggcaaatgactcatttaaaccagtcaaaaattgaaggacctggttttggttataatggtcaagaaatgccttcatagctccacaagtacatgttgtgttaggttgaaactccttcaattcatcccatagggatttcaatttagtgaaataggaggtgacggactgatcaccttgatgtaaacgagttaattgggtttgcaattgaaagatgcgatgaccatttgcctcattgaatctttcagcaagatcttgccacatatccgtagcaagatcaaagtacattatgctttgagagatttcagcagagacagaattaacaagccaagacataatcatgttattgcaacgagtccaagagttaaggatattaccagcagctggccgaggcagggaaccatcaatgaaggttgtcttgttttttgcagcaagtgccattgttatgcctcttttccatgattggtaattagtaccattgaggatggaggacaccaagacaagaccaggatggtcgccggagctgaggaagtaggggcttgaaacatcgtcgacagtgccacgatcttgagtggatctggaagaatgatctggtgcaacaggggaaggaacagagaactctggaccaagttgcgatcgaggcctggttgatcgacgaggggtagcggaaggaggaggaatcgaagcggagatgtcttcaggcaaggtctctgactggtgatgctcagaatttgatggaaggatgccatcttgcgatctggtagctggtctagccatggatgaagtttgagatgtgtcttctgataccatgagagaaaccgagagagaaagagagattgtatttctcagattaattaattaatgattacagagtaaagtgcttttatagcactagtttacaagaatcaagttggtcaagactaactaaccaattagttagttaataacagattaccaacttgtattaacagaattgtcagactaaatacaaagcatataactaatcctaactaattacagtttaataaaaagttaaaattaaagtgtgagtcatcaattttaagtcttgaaactgtagacaacgtgtatatgtatacatcaactaactaagggcccgtttggtacagcttttggaaaagctaaaagctgctttttaaaaaagctgtgacaaaaaggtgtttggtaaacagttaaaaaacagcttattgaagaatttatggaaaagatacagctaaaagctaaagctgacacaacccaacttttaggaaaagctgttttgattaaaagactttataataagttatttttactaaaaatttatttaattatttattatatattataaaaaataaaaatatttttt

SEQ ID NO: 62162 - DNA, 1360 bp, Cannabis sativa
  modified_base (35)..(37): a, c, t, g, unknown or other
taacactacgtggcttggcacgtaacaatcacctnnnatatatatatatatattgaaaaagcaatacattcttatataataaatattactctcgactatatcacaatttttgtgtagtgtgacgtgaatattcgctttgagctttttataatagatttggttaggattttttttttaaaaaaaggaaaaacctgtgatcaaattcctgatatataatatacgtaatgcatatatatttttcagctattatagattgatattttttaaagaactgctaaaaaaacaacaatggtatttaatactatctaaatatctaaagtgttatatcgcgcgcgctattagtatcgtaccctaatcacaatgctcttttctttaccataatcattttttatttttcagtgtaacgatgtatgaaatcatgcttccataggaactatatgttaatttatatttatctcttatatataataaatataagaaaattaagcacatattatatataactatatatataatacatatatatatataaatatttattgttctaaacaaataaacatatttttttttgaacatgaagccagttttacggacaacattagtgaaggtacacttgcattgccaccaatgcgcgagggacctggaagagaagttaataaggcgaaaaggtacataattatcaaccataattaattagtgatccaattttggtaagtaattagtataactatatatgtagataattaattatacgattaaatgactgtataataatatatatatacgttcatatataggtattcacagtgttaaagcagatatgaaaactcaaattttggtagtggatgggagcattgaaggtgaaaaactcgtatcgttcttaagaagaaaggtgcataaacacgcagagattattataggtggaaataaagaagaaaagaaagtggaaactattaagcaagaaaaagaagaaattattacttctattgactctgggagcaaggttgagattaaggaacaagtaaaggtagtggaagcaaaatctaaagaaggaaatgctccttattttattcactatgtttacgctccccaactttttagtgatgaaaatccaaatgcttgtaccatatcctaatttatttaattatataaatttttatatatgtaaattattaaggcctatgctagtattatacattattattattatatcttgatcgatgtttaaaaataaacttattcctccatcgatctatgatgttataattataataagtcattatttatattgattttctattatgttttgttcaaccatgcatgtgatgtgtgacatcacgttgttgctctatatcttatt

SEQ ID NO: 62163 - DNA, 864 bp, Cannabis sativa
catgaagtcccacctaggtgatttttttattattgtcgttgttatttttgcaaaatcagggtataacacatccaaatagatagaatgttagaattttatttggacttatattaacttttattgattttattaaaatttagattgattgaatagttcttttgagttagcccttattgttattgatcaatagttaatgagcttgtcatctgtatgtgtaaagtctacttgaagcagaagtgtgggcttttctagttcactgaagcctttgatgagaaggcctagtccaactagagttatatacatgccgaaataaataagagactggaacagtctttcaagggatactataaagttaccataaatttattgagcattgttattgggcactgatggtgtctaacaccttttataggtgacatctcacgattggttagtgatattccccaaaaattagtttcttaaaacctgatatttaattataccaataacaatataacactacaaaaagtattaagagaaatggtaacttcaaacaattctcaaatttatttgtgtttcaaccactttttacaattgttaccccacaatatgtatataaaatataataatgtgattgttgccaggtacagtacgtactattcatgaattattaagctataaataaacataaccaatactgcctatacatcacagctagctagctacttatgtacttattttttgaaatttttctatattgaactatatcaagtaattgaatttattaatttgggttaaattaattattagcttcactgacagaattttctataattaaagttcttatgaattatgatcgactctgtttatttttttttttttttt

SEQ ID NO: 62164 - DNA, 800 bp, Cannabis sativa
ctaatataagagtagtagatgtagttgtgtagaaaatgaatagagacctgtcctatttagatgaggagaatccaagagcaagaagactagtgttcagtttgtcaaaccaagcccgaggggcttgtttgaggccatataaggctttgtgtagtttgcacaccaaatgaggggcagagggaagaacaaacccagggggctattgcatataaacttcctcacacaaatcaccattgataaatgcattgttaacatctagttgttttacatcccagccccttgatatagctagagagatgacaactctaatagtaatcggtttgactactggactaaaagtttcagtgaagtcaaaatcgggttgttgatggaaccccttagcaacaagccgagctttaaatttggaggtacttccatcaggattctctttcttcggcctataaatccatttacaaccaattgcctctcttccttctggtagaacaacatatgtccatgttttattttctttaatgccaccatttcatcagacatggcacggttcaaatgttcactttggagagcttgcttgacactaacaggttcttgaaaaacaagataggcttttagctttcggatgccaaactttgcatgagtttgcatcttgcgaaagttgatgggagtagtagcaagaatgttgccattggacacctcagtgacagttggtttagtatgaattttagtcacagtagtgttgcttataacatcagcaggtggaacacactgttatctatagtgacagtaggaataatgttctgcataga

SEQ ID NO: 62165 - DNA, 684 bp, Cannabis sativa
cagaggctagtccttcgattgttataggtgagatctctattagtggtgttatgtttgctattctaattgattctggtgctacacactcatacatttcaagtatagtcattgagaatttgagtagaccatgttatgttatgtctagtgcattcggtactttgttgcctacaggagaaatagtgatctctaggaggtgggttaaatctcttctagtgttggtaaaaagaagagaattgttgatggatttgatggaacttgacttagaagactttgatataattctagggacggactggttggccaaatataatgccaccataaattgtagaagaaagatgctgacatttgagccagatggtgaaaccccatttgtttttatgggaaaggttcaaggatctcgaatcccaatgataccggaacttaaggccagagatttgttatgagaaggatgtatggggtacttggccagtgtattagataccatgaaggtataccagtgggaccggaagaagatcgtgtagtgtgcgatttttaggatgtgtttccagaagagttactaggattaccaccaaaaagagaaattgattttgagattgatttgacattgggggatgagccaatttctaaggcctcgtatcggatggcaccagcaaaattaaagaaattaaaagtccaattataaaa

SEQ ID NO: 62166 - DNA, 1044 bp, Cannabis sativa
ttttgagatataattttgatatatatatatatatagatatggatttgtgaaacaataccaaagttgggtgaaatggtaggacaaagagtcccaggaaatcatattcctcgatggcttggttggaaaattaatgataaacataaaaatgtcacagttacaagattatcagaagtaatagaaaataatattgaggtatatttatccacatgcaaaattatttattgtcttgtattaaaaaaaatatgatcaagaaacttatgttagtttcttttctttgtttattagttttttgtgcgacctacattggctccaacctcaaaagagaaggcaaaattgttttatgaaaggcttagtagctatgaggataatgaagatggcgtaattgatcaaatttcttcatttttagtgggtgatgtcattttacgtaatcaatagtgtatcgcactacatgtggagcctccatcttcgaatgtagggcaatcgaatatggagcctccatcttcaaattttgaacctccaactacgaatgtggagcctccccaattcacttaaattcctcaatagtcacacttgcattccttttaacagcctccctcttcttatgatgctcgaaatgagttgctagagtcagtgaagtgtttgatagttgaccaagaaaagttacacaagtcaagatatgaggagattgaacgtgtaaatagagaaagatacgagacaataatgacaactatctctgaccatgcttacttgaatagagtgagacatgagaagctattaacaaaattggatgatttgactcgcatttttcgacctatagctgcacaactttctggagcttgaggagaaaagactacagaaaataaccaacgagtaatttgcataattttaatatagttattattattgtcatctatattttatttataaataattttccttgtaactttattgttgtagaattcaccatctcatgcacacatctttggagatggatttgtaacacctgcaagagagagaaaaatggagggtggtcaagtctccaca

SEQ ID NO: 62167 - DNA, 1363 bp, Cannabis sativa
tatttcctttggcataggaataattcttcttttgctcgagcaatttcaaatctgaggaaatatttgagatctccgagagccttgagtttgaatttgaggtgtagagattcttgcagctggtgtaagatggatatattagggccaatgatgattatatcgtcaacgtacacaagtaaggcaatgaaagtatcatcagatcctctagtgaacagagtataatcagcttgagactgtttgaatccttcttggagtagagcatcagacaatttattgtaccattgccgtgaggactgctttaatccatagattgatttgtgcaatttgcacacaagattgacacctgcattgagagaggaaggaagtgtaagtccttgtggtaaagacatataaacttcttcgttaagatcgccatttaggaaggcgttattaacatcaagttgtagagtgtgccatttctttatagtagaaatagccagaagaagtttaagtgtgaccatctttgccacaggagagaaagtgtcaaagaagtctagcccttcttgttgcgtgtaaccttgtgcaaaaagttgagctttaagcctttctatgcttccatcactattgcattttattttgtaaatccatcgacatcctatagctcttttgttggcaggaagagggacaatggtccaagttttattatccgaaagaacttttagttcacattgcatggcttgcaaccaagctattgtttgtatggcttcataatatgtcctcggttctttgactgaagagactgcaaaaataaaggctttgtgagagtctgataaatttgaataagagataaatttgtcaatattatgaggtttagaagagttgtcttgtatgagtgagtaacactcaaaatctcttaggtagcttggtggtttggactatcgatttgatcttcttgggccttcttgagatggttgtttaggggggcttcaggtgcttctggtgtatctgagtttgttgtttcctgctgtatatgttcattgttaacatcatcattgttttctggattcggtgtgcttatgacagcactattgcctgcaggatattctgaaacatgtgtgttagaaatcatagaatttggaataataatttggataaaggggtctatgttggtatcctcagtgttaagtttttcgaaaggatgaaaaatcctttcatggaaaacaacatttcgagaaacaaaaacttgtttgttattgatgtcgtatagtttatatcctttaattctttggggatatcccataaagacacatgtgcgggctcttggggaaaatttgcttctatgagcagataaagtagatgcaaaggcgagacatccaaaggtgcgtag

SEQ ID NO: 62168 - DNA, 1376 bp, Cannabis sativa
ttagcattagggcgttacagataggaacttaccgcggtcatggttgcggtcacgtcttggatctggtagactgggttggtggaagcacatgctgcatatctcttcatggcaagttggactaggccggcagcaaaatggctcattggttctgaggcaaggggagctagagtaggcccaatgaagcggttgaagcagttggttaaaggatccagatttagatcctagacgttcccggcgtactcgccgcgagtgaaactatcctgggcctcccttaagatctttttcaaggccgccacttcggcattcccctttgtgcactatgtcgtggcatagttatgcttggcaatctggagttgggttctctgctcatcaacaggaatggggatcaagataatgcccggagggacagtatcctcgtccacctcagacggtgtggatgggatccccgaatcagaactaggagccggagtgtctactctctttggcttcttagcaacctcggactccaccatttttcctttcattttccagtctaatggagggaacatctcgccttcttctttagcttcctcctcatcctcatcaattaaaacaacttcgtccgagggatggctggaggaagacctcccaggagtcaccgtcaggtcttgcgcctgaggcatagtggggtcggggctataggcctgggcaaggcgtccacgagttcatccattggctttgctacttaaaagagatagacaaataaaagcgttagaacattatcaagaaattgtgcatgcaagaaaaaagcaataaagctaatcctaccctgacaatctaattctgccctagcaaaagcatgcattagaagactggtgtcgtcgtccccaagaaagctgtccgaggggaggaaccaactcgaaataaataagccgaatgatccaaagggataggtgcgagaggcctagaccccatccgggactggtctaaaaagtgacctaggtttgaaaaataaaaacccttggcatgatcgccccaactaaaaggaggcatcctcaacctatgaagacgctcattgaaatctactggcctacagccagagtaatcttgaatagaagggacgtgatgaacagttagtggagacttaccggatccggaggtgctggcgtcaggggcccttgtattgggaactgggaacggaagcttaggctgggaggtcgcttgtttctttttcggcttcaatccgaaggacccttcggtggcggcttgggccttgatataagctagttcttgttccctcctgaagaggtacttcttataccgctctttcgcggaagcaatgatgtccgcccgaagcgccttctcggagtctagactacgaacgttgggacaaagaa

SEQ ID NO: 62169 - DNA, 1165 bp, Cannabis sativa
ttttattataataactagtttggagtaatttcttttagttaagggttatttcaaaatcctaaaacatgaattcttgatttgtgataatgaatattgttcttgatttctctcgtaataaattgtttttgtttttctatttgaatgctatgaatattgtgaattcttgttaggtgtataactaattaagtttttgtattgttctattatcatcttagaattacttctcacctaatagtttaggattctaagtagagtgatagtttgcaattaatagtaatgtcaaagttattattgattgtgatgaaaaatagaacctaggttaaatgaattatatgattcattgatttgttacttagattaacttatccccataaaaatgaatactttttctaagttaaataggtaacatattcgtggatctatcttagtaaaaaaatttaattattgagtgtttcgccttgattaattataatagggagattgaaaaaaataattgcttcaatattttctgcggggttaatagtttaattgagaaatcagaataatttttattattattaatcttgaatgattattgagggcgaaaattgactctaaactatttttattatgttatttaatctttatattaaaaacattttttttaatttttagttctaattcttgaataataaattgataatagtctttgtgaattcgatctgtatttatcgttacattgaagtaattgataatattgaaattaaaaaaaattaataaatttgttgcagtaaatgatacacatcatatatatattatgtaaaatattatattaaaatgagtaaattacggcataaattctataagtgttatctcgctagcaattaacccccgattctaatttcttggcaataaaacctcccaaactcatattctgttagcagattgccatttttatctttttaggtattaagtgtcacattggactatccatgtgtacacattgtgttgtctatatgaacacggtatacacatggaatagttttattagtccacataaataactatttaaaaaattaaaattaaaataaaagaaataaattctttttttttagggaaaaaaacaggaatattctaaaaagggaaaaatattacaacaatactgtgggccggcccaatgaacatt

SEQ ID NO: 62170 - DNA, 4883 bp, Cannabis sativa
gaggtctttcatattaaagttggaacagattattgatttcacagtgtttacgacatgaatgttagagccaaaaatgcaagtcatcaacataatagacatatgattgtgcatgtgccattttcagatttttaatagatacacttgtcactttcattcacacattaaagccatttgaaaagactaaagtgttgaatttttcatgccactgcttaggtgcctactttagaccatacagagatatatctaacttgcataccttatattcctggcaaggtatcaccaaccctttgggttgatccatgtagatttcccttttctaattcaccattgatgaacgcaatcttaagtcttaacatccatttggtgcacaactaagttgtgtatgaaaactagatgatattaaaactctaatagatgttattcttgtgactggtgaaaaggtgtcaaagaaatctacattctctctaatgtctaaaacccttgactactaaatgagccttgtatttatcagctattctattgggtttcaatttctttttcaaatctacttacaacctatagccttacacccaggtgataagtttacaacgtgccaaattttgttggtcacaagagagtccatctcatcatctatggcctcttgccaaaggtccgcatttaaagaagacaatgcttcttagaggttagcaggatcctcctctaaggtataagcacataaatcagaaccaaggtctttagctacccttactctcttctttcttctaggtttagtttctaaatcctcaatatgttcatcacttctaaacactggtatgttgctagttgatgcgcccccgctatttctcaatttaaattaaagtctatcttcaaaaaaattaatgtcattagatttcactataacatgcgcatttagatcatagagcttataggctttgctattaacaacataccctaaaaatacacattcataggctctacttgctagcttaattatcttaagatcagtaaacgaacataaactaaacaactttaagtatgatacatttagttgtctattcttcaaaatctcataaggagaaattttaatttttaatttagataccctattaagcacataataaatagttcagagaatttatcccagctaataagaagcagcaccaaaattaagtaaaatggcaacaatagattcaataaacttttattttttctttcagcttatctaatcatttcaggtgaatatggtggaatcttatcatgtataattttatgtgagttataaaaatcaacaaaaacagtgaaatcatattcagtgcctctatcactacgtagcttcttgatcttcctactaagttaattttaaaatttagctacaaataacttaaacatatcaagagcttcacttttatttttcattaagtacacaaaggaaaaattagatcaatcatcaataaaagtgataaagtaacgttttccatttcttgttaaaacaccatctaatttacaaatattagaatgaattaattctagaggcttactttctctagttacagatttatgtggtatttttgtgatcttagcccgactacaaaagtcacattttttaatcattcaatgataatttagggattaaacctaaactactcatatttttaattattcttttgttaatgtgacaaagtctagcatgtcaagtattaaaagaacacaacaagtaaacagaaacattcactttgttaacttcaacattcaattttaatattcattcagtagtgtactctttctccacaaaaatctcattcttagttaaagtaaacaaatttgcccatataatctatgtgaaccctgccttgttgagtagataacctgagactagattctttctcatctttagagtatgcacgaattctttaagaatcatgatttttccagaggtaaactttaattctacatcaccagtaccaacaacaattgtagtgtgagagtcgcccttacaataccttcttatccttagtcatagcagtgtatgtcttaaacatagaacgatcatagcagacatggcgagaagtgccagtgtctaatgaccacccttttgatccaccaattaagttgatctctgaaatcatagctgtataaggcaactctccattcaggttagcctgcagagcagaactgattttgttgagtaaagaaaaacgtaaagaaaatgtaaggaagaaaaaaagtggaaaataaaaaaaaattataaattctcatgtttggtatggaaagaaatattgtataaaaaaaatactctgctgaacaaaattttccatatcgaacatgaaaagctgttatatatttttttttgttctccacactttcttttttcttatattttctttatattttaattttctcaccaaaatttaaccatccaaacataacctaaaagagtattgttattggacattagtggtaccttgtgccaccccacctaaagatgggatcttgcaattagttagtgatctttaaaaattataggactcgatacttaattgaatcagcaggagtataacacttaaaaagagacactactactaacattaatcaatttcaaaatatcattattgtcttttattttactacataaatactattatatatatgtccatatataattacttgcacaacaacaaaaaataaaggaaaaaagaacatttcttttctcatagttcttcacaatagatatgtattatttgtttagaagtatagtcaagaacaaacacataaaatgaaatttcacataatggtttgttattatttgacacaagaaacagctaataaaccatcataattaattagtaacaataattaacacatataaaatttaataatacccaaaactacactataaatacctttcttattagttctcttccactaaacaaattaaactcataacaatataatgaagttaaacattcttcttatttggtttgggatagtatctacaactactattcctatttttaagtgtggaacaagtgcaagtggtgttggttgtcaaagccagtgcggcccaagccgaggcccaagcccacctccactgagcccaccaagtccaagcctaccattaccactaagcccaaaacaaaaattcaaagttaaagatattgaaagaccagacaatagatgtgggccaaattttgaaaacgagccatgtggtgaaggaaggtgttgtagcatatatggatattgtggcaacacacctgattattgtggtatttcttgtgaaagtcagtgtatcccaagcccaccaccaccgaacccaccaccaccaccagtcccagaaagatcagactatagatgtgggccggattttggatacagcccatgtggtgaaggaaggtgttgtagcatgcttggatattgtggaagttcagaagagtattgcaaatcaaggtgcagatatcaatgttggccacctagctaggactttgcttatgctctaaagatgataatgatgatgataataatattataagaagagtgttactgtcaacttcttattataattttttagttaattttcgtgtctgaaaatatatatcaaaatattatttttatggcggtatttgttatacttacaatatcatttttgtaaatttttaatttttttttgaatagtttatagtaccgaaaatacgtttgaagttttttgaacgtgcgtggtaaatcggagtatcaagaactccgttttcagcattataaattattcgaaatttttcaaaaatttatagaaatgatactgtaactataacgaatatcactatgaagaaaaaaaaatatatatattctgccatgtaatttcagacgtgaagaaattgactaaaagattgtaattaacacttttcatgttataattgtacaagcaaagaataagagagagggaaaattagttttggttaaaagggcctattgttaatgtttaattttgagatatataatttggaaaaattttatttatttgatttagagaaaagtgaaagaaaactataaataatcaacatgattttggctttgataattaggaaaaatgttggagttataaacggaaaagaaaagatattagaaggtggattgagtaactcataagaaaatatagaataattgatgacacaatataagaaagatagagaaaatggtagtgaatataataattataatggaaattcagtataaactgataattgatcaatgtaaaacaaaatcataaaaatataaattattggcaatggcttaaatataatacaataatgataataaatttaaaaactacttactttacttgaaagtttaattaagaaataaattgaaaataataagactaattaaaatttttattctccaaattataatatgtatttaattgtgttctcaaattttttaggcccttaacaattttgtttgatttattgagattattgaatttttatcaaattttggtcaattttactaacttaataattatttatgtgtattaaattatacccctaaattttgatactaggagtacaattcaattggttttaccgtatttcaagttttcgggtgtataggtatatcattgtttagaattaagtttttttatttttgtattaagtttatgcgtttagaaaatgaataaattttttttttaatatatataaattcaggttttgaggtttagatcaatggaatctgaacccaactaatgatgaacatgttgctatttgatacatactaaattgtaaattgtgcaatttaaacttcaacatgtacaaaattgtacctttacaacataaaaaattgattaatgaataaaaattaaaggaagaatataagcgtggacggcaggattc

SEQ ID NO: 62171 - DNA, 2562 bp, Cannabis sativa
atttattaatcaagtgcatttgatgaaagggtcacctttataaacgttaaacagagcaaatttcatacatagatatgtgcaatgaagcacatgttaatcctacggctagcacaatgaacaattgagaagatgaggtagcaaatcagacttaagccaaaagttgcccatctcttaaaacaacacacttacaaactcgactcagctcactgtgaacaaaaaatgtctgtcaggctatgtagaaactgagaagtttacagcacaagaaggggggctttatcagtcttcttttccttatcacaactattcgaaacacgaagctaagctatgccccttgtgtttgtgcataccccttttctcttatttaatttataaggttattttgctaccataggccttaacatgtctgttatgttcttcctttgctttagagtttgatgttctcagactccttgtcttctttgttgtcattgttgtcattttcatcatattttccttctaatttgatacacttgtaccacttggcacaagcaatatagacaaacaagtctaaggatgtcaaacctgctagcaggaagaaaaacctgtctaggtgacccttgttgagatttccagggatccatccaggcatgtgatcctcggtcgagatcttcataaccatactcacaagcaagctgctgacatagtttcctagagatatagatgtcatgcacaacgcacttccaaagctcttcaatccgtccggtgcctgagcattaaagaactcaagttggccgacatacatgaacacttcagaagctcctatgaatgcatactgaggaacttgccaaaaaatacttagggagctcgacccttcgcagtgagcacactccttgtctgcatacttgagtctgtagcattcaacaatcccagccgaaaccattgccaatactgctatcacaagaccaattcccattctttggagctctgtaaggcccttcgaacttgattttagtctccccaccaaagggtcaaggattcttcgattgaggaagatgaaaactgccacactgaggatgtcgaagctagacatgctcgctggtgggattctgaagttggaaattgtagttttcattgcagcaccttgctccacaaagagagaagccatttgtgtgaagaccaccgagtaaattatggtgcatagccaaattgggagcagtctcagaatgcatttaacttcttctacttgcgaaataggacaaagacgccatgggtttttgttgatagtttgttgggtgtctaaatctctagaagagacatatgctgctctgtccaagaacctaaacattcagaacaaaatacaaattagcattgtcatttgatttaaagtctaaatttcatgagctttatattgtaaatgcttacttgaaaccatgagtgtggagtatctttctgttacaattagaagaatccttaacattttcttcatacaaatcttcaccacttggtggcatcttcacactccacttctttgatgcagcagagatgacttgacaaaacctcgagagagggttaccgctcggcctaaagtgacggtacctcaaagttcctagaaggaacaacatcaatgctgcaaaagcagaagctgcagatgcccagaacccaattgcccaaatcccttcatcctcaaagtaacccaaaatggtgttcgagaagagtgagccaaggttcaaagccaggtagaagtagctgaaaaacgccaccttagactgtccttccctgtggtcctcttcatcatactgatcagccccaaatgtacaaatattgggttggtacccaccatatccaagggcaacaagatatattgcaaggtaaaacaaggccatatcaatgcttgaatgttttccacatggagtttcttcatttccacaccctttaggtctgagcaagaataggtttgttgacaaagatagtgataccaaaccctgtcatgaaattggtcttagtatatatatatcacaacaacatgcttatcaatctctcaatatataaaagatatgaatacacatatatgtgtatggacttactacaacaaagattccttgaaagattgcacaagtcttgaatcttccccaataggaatcactgaggaaagcaccaaagagtgagaaaatgtatacagttccagtccatttgctcacattgttagcagcactggcattgtcttgttgcaaaaccctagtcagaaatagcaccaaattcaccccaactccaaagaatgccagtgtcacaaggccttgattcactgcataattcaatagagaaaaacaagagttttaattaatttttacttaagtggcaagtttccaaaaatacaatttacaaaacaagtaaaaaaatagaggattatattattggctaattatcttgactgacaaggcaacccacttaagggaatgtttgtacaattctaattatgttttgttgtctaagtaaaaaataaaggattcccacaaaataagataacctattagccttaactaatcaagttaagagggcttcaaagatcgttttcaaagttgcttc

SEQ ID NO: 62172 - DNA, 2052 bp, Cannabis sativa
  modified_base (42)..(72): a, c, t, g, unknown or other
tatgtgtttaatttatcgtttttagaaagttcatatttaggnnnnnnnnnnnnnnnnnnnnnnnnnnnnnnnaagatcttggtaaaataaatttccaacatctttaccttcttataccatgagtgtctttttgataccccttgaaatttgtaaagacattgatcacctaatgggaagattttggtggcattctaaggcctctcaaggtggtggaatccattggaaaagttgggataagctgtgtttgcataaacataaaggtggtttgggttttcgtaacttgagggattttaacttatctatgatgggcaatcaaggttggcgtctgttaaccaatacgtcttcacttgtggctcgtcttttttaagatagatattatccccaaggttcgtttcttgatgctgagctgggagctaacccgagctatgcttggagaagcataactgaagctcatgatgtggttaaattgggttctagatggcgagtgggttctagaacttcgatacctgttcttaaccagccgttgctcccttccaaggacaatccctatgtggtttcttctcatgaggctcttaaggactgtaatgtctccaatctttttcagattaatcgaatgtgctgggatgaggagcttttagaggacttatttgaacccagatatgtggaacttatttggaaaatacccctgcctgcattgccgaaattggatacatggtattgggcatttgaaacttttggtggttatttagtaaagagtgcctatcgtgctttacaagtgcgtaatggaagatggaatatgcatgataattctagtttttggagaaagttctggtatttgaaaattcctccaaaagtcaagaattttctttggagggctctctctaattgtgttccaactcttgtctctcttcagtctaagcgggttcatgtttacatcatttgttctttgtgtaagggagggatcgaaaccatctttcacatcatggttggttactcttttacaaaagcttgtttggagcatggattattgggtatgcatattaatgatggcaatgaggattttggtgtctggtttgaggatttctgtaacaatcatctagctgagaaaatagataagttggcaatgattctttggggtgtttggggagcccgcaatgatttactttggaacaataaagctacatatgtggaaaaagttgtttcatctgcaattacataccttgaactttagaagttttctcagattaaaaatggaggtgtttcatcttcttctagtcagcctacggctggtgttgagcattggattaaaccgtctatgggagagctggaggttaattgtgatggtgctcttttttcaagggagaagagtcatggcttggggtggattggtagaaatcatgttggcttgtgctttgctgctgctgccgtcaaacttcagggagatgtcgaccccattgttgccgaagcattgtcgatgaaggaggcgttgagttgggttaaatcaaaatgggaagaaggaggctctgttgaagagttttgtcctacaatagtggttatggagtcggactgtcctctgttggttagtgccattaatagcaagagtcacgttctttctcctcttggtcttattatttcggattgtattaatcttatacggtcctttttaatttttcatgtttcagttcagtttgttaaacaatctgggaaccaagcggctaattggttggctcgttcttctcgttcatgtcctgatcgtatttccagtagggggtctgtcccttctggtttggaagctattttgttagctgatttgctttaatgaaaattgcaatctttgtttcaaaagaaaaaatatatatacttatatgtatccaataaaaagttttaattattaaaataataaagtgcctacaaaaaggaaaaacttactattgggatttattcattaaacacaatttttttttattaatttttgacaattgattaaaataaatctaagggtccagattaaaaagttgttgcttttattttgtttgtaatatatagatatag

SEQ ID NO: 62173 - DNA, 1203 bp, Cannabis sativa
acttataaatattattgaacttgcattttgtggattctaatatcttaataatcttattttacacatcttatttgaaaatcattttcatactcactcatctttaatcttaagtcgttttactacttgtcttttatttttttttctaaacgaaaaatcccatcaaatatttggagctaggttagaatattcttattttgtttgaaatagtttttttttatgttagtcaactcccatgagttcgatcttgcacttacatgaacattatattccgaaacgattcatgcacttgcgagtataaatattaaaacacttacttttgagtacagcaagtttttggtgtcgttaccgggaagttacaagaaagaaatgatctttctacaaagtaagtaatattttctactagttatttattttttcattattctcgctttcatctaaaaaaaaagtaaaaaaaatcgaaaaaaaaagtttgaaaaaaaagaaagttatacacatatatttttatgggtgactattcaatggtacaattttattgtaaccatcatggttagatctcaaacctttgcccgacactttgaaatatgcatttttaggagagtctaacaccttttctgttatcattgcatctgatttagatgaaacacaagaagtaaagttgttagacatccttagaaagcataaagaggccataggtcggaccataggagacattaagagcattagcccaactgtgtgcatgcatagaattcacttagaagaacatgttaagacctcccgagaaagccaaagaagattaaatccaaacatgaaaggggtagtaagagaagagtaattaaaataatagatgtaggggtcatttaccctatttctgacagtccatgggttagtccaattcaggttgtttcaaaaaagtctgcgattactattattaaaaatgaaaaaaatgagttaatccgtactagagtccaaactagatggagagtgtgtatagactatagaaagttgaatagtgtcactaggaaagaccatttcccattacctttcattgaccaaatgcttgaaaagttagctggccatgcttattattactttcttgatgggtatgcgggatataactgaatcttcattgccctcgaagatcaagaaaagactatctttacttgtattgcgaggaaacaagaaattcgagtggacagaagaatg

SEQ ID NO: 62174 - DNA, 855 bp, Cannabis sativa
ttatttaattgctcaatgtcatcgtcttcccttactcttacacctgtagcaacaactagtgccatctaataattgaaactatgaaacaaaaatctagaaagacaaaaatgcgcaatacaagtccataaaattattaacttgcccaaattttctggacaggtgataaaaaagtgtgttgacattttaaaacataaggaccagaaacgaaaaataccttctgttaacaacattatgcacttgacaaagccacatagagaactcggtgtgagatccaacttgtacagggttttcactgagaataaggcaaaggtgtgataccaaaataatcagttgatgatgaaagaactaagaagttaagagcaaataagacaacacagagggaaatgcatgttcattgttcgaaaaaaacgacaacacagagggatggccaaattcatgaaaaataacattatatagatgacttcaaactcatttcataagtaaacaaggtaattcatttttaccatctgtgtttaaatacaatgttttagaattttcatttgcaaagtcataaaagccaagatgctgataaaggccccccgaaaaacatgtgcataaggcttagacctttaccccaagtggcgaagacatggtgacaatacaacactgaaatgaactatgcaaatcaaatatgaaaaaacttgagatattagaacatacacaaatacaaagagaatttaacactcacattacacacagagctctcagcagaaatgaaattttgtataggaaaaaatttggaaaaaaaccctcaaagcataaccgacctctcccagaatggaatgaaggattatacctcaaaacctttttgaagtg

SEQ ID NO: 62175 - DNA, 1179 bp, Cannabis sativa
atgacaccttaaatttactaacagtttagtagtttggaaggttttactgctaaaatttgagctcgaatggttaagttcaagtaaaaagatagttgagagagtttagtcgccaaaaactctatatatatatttttcttcatattatattatatatgttgtatattgcatgtattgtaattcatctcttctacttttattgtaatatatatatatataaagtgtgtatatattgtatatatgtgtggtaatatttatgtaatcaatctcttcttttagtccttgtattattttacaattgagttgtaatttatcttgatttatcttttgattgatatataaaatatctaacaatcaaaagtttatttcttttcaatggaaaaagagataaattaatattttgagaatagatatataagagattttgtgggaaagtcatgcatgattgagcatgatggtgtattttgtgttttactatttaaatcatagtaatatatgtattaatatattttctttggttgagataaggaagttgtatatgttaatatatagaaaattgcatatttatgtgtggtatatatgtgattatttatgagtttatatcatatattatataaaatggtatatgtaagattttttttaccaatttaacctacacacaatagaaacaaatcaagttttaccaaaggtcaaaaatgacctttcaccttgagtcaaaacacagttgactcctttgattaatgaatcaaatgacagacgacaaccagaacgccaagtcgttttgatccaaacccaaataaccttatgaacactctagaaccaaacatacactttgaatactcaaaccaaagctcaaaaccctagcagagagaagaaactcaaagactactatcaacctagaaaaaccagttaatcctttctcaaatcaaaatttaaaccatagatctatacacacagagatatataaaatagtaagagcaataaaaaataagagagatagcaccaagattttatagaggtttgccaaatgttgctaggtacatcctctttcgagctcgcctaaaaaaatggctcgattccactataagatctttaagatcaataaattacaatgttggattccgaatcacaagactggtaatctttttattattacagtgtttattctctctctctctctct

SEQ ID NO: 62176 - DNA, 1179 bp, Cannabis sativa
aataatcagggcataaaacccaacaaagcgaggccaggctatggctccgagttcaatcgtgactttgccatgataaaattgaatctttttggtcccgaaaggatgacccttgtcgagagaagttaagagtcaagaaactacaacttgagaccctcaggggtaatcacgaagaattggttgaagaggtgtgtaggaccagttcgacgtggcatacctttaacaccagagcccacaaaatgaagggtttgtcgcttgtgtcagatgggaaaggtgtacaatgcaaaaagaaaattactttttgtccaacgcccactatcctcgttggtcttattgtactaaatcagatacgcagcagaagagtttcgtattatctgattatcattgtaccatagcccctaagatctccagatgtgtgtatatcaaatcaaaacaaccaaaaattataagtttagaatatacctcttgaaggctattagggtattctcgacatttctcgtacgttgtattcttaatccagttgatgaggaattaacaatctggactcacaccagtgtcttccaaatccaccacacataaggaataattagagctattaggataaggtgtaaaatcttactcttgttaaattctcaacacatgagcaagaataattgagaaaaaaaaaaacagtttcctttttctctctacagatttcgaatttagcagtgtaaagtatcatcctaatttcttaaaccaggctagtagttaaatctctttaattaaattattatttaattgtttaaataataaataaatatctataactgaattcatttactaatatttatgagagaatctctcaactacttgaaagaatatctcaacaatcttgaaatatctttaaccacttttcaaattagatatttacctaattaaattaattaacctaaaaaagtaattccaatagagacaggaacaagctgggcacctacaactgtctttaggacatggttgatgtcttttgtcctgataacttttatcttgacaaatattgtctcgacaaatttgtctaaactatttttatcttttttccaatctaattaatttgaaaaattatttattgattacaaaaataaataattactattttccgattcaaaaaagattttcttcgatcatctttatacaactctttatccc

SEQ ID NO: 62177 - DNA, 678 bp, Cannabis sativa
atgtagtattaacttttatggatacctaaatatataataatttagtataaattaaaatttaacataatattatataaaaatatgatatctaatccaattcaatataatacaatacaatacgacctaaaacggcgttccaatcgagcccttggtgtattatttgaggtcgttatagttgtattgtctaaattttcgatgacaactttgtctcatgcatgtagctcgctcaacttatggtttggcatatcatactttttagttagataatgagctatctaggttcgaagagtcatcgattgcggatgttaacatcgtaaattcataagtaattttagtctttatgtccaaaaaaaatgtcaaaatcatattttttttcctatccaattcactggtaatttttctcttcttatttcattattttatttcaccaagcacagtgatccattattttccttacaatttaattttatgatcatcatttcattcatatttttttataattattttgcagtattttttatataaatattcgtgagatttttttttcctctttcaatcatcgtaaaaatttgtattgaagagtggaaataaaaatttgtattgaagagtggaagattggaattggggtgtgtttatcgaattttttgaatactcattcaatacaaaattaagttgaag

SEQ ID NO: 62178 - DNA, 1380 bp, Cannabis sativa
taatattgttttgtcgatatccttagacttgcccacgatacttaaaagagttccaagtacattgtcgcacatatttttctcgatatgcataacgttgagattatgtctgagagacaggtccgtccaatactctagttcaaaaatatactcttctttgaccaatttaactcatctacacaacatttacgttagactccaacaaatttcttgtgttttccaggaaaacgatattgtatctgctccaactgagctaaaacatcgtcccctgacaattctagaggaggtggtcttttctcaatttttctaatgtattttttacttctccgccttggatcgtccattttaagaaatcgtctgtgcctaacataacaaatcttgttgcgtaatccaatggaaggggtgtgtttgttacacgtgggacacgccttttaccctttggtgttccaaccagacataattgcatatgtcgtgaagtcattaatggtccataaaagagtatcaggcaatgaaaaacatagtcatgctgtaaggatctcgagcttggacacctaactcctacaactctatcaattcatcaatcaatggtctcttgaaaaacatccatgtcttttctaggggcagtgcgccctggaatcaacagagacaacatcaacgagtcagctttcatgcacttccaagggagtaagttgtacgagactaagataacaagccacatactttaagagttactcatgttaccaaacaaactgaacccgtcagtggccaaacccaacctcacatttctgggttcaagtgtgatggacggatggtttctgtcaaactgcttccactcttcagcatcagtaaggtgcctaagcacaccatcctctttgggtctcttagagtaatatcattacatgtcctcagccaagtgtcttgaactgtataacctcttcagtctcggaattaagggaatgtatcgcaaaactttttgagcaactttcttttggtctccctttttctttttccaatgactctcaccacaaataggacaaaaatcttttatctcattgtcttcccaaaacaaggcatagtgatacttgcatacatcaatggattcataacctaaaccaatgttatgcaacttcatcttcaactcgtaatgggatttgggtaattttgtaccctctagaaataactcaatcaatatggagagtaacatatcaaaagaatggttactccacttattgagaactttgtagtgcattagcttcaccaatgcattgattgttgattttttgcaatccgagtacaatttagtttccatattcttgaacaaatcgtcgtacttaccactaccatttagaaggggctcggtgaaggaagcaatggtagaacttg

SEQ ID NO: 62179 - DNA, 1702 bp, Cannabis sativa
atcttgttgatgaaattgttttttctgcttcttttaatgttgatgaaattgatttttaaaatttgtatcatttttagattataattttttgtattgtattttttcagtataatgttgatgaaactgattgtttttctgctgtatttagtgaaatagttagtttattttaatgttgatgaaattggtttttaaagttgatattatttttacattattattattattattattattattatatgaaacttgttttagttaatgatgtccttggcgatatttaccccacattgaatgctaaaatcagctataatttttaagcaagcaaataggagattaaatgccaaaacagagtatgaagttagaaattggggtattaagtattcatataaatttatatgttggaaactgatttttatagtttgtgctattttttagattatattttttgcattgtatttttttatgttgttaacaaaactggttttattttcttatccttacccccatattgtatgcttaaatcaactctagtttctttttctgctacttttaataatataattggtttatccaatgataaaaaaatatagggtaaagctattttctgagctgaagcaataacatcattggatctaacacataaaatattgtttctgaaatcttttatttgtaataaaaacatgaaatcatcagtgtcatacacatgcatttaatggtttgacaaggttcacaagttcgaaactagtattacagggttcacactattcacaagtttgaaactggtttaacatgttttaagggttttgaaattggtttcacaggttttaagggtttcataatggggttgctctatttataatgttattgtatattttaattataattttctttttattattttgtttctaggttcaaaattgatttttcacacttacattttatttttataatattggtgtacattgtatgaaatatatttgtagagttttttaatttatttttgtattttattgtgtgtgtgtgtgcgttttccatttaattaattgaagaagctagtttcaattatcttcaatgattctcatttatgttttgttttcataatcttcattgctattgtgtgacaaaacgaatttttatttggtttcataatatttattgttattgtaagatgaaactggtttcgatatatttttttgtattttattcagatggaatctgattcctccaataaggatgcaatgagagagatgttgttaaaaattcaagtgctgactttgaggaaaaacttcttctaattaaaattaaaattcttaagaaggttattcacaaggaaaaaaaaaataatttgatccaaaatttaaggattcatatttggtatgtattttttttttttgaagtatattaattttttttaatttattttcttatgtatgttcaattttttagttggttgtactagataactagtttccgtgtttaattattggtgtgttattttacgtaattgaggtttaattttcattctttcttttgttattttaggaaattagttttactgtatcaaatttatataatttgcttgttttacgtaactagtttttctatatcacttgttaattggttgttaatataatttgttgtaacgttcccgcttcaagcctccattgggcccttacacccatggactaatggctcttataca

SEQ ID NO: 62180 - DNA, 2555 bp, Cannabis sativa
attccagacgttctcaatttcctcgtgctcttccttcaccgttgctaggtgaagcactaccgctgtacgtcgtcctctacccctgccttgccctcattgtgtaagtccttatttctatataaatacctcttctttgtttgctagggcaagtagtggtagtggctttttctttggaaataatgtgaatgtttgtctgtttgtttgttttttctcgaatgatggtcatggttgccgcctgtgtgacacctccttcagtggatggccgatgatgcgtttctttttcttctgccattatattttatatttgttattattattattaaagggggtgaagtcgaagaatttttggctttcgttccccatgtgcctcttttgggcagtttgacactgcccttgcacgtcttctgttcttttcccttgatctccccacgatgcttggatattttgcacccgatgtttgttactgtgaatcatttgattcctcttgacattcatttggaaggggcctctttccatcggttaggggacccccattcccctttttgacttagggtttgttgtgggggctacttgttggatttcttatcttttagatgagtgaagttctccaagatcttcacaatcacgatttctttgggttcaactaggaaattctcgagcttcaccaagtcaatcctatgtcaacccctactgccactggtgcaaagtcttctaagaaagggccaaagaagttgaccaccttggaggaaattatgaagggtccggttgcttacaaaaaggtcttgccgttccaatggctgtgaagctgacatactctacttgatgcaaacttgtgcccaccagctagagaagatagtgaccgtggcttggattaatccatctagctttggggtttatcaccgtctccgaagggatgaggagacgccaaaccgtaactataatagttttggagcctagagccaaacccatcttatgtctggggccatgctacctctccaagattacttcattgattttctagtttctctcaaaatttcaccataccagttgatacctcaagcctaccgcctgttgtcaggcctttttatcttttatgccgccaagggttaggccgcccccagccctgctgaaattttatatttctatgaactactttccgtccctaaaaagggggacaagtttaaagacagtttttataaattacagggttacccgacaaacgagaccctggtaccctttaattttcaaaagaacattaaagaatattgccataggtttttcttttcctctgatttcaaagctttcaagcgtccggacctattgacgaattgggtaaggatccctccgatgcaccgtactgcccccaccccacttttcctgaaccacacacaagtgtttgccggttataagaaagaagatttaattgtggatgacttggtgacgactggtaattactggagggccaaattgatcttggagagtcaatccgttcacgactttaacctgtccaagatcatttgtcccaatgcctagaaccccgggaatgggaaggtgcttagggtcgacattatttcatccactgaggaaaaatacaacaagtatatgtataagagggagcaggagctcgcctatgctttcctccaagagggtcactcgggaggaggcagggaaagagaagacgccagccaggcccaaatttttgttcccagtttcaaactctggagcccccgatgcaagtacgtctgaagtttgtaagtctcttttgaatattcacttcattccttctgtccagaattacgctaacttaaggccagtggaatttgataagagattgtatagatttcggatgcctcattcccgatggggcgataatgccaagaatttttatttctccaatttaagtcatttcttgggtcggtcccagatgggctcggtcttcctgtgccaatccctttgagccactcctcctacatgacatcgacttggtttctctcttcaaatagctttttaggggatgacgacgccagctctttaatttatgaatttgctagggcagaattagatcgccagggtaggattagtcttgctacaatatacatgcatttgtaattctttggtgttactctaaccttctatttattttgaacagcgaaacccatggagtattttcttgccatcctagcctgaacccatagccttgggtcggacatgctagagcaccctcgagtgagcgtgactccggggggacctgccaaagaatttcttgggaaccaagaggtggttctgattgaagaagaagaagaagaagaagaagaagaagaggtggttcctcaactcgactggaagcagaagagtgttgcttctgagcctaaatcttccaagaagttgaagcgagttgctaccctcagtcctagtgctaattctgggatcccatctgaagtcgacgagtatcctgcccctccaggcatccttctaatccctacccatcttgacgaggaaagggtccagcttcgcattgccaaccataattatgcaatggaggaatgttgggaata

SEQ ID NO: 62181 - DNA, 739 bp, Cannabis sativa
ttgttaatctttttttaattatcaaagttgttactatttcttagttctattagattagttatgtttataaatactttcattgtattcattgttaaaagtaatgagaattatcataattatttctcttcatattttttatttttttgttactcactttgtcttctagtcaagttggtatcagagtaatgtgtccataacagcttctagtattttttctacaagctcaattatggttctataccatgtttcttcctctactaagattagatcagagcaattaacgttttggcagtctcaagtgctttttgtcgttcgagcttaagatcttaaagatattcaccgattaggagaaaaataaaaagattatgaagaaggtcagcggcttgaaagaaaccatgcaacttttgaccaaaaaaacttgaaaaggagaaagaaagtgatgccaacttcatattttgattaataacttttaagcaattcgataaatctttaaacaataaattgttgtaactagttatttttagtgtaggcgcacacttctttttaaaagtttttttaaaatgaatttttggagactctatttatgaaaagttttgtattttcacattattttatgtcttaaagttacgagtccttataccttctccaagaaaggaggccacacttaaataacgattgttgcccctgattttgcccaatatacgtggaccaaccggatagggacacgtggaccaaaaga

SEQ ID NO: 62182 - DNA, 804 bp, Cannabis sativa
ttttagtgctttttattctctacgtttttttttttgaaagaagagttataccaacatagttatttatcttagctttggtataaaaagtaatactataataacttttttttgaaaaaaaaaaatactcatgttaatatctaaaaaaagtatatttttctgctcatatttaatttttttttttaagaataataactaatttttaaactcaaagaatttttttatatttatttttatctcttttcattacaattttaaaattaaagaatactaagtacacactgttaattctttaagttcaaaattggcattatttctcaatttatttttcaaaatagtcattttattatgtaaaacccataatttttttaccatcatcaaatattatattcaaaataaaaaacaacattctagtttcttttataatttattatgaaataaaagtaactaaatatttaaattaagtatgtatactaactaattagtaactttattatttgacacttaaaggctacttgatagtatctaaattaataagtctattttgtcaaataagtttgatagattttttgcaaaatttgtaagaaaactaaatagtatcttaaacattaatttcatttagctaccattatgttatattgttgtttaaaatactttacattaatttttttttagtaacatttttattacttttaatcagataaaataaagtataaacacttatcctataacttattagtaaaattagtatatataatcattttaaaaaaaaatatagcatatattataattttcaactaattttgt

SEQ ID NO: 62183 - DNA, 906 bp, Cannabis sativa
aaaaataatttgattttcgatctgaaattattttatttgtaaagctagctaaaaaataagcaagttagctttttatagaattgaatttggattaaaattgaaaaagatataattttttgaagatttggaatttggctagggtttaaaccctacatgtgtgcgtgcggatttgcatttcatggggctgatgctcgaacaacacgccattcagacaagacatgttcgagaaataccccccatccttgtgaggacactatgcaatgcatactgtctgatgttgccattttttctttttatttttcaagttttaaaaatcatttttcaatgaaatcaaatttaaattttggtagatttataaagattcttattttcaaactttaaacctaattattagattaaaattaatttttattaattttattattcattaatattaattttaaatgttaggagattttaaatttgaaaattaatttttctacaaatttgacattatggttattttcaatatttaattatttattttttatttattaatttttattataaggtgagatatttacatattgtatgtatttatttaatatatatatatatgaaatgatcttgtttcacattaaaataataataaatttgaaaaataatttggatattttttaaaattcaaacataagtatcaactttcaaatttagttattttaatatattttattgattgaaattatataatttaaaaaaactaatcatttaccattttatcttattaaatatttattttattgatatataattttttaaataacataaattttgatatttagttgaaatttttttgaatagatatttagggttgtcacaactctaattttacagggtttgtttattatatttttttaattaaatata

SEQ ID NO: 62184 - DNA, 1592 bp, Cannabis sativa
atttcagatattgaagggtgagacgctaataccaaaatggttatctcccggtgcacagaacatgattaggaaaattcttgatcccaatcctgttacccggataacaatggaaaacatcaaatcagatgaatggtttcagcagtgctatgctcctccaaatgcttacgaagaagaagaagaagaagatacgtacactgacaacgacgatccctgctcaattcaccatgtggtatgcccgtggaattttattttactcttcttttccccactattgttttgggagattggtgttaataacagaaacttgattctttttgttccagacatctgaagaagagaataggacttcagactccccggttttaattaatgcctttcaactcatcggaatgtcctcgtgtctagacctttctggtttctttgagaaagaggtaaagagtggttggctttaaaaccattcattattttacatattgtcaaacaatcactaacatcagtatatccaattttgtgctgattcaggatgtgtcagagagaaaaatcagatttacatccaattattccgcaaaagaattgctagagaggatagaggatattgtaatagagatgggattttgtgttcagaagaaaaacggaaaggttggtttgaattcttgttaatatgattacttactattaattcagatcaaatggagttactcacttacttgtcaatctctatttttcagttgaaagtaatgcaagagcacaagggccctaacagttcgggttgtctttcagttgtagcagaggtacacttcattgatgcatctgatattcaagccattgatattgattttctattttactataattgaaattttgaaattaatcataatttcttgtgaactttatcaggtgtttgagattagtccttctttgtatgtagtggaattaagaaaatcatatggagatgcttctgtttatagacaggtacactactttccttgcccttctctctcttattactataattatttttacttaaaaaagtcaattcttgtgtttgtgcagttgtgtaaaaagctttcaaatgatttgggtgttccctcaaaccaggagatcttgaccacaggagtctaaaggtcatttgattagaagaagaaagtatataaatataaccatatgatataaaagtaaatctcatgtatatgtttttttctttattctaaaatcgtaaaagaaaatatgtatgtgagacttacattattaagaggaattatttcatttttttttccctttctttttggaaatgtggaattagttcattctggtcgcattctacagctaatatgtcttacaccaatgtaaagaaattaaagttatatataaatacacaatgacataacatatataaaataaaatcctctaaaatgagatagtagtagacaaagatattagttggaagaactcatttagatataatctcctcaataagaatcgatgatgaaatttgaatggataaataaggtgtaagttttattttagaacttgtgttttactaaagtaatatattaaattttgtataatctaaaatggtacaaacaagatct

SEQ ID NO: 62185 - DNA, 1301 bp, Cannabis sativa
caacaattacaaagacaattgacttaaataagtttagactccctctaaatctttgctgtaatcctttgtaatgtacttcatgaatctgatttcagaactaccttcaaacttcttctttgaagtgtgagtgcttacttcctcccgaagtaaggcttgcataattgctctgtgatgggcttcttgtagaaatctttcaaaaactcccactaagttcatgttcttcaatctctttggtctcaaagtgttgtctccatctctaccgtacttacaagtcaccctctttctccaacttacccttttatgtttctggtttattttgttattattttattattattttaattttgttctactgttattttttttcttttctttatcaattttttttagtgttattgtactactctatttttaattgtaatagaaaaataatgaaatttatatgtaaattattttctttagtatcttatgctccaatacatgttcagttttccttcgtgtgtggtccactgttattttttagttgttctgcatctttttattttttatgccttctcctgtattttttcctgttgtgccccaactccccacattttgatgcatttgttaagttgtttattttgccagtaaactttgatcctcttttttttttttttggtcttccagattttaccctttcaatgggaggtaagactattactgcccatgattctttcattctgattaccttaaacaaatatttagtggttgttttaacttgtgtaatttgaaactaatatttgttaaacattcgaaacaatagtggaacaactcaaaaacaacattagaaaaactgacagccccagtattaatggttttaatgtttctgcttcatctcgtcaaaattaatagttgttttccaactgttttggtattgctatggtagttctgtttgtaggggtggaagatagaagcctcattttttcggtgtttatagtataaaaggaaaaaaaaaaagcctaaacagtacaaatataatttttgttatgggcagtataaatgcaaatttttatcccaaatacaatttttttttgtaaaacctcttttttacaattcaaatgtattctttagaaatatatacattaagaagtgttccatatatatatatattgactgttactcaaatttttctaataatatttgacttaaatattttttttataaatatatttttgatatagtataaaaagatttatttttgatattttctttaattaagtaactaaattaaatataacaattaaaatttttcttttattatt

SEQ ID NO: 62186 - DNA, 1201 bp, Cannabis sativa
tgtaatacagttcaagttctcaaattatataatacatatctctgatccattcttggatagagcttctctttcaatattctctgtttctctctcttgattctgctctaacagatataataaaaaaatattttattttaatttgtaaaaataatatataagattcatgtgctcaattaaataatataattcaattaattagaatataattacacgtttccctacaattgtattctaccaaatgcctaatgaaataatatagataaaatttaaaataacaataataactatatcatttaatttgtgaatgagtttcttcttttaaaaaaaaaagtcattttctatcctaaaatgacgctaaactacttcatgaatcataatattaaaatttgtgatttacatgagatagaaatatattgagaaagctagacaataaaatttaaatataaaaaacaaaacacctctttgtgttttttcgtcccaccattctacaaaaaataatgaaaaaatagattaatatcaattatataataaatatgattttcatattacaaaagtaaattctaatgcaatttcatgattgaaaaaacttatttgtgaattagtcccaattagtctctattgttgagactgagattgagtgtgccaaaagtatatctaaattttccttccaccaataaaatattttgttgaagtcatttgaaaaatatgttatcggtgtagagagaaagctaatcgaaataacaaaacagtcttataaaacgaaaagacgaaatttaatcataatgaccttacatactaaactagtaaacttaccatactgcgactacatatctggccttactttaaagagggaaaaagacagatatgcgcctgtatggatataaatgatcatttaaataaaaattcataattgaattgttaaggaaaatactaaactggctcatgaactaaacacttctttttaaggatatactacacactttttgtttggtatgcatttcacaaatttaaatcccccttcccttgaaaaatactacagatatgatgcatattgcatgtaccacgtgaagtaaataatttattgactgtaagggggcgtttggtactaggtgttcaaaataatttgattatagggaatattatgaaggagaatatgattatagggaaatgtgtaaactgtgtttggttgtgtagggtaata

SEQ ID NO: 62187 - DNA, 2201 bp, Cannabis sativa
ttcctctatgaaagtgatgggttgggttgatccaccagtcttggtcttttggtcaggagctgacttacctcccatagctctccgtcattatttaaggccttagcataatgttttaactcatttcttgtggtccctcctatatgagggcctcttgagatcatagctacacttccatttggccttggaggttgcccaggtgcatgttgattggggacaccccctggaggtacttgtgtgtctgacacttgcaccttggaggttgcccaggtgcatgttgattggggacaccccttagaggtacttgtgtgtctggtacgccctcaggcactggggctccaacttgctaggaatcaggtgtagtaatctatctttaatccattcatacaagtggcctaatctaattaggctctcaattttgtctttcagatttttacactcattggtggtgtgacaaatgttgttgtggtacttacaccttttcttatggtttctcctagagctaactcgatacagaggaggaggccgttgataatgagtattttacctggtagaaaagtatactcgttcttgggtatctatgacgtctgtatattgtgtatactcgggggtgtaacctcttctttgcctcttatcctccattcgagtgctcccttttaaggatcttttactccaggaggttttgggggcacctgccaaatgtgtagcctgtggggaaaattgagcagggtattgtgcattcgcttcgggagttggattactccctcgtaccccaaaactagattgagctagaggaagagcaaggttttgagtataccgtggtcttgcaaaaaattgtactctgcttgcctgtggtgtaactaggagggaagctcccaaaaactgtgttcctggcatataccctggtccgccagtcgaataatatcctctaaaggttgttatttgcgcttcttctaagttgatgtacttttgaaccctcttctaaaagtcctgaaggctagtggccccttcttgctggagttcattctagaaaggaggtccgtattccaacttggagtagagaaaattgttgtccatcatctaatttgtttagtcttggaggcttcttctttgaatctttttatcaattagggtcttgatcagcagttgtttaatgtttgtcaaggcacttacttcgaggttaattttcctagctgccacaaactgttttcgaaagctgacttgtaacttattccaacaatctaaggatcatggttctagtgtcttgaatcactcctcagtggatccgcctaatgttaacagaaaatataaccacttctcatcattgctggccctcatgattgtcattacccagttgaatggagacaggtgatcactggggtctgtgttgcctgtgtacatcgtcatttcgggaattttaaaatttttggggagctctatctcaagaatgcttctagcacacaactctcagtcttcacaattcaacgtcgaatcatttcccttttaccttcaagacactttagctatgtcttttcgaaggataacgagttcagcaaggattccctcattcaaagcgtcctctgtaactagtattgtttgtttctttttctccaagtgattcctaaggtcatcgtgcctgtcgttaagcttttgtcttaaattaacagggggtttacgatttttccttccactttccctgggcgcttgatgcatgaatacactttttcggtcttcctagtcccgagggccagtgctctctctaggagcctgccccttctacggacctttcccctttggaaaatcaaagcgaacctttcatggatcctgagcctttttgttcttttctgggaaagatgtgggatttttctttggataaccttatgagggatactagataaggcttggttcccaacttttatgtctttgggtacttagtgaagattcttctcttgtttgcttggtctatgacgcatagcttttgggtgcacgtcaatgactgttgtctccatatccttctacatggcgaccattatctcttgcatcttcctattttgctctttttatgttgttagttcggcttcgtgattagtagctttttgccttagggccactaacacggtgtagctaccatcatcataggtgtcaaactcttcttggttttcctcttactccacgtcatccattttgtcttgttcttctacctc

SEQ ID NO: 62188 - DNA, 661 bp, Cannabis sativa
ctactatgtctgatatgttaatcttctgattgtcaacattctatccaatacccactagtatcactaggtatcactatctaaatgcgactctatgtatatccatacttctatttctagtatacaagataaatggtatcataaaatatgtgtatctaaaacatgtgcacatgtacatatatatgtatactaaccaagtttaatttcgtaatcaggtgtgcctgtcaacttgactagaaaaattagtcgacgatcagaggctctaagtcacagtaacgtaaatctggtaagtgtctattctaaacacttaataatacttttataaaatttaggattttctaccaaattacgtgggggactcatcctaaaatgaaaacacataatttgactctaacttatgtaccatgctgtagagcttctcacaagttttctaacgatataaaaaatgttcaaaacaaacattaaagtgaaaaattattgccaaaatacaaaaattgaccttcccagtattgctccatcaggaagtccaatttttccttctatagtgatttgtgagtggttgtggtatccaaaatttgggaaacttacaaaatatgaattataatatgtatcaatatacaatatgtatgcattaattaataaataatttataccttgtcatgat

SEQ ID NO: 62189 - DNA, 556 bp, Cannabis sativa
aaatttataaacaagacatagtcttatttagaattctaattgattaattaaaattaattaattgagtctacaagacaatattatcttagacaatgcgggaaccatgggcctatgtcaccaagctcccaataagtagatttgatatttaccaggaaaatttcatatcttattaattcctcatgactctactatagatttagaattgtactattgattacataaaatgctctatatgttccaaatatttatttgatatgaattagccattacttcaatcaaaatcatcaaagatcctatatagatgttacatcgagtagggacaaatttaccattttacccctcaatgtattttatccataaagcatttagcttcctataaataatattttagtaaaataatataattaataaaataagagctcttccatctatctgtattcaaccaagctcaaagaaaaaatcaacatttcccttctaaatagttatagaagctataaattctatctctatgattagagctcccactcaattgcactaccatgttcccaagatgtaa

SEQ ID NO: 62190 - DNA, 965 bp, Cannabis sativa
ataaactcttaaatacaagtacatgtatctaatgtatttttggcattgtaggaattaagtaaggtgcaacgggaacattcctcgaaaatccaatccagacatcgaagtggtcagagtggaatgatgaacgtacgggaagttgtggtaagtaatgcttaaattctaataatgtgctataaaatttaatttgtactcatttaattgttataaaataatgtagaaaaaggatctcgacgttcaagatcccccccgccaccgtgtttggatcaaatctcgcaccaagagtcgaaaacttgtcactaattacaacaaggaaattgcagagaagatagtaagtatccttaattgagttctactaatgagttagtatatataattcacataataattgcttgaatatatgcgtgcattaggctcaattagaggagaagcctacttagggacaaattcaggtccatggccaaaacgatatcctgacgcaggcactcgggacaccagagcatcctggacgtgtcagggctgccgggtatgctagtagttgaaatgttatttatttagttacacaaataaaatcatagctaatttgcattttatgattttcaagttcctgactaaggcatctaaactgttcggcaggaagaaaagggaagtctctgatgttgtggctcggcaacagaaggagatggaaatattaaaagccgaagtcaaatcccttaaacagaagaaaaacactaccgaacaagaggaagaaggagtggtggttggtgaggcgtatgttccacaaccatacgctcgtgaggatgagggtcaaccacaaacttatgctgaggagtttgtttccctcaacgagcgaactctcctgtacaatttcgatgaccatgcggcccttcatcagcaagtatatctctgctctgacaacatcgagaacattgtggcccgagcgtatttgtacgagcatgttggta

SEQ ID NO: 62191 - DNA, 1319 bp, Cannabis sativa
catggattaataatctttcataatccatgtgcaacaaactaggaccgcgactcaggccttggacttccgaccccaaacctccgcccccgatcttggaccttgatgttgaattatttttaaatattataatacaaatttattatgttaaaatttatggtcgtaataattaatacaatacaaaattgaaaattttatcaaaataaagtatttatttttatttaaatataatatgatctttatacggcctactatacaaagttttacaagcactgatgtagaacctaaaaaggacctgaatcaatagagctctgagataatcatcacataatttcaatagaggtggaggcgatgttcaatggcttgcgcgacttaaacagtgtaataaccatagttaagaatctataataagtgttgttctaataaaatcattacttgaaatttcaagcatcaaggtttgatttgagcatgaatttgcttgaggctttacaagaccacattggccatatcaccttaacaacttttctcataaacaccacaatgtagatgtttatttcttttatttcatctaaattgggaatataaaatataatatccgtttacagtgaaaatatttgaaaacaaattgttaataatagattactaagagaaatagataaaaaaaaaaaaaatccacccaagatttaataattggttcattcttggcctcgatgaagtccatcttgttgtgaatgaatatagttcacttaaactaagtaacacaaagaatagcaacaaatttaaagcttaattaaaaaaaaaaaaaaaaatagaagtaaacaattcaataagaaacacctattctcttggcaagtaagtaaacgtgccatataaaaatataatgactagaggtgtacattatatttttaccaacttaatataaatatcgtcatccaatttaatttgtactttttttatatagtacatccaaaatattatggattcaagtcaaaaaaattcacaaaaaggcgaattgaattagttattttgtattgattactttttaatattaaattatttgataattaataaaaaatattttttcacataaaaagaacaaaataaaataaatggttgatattttgtatctccaataaaaatttaaataaataaaataaaaaaaataacaaatttaatggaagaagggaaaaaattatatgtaaaaataaatatttgattttgttttaaattgtatatagaaaaaaaaataatataagaatgaaatgtacatttgatatattaagttttaaaatatatttgtattatatgtattagacttttaa

SEQ ID NO: 62192 - DNA, 903 bp, Cannabis sativa
tcttgaatgaagttgatatgtgggtgcaattgcatgatctcagatcggggtttaaaatggctacggttgtcaaggatgtcggaaactatattgggaagtttgttcaatcggatgaaaggaatttcatgggcttatggcgggattatcttcatgttcgtgtgactttgaatgttatgaagccattaaagagacgtatgaagcttcgcaatactgccgggatcgagttctggactaactttaagtatgaacatcttcccactttctgctttatttgtagaattatggggcattctgaaagcttttgtccgcgacggttcgaggttagagagggtcagataatcaaactgtatggggaatggatgcgagtgagacctatacgtagaaaccacatgatcggagctaaatggcttaagcagtttaatgctgctttggacgaagtttctacagcaaaaaatgcggctcgtggtgaggtctctcaatcgacgatggcaatggttgaggggaattgtggtgtgctggggtcgagtccgatgatagtggaggaaactttagttcaacatgaggcagggataggaacatcaaaggttgttaatggggaccctataaatatggaagatattttaccagctgctatgcataaggaattatctgaggatatcaatgaggaggcttgtcttttggttcttgacacgaagaggagacgaacgactttggaaggtactgatggggcccatgggagaggtgatgtggcaacgggcgaagtggtaaatggttcaaagaacttgactttggtgggtctggtgtctaggcccaccaatcattatgaatattttatcttagaatttccctgggcttgggaacccatggactttacaattccttaaggatcttgtgatccaaaag

SEQ ID NO: 62193 - DNA, 1183 bp, Cannabis sativa
gtaggtatgagagactacatagtactacatagttgtacatagttgaagatagttgaagatgttgaagatggcatggcttaaatggattgattggtactacctatattaataaggtgcatcttgtctttcagtagcacatcatgaaagaactatactattaagtgtgcttaacttgggatgatttcaggatgggtgacctcctaagaagttcttccaagaagcgtgcgagtgaggacaaagcacgttggaaatactcacattggtttgtagggccagtcgtcagtccaggaagcagcaagagtggcataattgtgtataagagccataaatctgtgggggggaaggcccaatggaggcttgaagcagggacattataaaaaaagaatggaccctgtcagacaaccgaccgaccaccccaactagaggactagctgagaacgatcctctacaaccataataatctgaagatgatctagccgttaatcacgctctgatcagatggccatgattcatccactaggtttggtttcttgtctccttagaactcaaggaaatataggtacgagcctatagaatagatgttatgttatgtgcaaaaaatggaaagaccaggagctatacaatcccacatcacctggggaaggtcacgtgtgatgattctgagattgtgtagttatgggactacatagttgaagatggcttaaatggattgcttgatactacctatatcaacaaggtgcatcttgttttttggtagcccatcacgaaaaaattccacggttaagcatgcttgacctaggataacttcagggtgggtgacctcctaggaagtttccccaggaagtgtgtgagtgaggacaaagcacgctgaaaacacttgtattggtttgtaaggtcagtcatcattccaagaagcagctagagtgatgtacttgtgtataaaaatcatcatcttgtgggtgtaagggctcaatggaggcttgaagcgaggatgttacaaatgatattagagtcttgacccatccagaaatgtggtcgacaaggacatcggacccccaaagagggggtgattgtgacagtcagggccccgtgattcaaaggggaaagatcaggagctatacaatcccacatcgcttagggaaggtcatgcgtgatgattctaagactgtgtaggtatgggact

SEQ ID NO: 62194 - DNA, 1506 bp, Cannabis sativa
gacggatatatgttaggcaaattctaaagccattagtttggcatatcaataagagtggtatcgatgttgatagagttacattgggtactgacaaatatatgctaggttttgttgtatgaatgttccagacttagtacgcgttgaatgcgagatatgattatatttaggtgtatgggcgccgattatgatctggttatatatttatgtttatgcttttcttattgagtctgttgactcatatgtattatttacatgtgcaggtaagagccaaaactgaactagagtgagtctagatctgaatgaagattgtacatatcaagacgattagacttgaagtgtttgggtcttcgggacaatttaagtccactttttgtataaaacatattttgaaaatagttataaactttggacggggtctcagagttatgtagattatatttatttattaaagtttaagtttatttaaaaaagtttaaatcaatcatatttttcaataaatcctttgattagcaaaggtgtgcatagtaatcaaaaaatactgtagcgtgcctaaactaataggggttacatgaatatacctctgctacaataatatttttcccttcttaatttggaaaggattcttactataacattgagtttcttctcaaacctggatattcttatttggcatcattttaacttcgaccattacactgttaaatcgggtttccacttggaaaattctatattgaagatggccatctctcctccacctctgtttcatcgtcatcatggtcgggttatttctattctcttaacttgccacacaaaaatcaaaatttttgcttggcaagtggttcacaatgctctacctatggctacaaatcttgttagaagaaaggttataattgatgctacgtgcttggtctgttgtcgggcttaggagttaataggacatgctatgtttggctgcaagtatgctcgttccgtttagcgtatcttggatttggcctttgattggcatctttcttcttccatgacaaaaggagattatctcgttcatcaatctacacttcacacaaaggctaaaatggaaataattatatgtactctgtagtgtatttggatggaaaagaataacattattcatggcgaaagggcaaagacggccacaaaactatctgagtttattgtaacttttcttaaaaacttcagatttcccaaactcaaatatagtccaaccatacctacaacacaagttaacacttcctcctccacaactcaattgcctgttgcatcacagtcatggctgccaccatgttcaggtagttgtaaactgaatgtgaatgctactttggatgctagcaggagtattgttgctttggatgctcatggtcacgttgtggctgctctatccaagccgactgttggaaacttgaatcatatgagatggaggcaaaggctatctttcatgctctaaagtggcttcttcaattacaggtgcctatttgccaaattgaaaca

SEQ ID NO: 62195 - DNA, 596 bp, Cannabis sativa
aaaataaatgattattataaacagagaatgaaattaattatagataactaatgcacgtaaactcgggattaaagctctccggtcagcctattgtctaaaaatgaaaaatgattccaattttaaagacctcttggtcggtcacgatgtcttaaaaaaggccttatggccagacaaataaaaaaagaagaaagataaagatataagtgttcagacggctagagagtgtctcaggctccttgtacgggtcttctaagccggtaggagctggaggatctattgtctagacaaggggcacgtcaacattcagaccggaggtagaagtggttgccttggactcttcataggccacttgggaagtacagtacacgagatacatatctttggctttgcccaggtaatcaaaatttgcgtgagggttagccttccaaaagtcgtaaaaaatcttgagaccggctgtctctaaggtgttcaccttccctttgagcctctctacctaagggtagctcctcctccttggactttatctccgcttccaacctgcgaaaaacagttcgaagaacctccctctcttcctggaggtcggtcacttctttgga

SEQ ID NO: 62196 - DNA, 1278 bp, Cannabis sativa
ataataataataataatattaaacgtgatatatatataataataattttaaatgtgatgttctctttaatatttattatattatatgtcacgtttaatattcttttattttatcattaacgttatgataaaatattttaagtctgttcaaagttaataatataataaaaaaaaattacaatcttcgataactaaatttgttaattgattttgttttgatagtatttttacaaaatcacatgaaaaatactaatcatctgttaattggtttggaatgtcgatgtaaaaatagaggtattcgccaaatataagaatgagaaaggaaaatttaaggaatcaattttgagtgacattcgaggaatgttgaacttgtatgaagcttcacaaatgagagtttgcggagaaaaaatactagatgaagcacttatcttcacaactactcatcttcagtccttagtggaaacattccaattgagctctccttatttagacctagtgaaacatgccctaatgcaccctattcgaaagagcttacaaagaagagaggcaagactttacatatcacgttaccaccaactaccttctcacgaaaagcttcttttaactcttgccaaactagatttcaacttgcttcaacaactacatcaaaaggaattgaattatattacgaggttagtattttatgttgaactcgtgaccgatgataagttattataagaatttttttaaaaaaaaaatgcataaaattatatacaatatatgtatacatgagaaatataaattagtttaaattaatatttttttatccgtttttataaacaagtatatatatatttatatatatataagtgatactcaatggttacaaccatgatgactacattttctatgacatgttttaacatgttaaaaggaaaaaaatttatttttaaacatagatcaatgataataaactatacacttaaaataaattattttttaattaaaatatttaatacgatcttttttaataattaatatttttaaataatttttttattttttatttgtaagaaaataaaataaaagcaggttactgttagattatgggaaatttattaattatttgtcattaatttctaacctattcacaatcattcaatattgatccaacgactaaaaatgaatgtaatcatctttgttacatatttaataaaaatatgtaagcatcctccatacaaatacatgtttgatgatttcatcattgctacaatattaattatatacatgtttgatgatt

SEQ ID NO: 62197 - DNA, 1118 bp, Cannabis sativa
  modified_base (57)..(60): a, c, t, g, unknown or other
tataaaaagaggtatgttttaattaaatataaaattagaggtaaatttgattaactnnnnaataaaagtggtattttttaacttaccctatatttttgtatcatgctcgaattcgtgctgacccatttttcttaaacaagcttttacttttctacattttttttttacaattaatgaatatgactaaattacatgtatattttatagtttcaattatatttaagtaattttttaacaatattttgcagccaatcatataaaaaaataatttaaattattagaatttgaatatttacttataaatactcaaaatttttatatcacactctataaataaatatttaattttatattatttaatagcttaattattgaattataatattcatgtaagttttattattttaatttatttataatttataaatataatatatttattattataattattaaataatagggtattttaatattccgtggcgtgctttttgggcttatcgcgtgtcgtgtctttcgggctagtctattcgtatttatgtgtcgttttttaattacatatttttcgtgtcgtgtcgtgctaatttaattatagcatcgtattgtgtcatgctcaagatttttttgtacctagtcgtgctcgtactgattcgaaccgtgaatcatatttttttttcagtatccaatattttagtctaattttttttataaatctatacgttgtaattattaagttatttataaatttttttactcaagtaattattcaaactttattttagacaccatatttaaaaattaaccgcaaatcttcaataattacttaatacaaaaaaaaaatgaactaaatatcttagggcttggttgatttgagatttaaaaattgtgttttctaaaagtaatttggaaacaaaaatttgaattttggatgtgaaaaattatttttaaaatgtgattagttgtagtgtaattttgtatttttgaattttaaaaagtttaatttgtgattggttatgaatctcaaaataaaaaaaagtaaaagagtatttgaagaattttgagattttttctattatagaccaaaaatagatgaaatttacatttatggccctaaaaaa

SEQ ID NO: 62198 - DNA, 874 bp, Cannabis sativa
agtaggtgctacccaccataaagacagtcagccagactgtacctcgagggtacgtacccccacatagcccaacgcatctaacactctcccaacatcatccaatcccgcatgaaactcaaaggtagttacaaacccacaaaaatagtaggatattacaacaagaattgaacctcaactacccccgaaaatcaagggaatggttgagatattttagcactaaggtcgtgtctcctaaagtgagatgaacaaactcttcccctatatgagggtcatacctgacctagaaaggggatccaaaattttactcacaagcgaaaactctgctatttttttctttgcatttaagagtttgttcttgattttacaatctagattaataataaataggagagtggattattgccaatatttaagatcgaacctctttaaattctagtgttctttattagcatttattataattttagtttattttctcatttattatgactctacgtcaattggttactaaaaaacagtcaacattatttaactaacttgagctagttagagtactacgaataatgttgggtgtgatggaagctactatcaagaatgtttagtaaaagatagttcgctttgacttctaactcaagttatttcaatttgagacaagaaaaagagacaagggaaaaagatgagacaaggatttgagatggagagtgaagaaatgagagaagaaccaagttttgagttgagtactttgtgatttttatgtgagttgagtatttctccatgtcagcctcttccagatagtttagtgtttcttcatgtgattttcactattagagtttgtgtatttctccagctaccagtttttataaaaactttttta

SEQ ID NO: 62199 - DNA, 780 bp, Cannabis sativa
gaacatatagagcgttctatatgcattactcatctaggcatactaaattttttattgtttattaagtacatttgaataaatagaagacatatctcttattctatccaagaaaatagaatagagataacacagtatagaattttcttcagttgaataactttccagtatttttcgaaattacaaagctatgtatcttcactgatggagcttaaattatcatagatgggtttttacatccttctagaataatacctaccatctcaaattggttacgagttggtgagatataaggactctaatatacatccttatcatctaacatatagatcactttcataaatttcttgattgtctccttatgttccttgtttgattacatcttagatagctcccactcaacagcaagattctggttaaattcatacatagaagtacatttaacctcttactattgtttttcagggacatcttattgtgacatatcatctaagtctgaaactttaagtttcttctagactaagtcatcaacacaacaatctagtattaatatacaatactttcttaagatcaagtaatcattagagatcccataaaatatttcatgaggattaggaattttgcctaagtcattcgaatagactatgcaaaattctactatcttatccttaaaaaatgtgataagttattactatccatatgaacagttagatttactttctcagttgtattttaaagtttctgtaatatccagtacaagtatattatttttggtatattatt

SEQ ID NO: 62200 - DNA, 1742 bp, Cannabis sativa
tgatttttttttttcaattatatataattttgtaagttttttttttttttttctacttcttgcgcatatagtctttgatctttcgtattttttcaaacttattaagattatcttaataatttgtatttttgttttcatatttggagttgtgtgttttgttttatttgtaccaaatattaatatttttgtcatttttttaatttttcttcttattagtaaatatataatagtgtagaaaattattcggacatacatatgatattaatcttttttgtattgttattgttattttttaataaatttttgttaattattattttattttattttttctaaactttgcttattagtggatattattagagcaaattacaagtgcttatatttaaacaaaatgaagaatgatcttagcttcaataagtaaacttattattttttttatattgttattgttatttttgaataaatttttgttatttattattttattttttttctaaactttgcttattagtggatattattagagcaaattacaagtgattatatttaaacaaaatgaagaatgatcttagcttcaataagtaaacttatacacactatgtcattctttaaacataagttttttagtaattatttaaatataattaataaaagtaagatatgtaattataatctacatattttgatagggttacgtgccctccatactgagtatatatacaaatatatataacacttttcaataggtattattcattgaataaatattaattattagattttgattgtaaatattaattttaacaattgttgagggttactacacaatttttactaaaaatattaattttaaaaatattaaattattagattttgattcaatgacgaataatcaaagaaaattttaatatctatactaagtttaactacttaattaaaaaaatgtcaaaaaatatctcctttttatatcaaaaatatgtttgaatacaaaatatttatgtcaaactcaattttattttttttttcgccaaaaactttatttttaatctttttccagaaacaaacccaacccatataatgtaaaaataagagattaaattaattagatagaaagaaaaattaagcttataaactaaaatttacttatttataggcaatatccattaaaagtacactaaaaatatattaaaaaataaggtaagagagaaaaaataatggtgaatacaatcacattatattgttattattagaaacatgccaaaagaaaccaaatttgcattgggtggctctatgacaactttaaggtaagcttttctcgtgctattttagaaaggaaaaaacaaaatccacttacttttctacttttttttaaaaaaaaaaaaagaaatatatttttattttactttacttttgatggttttgcatcgaatcttcttttcaaataaataaataataaattgatattggtatcttacgtatatattcatgatgtttcaaaaaagtatggtagcaaatttttttaattcacacaaaaatgtgtgaaaatatttttctttttatatgaagtaatatatatttaatataattaatgaagaaaataaaatagagtagatgacggaaatagacccacaattattagttaatatcaagggccaagatgcaaaatggccctaaatctaacaattaagttaataaatgttcttttttaaaaaaaaaattaacaaaatgtccttttagtt

SEQ ID NO: 62201 - DNA, 697 bp, Cannabis sativa
ggcggtaagcaggcttgcgaagggcggcgattggggagagcgagatacaactaccgacaacaactctcatatttgattttacttttcgtttgaaattgtcaaatgagaattgtacactacaatgagccaagcgaggtgggcgccgccgagtccccggaagttcagtcttggaagttttgttggggttgggattggggtattgttgtgcgagatgagtgggtgggggggttattttgaggttgggcctaagttggttatacagttgtaggagaagttgaggggtaatttgaaaaataccacttctattaatcaattgatcaaatttacctctaattttatatttaattgaaatatacctctttttatatgtattgtacccaaaataccctgacataagatagtcacatggagagtattttaaagtgacgggtaaaattggttcaatgtttaaaaaaagaggtaaaaatgatagactttaaaaaagaggataaaaataaaataggacaatacaaaaagagtatagagtgtaatttctgaggacgacacggactacatctacattttcttttgggatttttacataaaatgtcatttttttttctttttaaacatgtatactgttgctccaaaatttgcccaaaatacgtggaccagtcaagaggggacacgtggatcagataacttggaaagatttgct

SEQ ID NO: 62202 - DNA, 983 bp, Cannabis sativa
ttttcaacaaagttatagaaagactttggaagtttgaagatcgacatgatataggtagggatagcttggatgacagctttgagaagaatttctttacctcccttggatacaaatttaccttgtcatttagagagataagaccaaattctgtccttgagagggttgatagagtggttttttgatctaccaaaacactgaggtaatccaaggtatttatcaaggtgattggtagaagggatttgcaagtaatcctgaataagagtttgataggtgagacttatattgggggaaaaaggatggaagatatctgaaaattgaccaattgttctgagatattcttgtacttggaaagaggctctttgatgacattgcaagcttggatgttcgaacgatagaacaagatattgtcgtcagcaaaaaggagatgtgaaattttaggggaagtacgagcaatcttgagaccaaaagcattttcagagagttcagatttcttaagaatggaagagaggccctcagagcaaaggaggaagaggtaaggtgagagggggtccccttgtcgaagccctctcaaaggaataacatgcccaacgacatggccattgatattaaacttgaaagttgcaatggacaggcaagtcatgattaagaagataaacttagagggaaagtcaactttttgcataatcttattcaggaaaatccattccactctgtcaaaagccttagccatgtccaacttgaccgacatccaaccaatcttgcccttcgtcctatttttgatggagtggagaatttcttgagccataagaatattatcataaattaatgagaagacctttgcggaaagcacttcgagtaggtgaaatggagtttataaccaacttaagtctattggcgagtaccttggagatgattttatagatagttgtgcacaggctaagaggaagatagtctttcagggtcaaggaatttttaatttttgg

SEQ ID NO: 62203 - DNA, 1043 bp, Cannabis sativa
tttatgggcagacttgagggacatagctagtaaagaagcttgggtggtgcttggagattttaatgatatccttaataaggaagaaagattaggcaccaaggtaaagcataagaattcttcggaatttcaagattgtgttgatgattgcaaccttgaagatgtaaagtttgtgggcagcttctttacctggtgtaacaagcagttaggagatgaaagaatatattcaaaaattgatagagttcttgcaaatcctagctggcttgatgatcatctgaatgctgaagttgtttttcataatgagggcttgttagatcattcccctgctgctctaactgtttcggcttctcttcttaggggcaataagccgttcagatattttaagatgtggtcttcgcatctagaatacaataagttgattcgagataggtggatggagaaggatagtggtatgaaaatgtttcagatagtgaccaagttaaaagggctgaaaccgaagcttaagcagctgaattatcagcactttgctgatatacctgctgctcatgctaaggccaaaatggagctagaagcatgccaaaaggaattacaccagagtctaatgaatgcagagttgcaggttcctcaagctgctgccaggactgagttcgctatcattcaagctgtctatctttcttttctccaacaaaaagcaaagattttatggctcaaagaaggggactccaattcagccttttaccacaatagtattcgtgccaggagaaatcaaaatcagattttttctatcatggactctaatggggtaagagttgataatcctcatcaaatttccactttgtttttagagtactacaatcagattttgggaagcaagatggttaataggaaatcggtaatggaaggtatcatgaagcaaggtccgattttgtctagccagcaagttgagatgctagtgatgcattacacaagagaggaagtcaagaaagcaatcttcgatattcctggaaataaagctccacgtgctgatggatattgtagctttttct

SEQ ID NO: 62204 - DNA, 537 bp, Cannabis sativa
tttgtaaaaaaatgacaaaagttaatataacatgtaaatttccctataaataaaacttctcaattttatatactttttcgaagaattggttatgtcgaacattttagccaaaacaaatgttacgttgaatattggggttggtgttttaatatatatatatatatatatttttttttatatatttgtaaaataatctcaacaaaatgcttatattttggacctatttggatttttctcagaactcttctgtaacattctgtcagcccaattattttttaaattgggttatgtgggcctaagatggtcatttgagtatgatgtacctaaaatctgaggttttgacttggattggatgggactaatttgagacaatttcttctttcagtagttttcaagttgtcttttttagtatcaaaaattttctgttgaacactgttgttggagataatttaatttattatttcgacaaaattttaaaatatgttacttattattcactctttataactaatcaaataacatatatttttatcttaa

SEQ ID NO: 62205 - DNA, 805 bp, Cannabis sativa
accacgtaaaaatccttctctcactttcttactgctcaatagtataattatattttattagttgccgaaaacctcggtcaacaaattgaattttctaaatttgttagaagattaataatatttttcccttgaaaaagttgtaaaagctaacgaaaattagccgtatatggatcttgaatgaatattctataaagatggtaattcatattaatattttatattcgtgttcgtgttatgttggttgacatggtcaactttaacataatctatatatatttcgtgtcaaaaatttttaaccctaacacaacttatcgtgttctcattttgacttatcatagcggtgataaaaattccaagttttttcatgccatggctagttcaaggaaaagaaccaacaatttttaattcgaatcgatttcgcgtcagatgtattaattttaacccaactcaaataataatagtgtattacagctctacccaattttaacttgcatatattttaaatgattctaatccacaataattcatattaagttatagtattatgatatgaactgccaccttagaattctagtcggaatgttagcaaaattaaatataatgttctttttcttaattaattggttaatatcaaatgtatttatttatttaaatcacaaatataaaaatagaatttttgttttttcataattattttttgtttttaattttacaaataaaatataatatgtatgtgtttcgtaaattctttgtttattttattttagtgagaaatcacaaaatgaggagaaagtgagttggagtt

SEQ ID NO: 62206 - DNA, 804 bp, Cannabis sativa
ttaattcctaagattaaggttccaaacggtatgggagattttagaccaataagtttatgcaacgtcatctacaaaatcatttccaagactcttgccattcgattcaaggaggttcttccctatgtaatctccgaaacacaaagcgcttttctctccaatcgtctcatcacggataatatacttgttgcttttgagttggttcatcatttaaagcataagacaagagggaacagaagctactcggctctcaaactagatatgagtaaggcgtttgatagagtggagtggacctatattaaggaggttatgagacagatgggcttccacgatagatgggtttcattgatcatgaattgcttgcactctactagtttctctttcatgcttaatggagaagaagttggtcatgttcagccttcccgggggttacgccaaggtgatcctttgtcaccttatctatttttgatctgttctgagggcttgtctcgattgctacaaagtgaagaatcatccaataatctcaaagggttgcggttaacaagacatgctccatcgatttctcatttgctctttgcagatgacaacctcctcttttgtgaagctactaatagttcggcaagggccattaacaaggtcttagatatctatcacaaagcttcaggccaacttttgaacacagcgaagtccgtcatgtcattctcacctaacactacacaagctgcccaagattttttccatcaaacgttaggaatgccaattagtgaatgtcatgaacgttaccttggactccctgcattttcagag

SEQ ID NO: 62207 - DNA, 3109 bp, Cannabis sativa
tttcttggcggattcatgagcacattcgaagattagaagattgtgtgtagagtttctactatgcatcttctcaaccagaagaaaccaaaatggaagaaggaaaagaaaaaaggctataaagtatagctgggtttttgttttgttattgtagtacactctgcgagtgagttataaccaaaggtgttttagattgagttccaaaggatgttaattacttgaactagcgtaaatcatggccactcaaatcttagtacaatttttcctgttgggtatgaattatgaaacctgtgtgttggtaactaaattagtagatggtggagactttaaaaaataaataaatttttttagaataaaaaatctaaccaggttaactaacttgttagataaacaaaaattctgaaaatatacttactaatgcgcgccaggtaggggtcgaacctacgactttctgcttaggaaacagacgctctatccactgagctacaggcgcttgatgataagttacacattgtgtaattatactattattactaattaaactaagttgaaaactcaaactaaatttcaaacatatttacatatatttttaaggctgtgcaatttggctacctggggactcaactgcaaattcttattgatggaaaaaacagtggcacagagttgagtaccatagactcatcatcaataatggtccagttctatgctatcacaactataacactgtcgctttcaaaaagaaaagtaaaaaaaaaaaaaaaaaactacaacactgtcactaaatattgggcatgaaatgaaaaggaaaggggaaagatagaagtccccttgtacaggaaaataaattcattgcttgtaaaagtcaatcataatagtgaagtttccattcgaaaaaggcataaaaaacctttcaagacattattatatcactcatctgctactgcttccaaaatgattcaaaacaaaggctcaacaatgcttttggtttagttctcactgtttatcagactcccgccagaacttgatgatgtgcagactctcttcatctgttgatctttgtaaaacaatcctagatgcatatcctttttgcctcatttcaagacatatcttcaagggaaagtttgatgcaagagtgaccatgtataaccagcctttttctgatagaagaaggtcagcaactggtaggattctatcaataactctacgcccatcctctcctccagcccaagaagaggtaattccttcacgaccgacttcatcctcaggggtcggaacataaggtgggttcacaactattacatcaactaatccagcaagacgtttttccaatcctgaagcaatgtcagtggaaatcaactcggcatgaactccatgtgctttcaatgtctcactggtaacagaaattgcataagggtttgtatcagtggcaaaaaactgaaccccagatgaagactcctgtcctagaagaagggctagagaagtgataacatagccacttccacaacccacttccatacatagtttcggtttatgttgtattagattagatcgatcggctaagagtgcatcaacaagagcaaatgaatcatcacaaggttcataaacctcaggatgagaactaacaaggcggatttgagcaattttgtaacccatcttgtgaaaaaagacctgtcaatttcaatagacaacaatatgttatcattgtaaaccacttgagaaaattataccaaccaaaactgggagtgttccctccctagtacctgctatagtcgcttcattagaatgtaaaatctaccacttaaaaccagccagacttcacctacaatcaacagtgtgatttccacaatttgatgattctcagaaactaataataacatgaaattttttcaattcaatatgataacaactcaaactaatccctaacaagtagcaacaatcttatttggtaataataattgaaaatgaactctaacaagtagcacttagcaattagaaaaatcgcataagaataatgataatagcatcaatatgtcaactttttattattatttcttaatagcaatcaagaataaactagactcgacaaccaaaatgtcctttgtctatgaattatctattacgcaaaagaaatacaaaagtgatgggtacatacatcatatagagtcggtgagagtttcataagtaaagaaacgcaattatttattttcacaataatcttcaaaacccacatacagaaaccgaagaaaataaacaaaattgcccttaatttgaaagaagtacaaagtaagttgaaaaagagtgagcttgaaagaccagagatgagagaacaaacctggcgaacaggcagagtgaaggcttcaccatcaccaatttgttgttgctgaaaggggcggagccatcagaagcgaggtggtggagaaggtgggaaaattcgggtgtggtggtccagccagccttcaaatcacagtgagggccgaggggtaagaactgagatatgaatcctcttcaaaagtaatggagggattttgtggagtaattttcactacaaaaaatgtttgaacctaaaaattttaaaattttacaaaaaaaaaaaaataaataataatattttatgtaattatttttaattttaactttggcaacttatatttatgtaaatgattttgaaaattttcatattttggttttggttatagttggtagctttttgatgtatttgatttgaatcacttatgtatttacgacgcaaatgtctgctaccggtgctggaacctcctcgaaccagaatagctcattgtttaaccgcagagcatcttttaccaggccataggtcgttaaattctcagagcaagccacatgggacaaaactgcccccggaaatttagacaataaaactataaacatcttcaaacaacactcctagctcattgaaatacacttaaaaaaatagtagaaaaccagaataaaatttttattagaaaattatcaaattgatcaaaatctaccaaataacaagaactaagcaaccagaaccccactaaaaattactagaactagccaaagggattaccttttggctagtagcatttgaattataacactctacctcata

SEQ ID NO: 62208 - DNA, 1010 bp, Cannabis sativa
  modified_base (273)..(274): a, c, t, g, unknown or other
taattcctcaattattcataattatctagttagagttttgcttatctatttcttaattccagggtattacagtaatattaggaagggaaagtgttatgaagttttaaatttttttaacccattaatacttatacggtggtattctaactaccctaaaagggtgtaatactctctctttaaaaaaaggtggaactcaaatattccatcacctacattgacgtaagaatatgattttcattaaataaaaagtcaaataaaaaactaaaatgaacnnaaaaaaattatatagctccttagtctactgccattattatttatcatcatcttcttcttttctttgttccttcacacaataaataatcatcacagtttctcttttgaacataaatattttagattatacttttattcaaaaataaatttatgaagttttgtttttcttttagcatttcgttaaaaatttatttgagtataatttttatctatgcttatttgattactataataattttatatatttatataaatataaaaaatattaaatataaaaatataagtgaaagattgttattttagttaatacaatgacataaatttattaattaataaatataattaacaaaaagttattttattttatgtataattatagcttaaaggggtataacaattattattttgttttatttcacttttttaaaattatatataagattcatgtactcaaccaaatactataatctaattaataataatctaattaaatattctcatgtataaaccaaacagagtaataagtttacatataatcatattctccttcatagtgttctccttaatcagattattttgaacctcttgtaccaaacgcccccttagagtagtaggtttaactgtttaagtgtgttaaaaatagaataaatactattttagatcttgtattttgcaaaagataccaattagaccttctgttttgttaaatgacaaaatggatcctgtatttttcaaaa

SEQ ID NO: 62209 - DNA, 568 bp, Cannabis sativa
gctaaaaaaggtaaatttagagcttcaaaattatatttttccactatcactcagcctttggttctctataacagagatgtttggtgtggattaaatatacctaaacatcgtttcatactttggcaaactatcaacacaaatctgctcacttgtgacatgttaagtaggcttcacattgaattaagctctctaaattgtccagtttgtgacaactttaacgaaagtcataatcatctctttttggaacgttactctcacaatgtggtgaaatctattttcagttgggctgatttttctatttggtcgttgagttacagcagctagaacaactgggtatcgacctctacccctggtttaattcgatattttaatgaagtttcttttttcttgataaaaaaaaatatattttaatgataaaaattttgttattaaaataatagtatattattgtttaatgtatatatactaagggattaaattttcttaagaataataataataaaaaaatatataaaatagtaagaatgtcatttttaagtattttaatttagagaaattatttcataca

SEQ ID NO: 62210 - DNA, 587 bp, Cannabis sativa
aatttaaatatgtaaaattaaatgttattgaattagacataacattaagattagattagacatgttgtgttataaatatgtattgcaacaagtggcaaaaaggaaaagaaaataagtgagaagtgtatgaaattgaaagatgtgaagaagttgagtttgagagagagagaggtacgtgtgtattgggttggttgggttggaattggaaagttgaaattgtaaagtgttttgagtttgataaaatcaaggccatgcaaaccaagtgttagacttctcaacctcttttggttttggcaccttcctaataaagaaactgccccactcaagtttcaaccttcttttcttttcatgcactctttattttacaatttattttaccaacttcaatgctactgcaatttctttctttctttcaacttcgtttgtatctaaaaaatatacacaaatgttaaagactacctatactatctcattttaaattgtaattattattagtgtaatttaatattgaatattattattttattttaataaatattataaaaaattgttaattaattacagggtcatattttatcatggtacta

SEQ ID NO: 62211 - DNA, 830 bp, Cannabis sativa
  modified_base (249)..(251): a, c, t, g, unknown or other
aatatttagcagttggtttaacatatgtcatttaaaactaacatttgttaaacatacgaaacaatagtggaacaatccaaaaacaacattaaaaaaccatgacagccctaatattaatgattttaatgtttctgccaccggatttaatggttgttttttgtttattgttctgatgttattgtggtggttctgtctgtctgatgttatattcggcgtttacagtgtaaaagaaaaaaaagtcccaaggcnnnataaaagttatttttgccgtgtggcagtattttgtaaaaattgggtcaaaatttaatatttttgtaagttttcctttgaaatatttaagatattatttccaaaaaaaatatatattgaaacagaaaaaaatatatgtgacctaagtaattaattaagatactacgtctgctatactctgtgtgagcgtggctaaaaaaattcggcatctagcttcatttcgaatgccttgcagattagtatatgcacctcaaaaatcttagaacattttatcaaaccgtagtacctacttgaatatgctcaaaaatactgatgataacaacaattttagcacaatattagtgcttttgatgatcaaatactgatcgaagtgcaggtctgtaaaatatccccttactttattaggttctcattataagtggtcttgtttcacttttcactttttgccatttttttatgtagtcataactaggacttaaaattttgatggaacttatttatcatacaaaaaatatatttaatcctggattataatatttatttaaatttataaggacttttctattattttgatctataat

SEQ ID NO: 62212 - DNA, 1477 bp, Cannabis sativa
atatgaaatgaattaaatgcaaaattaaagaatatacttaatggcagatttttcaaaattaatttagacaataaattaattattaatagaaatctactatggaatatggaatctacttaatggcagatttttcaatacaattaattattaatagaaatctactatgctacactagctagtgccatatatggaatatggcttaatcggaacttgtgtgtttttgaaggaaaatgtatagccccaatttatatagatagaagcattaaagagaatctcaaaactagattgtctcttattcaagataggaagttttctagttttgagaggattgtccttagaaatgctaaaagtttgtaagttttgatgtaaatttgtgggtgtagtccctatttggttgtaaatggcttgtttgattaatagaaagattattattcttgataaaaaaaaattgcataaatttggtaatatataattaaatacacaattatacaaattacacaattattacatgcctaaatgaatcatgtaataaattaccaaattaaaacaaattttcattttcaatttatgctaaataacatattgattctaaatatatgtaataaataaaaatagaaattgaataaatgtaatttattgattaaattaaagcaaaataggaaaataattaatattttaaataaataaaaaaatttataaaaaaaaaattggaatttttccttttttttttattgaaaatcactgcctgtgaacgacatgtcgttttttgctataagaataaaataacacgtcgtttttagagagtttagcggctgaacacttaagggcaaacgacacgtcgttttccacaatatgtgaaaatgacatgtcgtttttcggtcatctcctaccttcgtccaggtcgttttgacccatttaactgcacgcgggtcgcacggacctagcccaaaacctagtcgtaaaaatgaatcccgacgtctaaaatacccaaaatcaattctaaatgaatccaaatgcataaattaagggattcatgtaggttttagggaattaaaacaaataaaaattagactttaatatcacaaaagtctagtcgggtccgaaaaggttttacagagaatttttgcaatttaaattttttcaaaaagttttctcatgcttagatcaatctataatactatatgaatatagtgatgtatatagaattcgaaataaataccgaaaaagagaaacgaaaaaattcaagcaaaggaccgaaaactaaaatttatgattatatatatactcatatacacatattaaactatataaaaatctcataatgaattataatcaattatatagaatgaaatgaataaatgaatacgtataatatatcataaatatatataagaaaatatatacgttgtctgaatgtgcatatatataaacgtgaatgtgaaagtatatatttgattaaaattatatggatataaat

SEQ ID NO: 62213 - DNA, 949 bp, Cannabis sativa
tcttcaatcagcccaggaatttttgttcttgtacctacagaatcgtgaacagtaagtgcgactttccttttatagaaaaagaaaattttgcttcaatttttccctctagaaataaacataatagaaaactcacacaagatcagattaaacacagctagatagatagagaaaggatgagttaccaaacttaccatttataccttattttccataaatagaaaaactagaaaacttttcttccaaatatagattaattaatataaaagtcaaatacacaaaatatgaaaaacaaataaataactcgggtgaaattaataaataaattataaaatatttttttgtcaaattaaagatgccaaaaatagaattaacgctctgtctttttttttttttttgaaaggaagcgttcatatataaaataacaacgtttagacctcacggtcattacaaaatatgttctttggagtggacgaaaaaggcaaacaaccaaaccagttatgggtaaaagcccacctagccacattatgggtcataaaattacaagttcttaagatatcacaaaataaacaaccaataaaataaggaaagatactcttacaaaataaggaatagttctcaatttctcatctaaagtccactccatttagagaattgattattaccttaaagtcactttcaacaatgataaacttgtaaccttcttccttagctaattccaatgccagacagatagcagtagccactccacaaagagtgtcagaaagagctttcatcgatgtcgctgatcaacaatggtgaagtcgttgtccattctttttttctatcgatttttcatgatcaagatgtccatgaagacaattattccttgctaacaggagatcatcccgacacaattcaaaaatccaaggatcttttgttaggatcgtcagacgccatctatctccacatt

SEQ ID NO: 62214 - DNA, 816 bp, Cannabis sativa
tggttgctcctcaagaacattggtatcatcagtagtcgataggagttttgtaatcagaccaaaatttgtatatatttatatattatctaaaaaaacactgaaactatatgatatcgttatgaataccatgatacaataactttacatcttcaaccaatataaatattcatgagtaatctatagtacaaatagtgaaatctctctagctacctctttaggcttcaaaactctaaactaaaatgattatatttgtgagttgtctcttggtggtaaatagtgcatgcattaactaagtgatgatttattagggtggaaagtaatttgatcaataatcgtaagatttattataaatttagtagtgggtttctcataacaatatcatagaaagttgtccgagtgctgagctacatctgaaaagggttaaacaacaaagtaatgagctaaaggccagtaagtaagtcccaacaattaacccatacgcaatgacttatggttgcatgaacattgtcccattttttaagaatttttttaagttagatcatttgtccatgtaaattatctaccttcttctaattatcttgagtttttatgaattattttgaagatggtgattaattttttctttgatgtgttgacgtaggttagtgcctcttatgagcaggccctcgttgatgctcgtaaacaaatcgaacgtgaaatggaaagatttaagatctgtgaaaaggaaaccaaaactaaagcattttctaaagaagggttgggacaacaacctaaaacagtaagcacactttacactacctgtcttttggatccgtt

SEQ ID NO: 62215 - DNA, 633 bp, Cannabis sativa
ttttttttttcttaatgtaataataattataaaaattccagggtgagtatgaagatgcaaaaaagtgcaaatgcttgtatgatgaaaatgtcactgatgctcgtcgtccactatacctggtatttttatattataacaattaattaataataatattaaaattacattataatttaaattactacattagttaataggatatatttttaaaaataataacatatagcatttaaataaataggataatattgtatttttccttaacaatatatagattatatgttggttacaagacgtaaaaaaaattaattatataattattaatgttacttcgcaaactaattatactagataattattaatacaaatctcttctcacaaaatattatttgtgtttggaaataattgtgtaattattaagttagtaattacactacattttaatatacaatgtgtaatgtgtgtttagatatgagatattgattagtatttatgtattcgtactgtcttgtttgaaaaaatagttagtaattatacaaaaaaaaatgataatttttaatacttaatatttaaaattgaaagattttaataattacacaatgtagatagtatgagaattggagagtataattg

SEQ ID NO: 62216 - DNA, 963 bp, Cannabis sativa
ggaaaattaaactcatcaaacactcatttgaaagatgtaaagtcttttatctttggaaaggcttttggagcccttgtgtgacatgatgttgcctaggaaaacataggcaatagacctatattagagtttgtactgattataagatcttagctttggatagtgttaagagcattgtaatactcatggagtgcatcccatatttgagttgtgctatcataatcaatcatttgattggtggttttctcaggcttaggaagaaagaagccggaaaattgaaagattatcttgttgttcctaatcctcaaaggcaggcctaagagtgttagtttgttcatctgctggtgtgagaaatttaggatgaatttgttgagtagaatcaagaaatttatgaaagcgactaccttttattaaagctaaaacttgacagcgacaagggagaaaattgtgttcatcaaacttgatcgacaaggaatgctaaaaagaactggataaaactttggcaaatgaacttgttggttctggagttaagtagtgttcaatcttgttgccgctccatttgttgaatcgatgggcgataaaagctctgataccatgtgaggtttagtgagagaagagtgtttttgagagagaatgattattcagtcttattcaatgaagaaaatgattataaagtatttatataagatgtagatacaaaacacttatatttattttcttattttttttaatttttaaataggtttataaatattaattaattaattaattgaaaaaataataaattgagatatttttttttcaattatcactcatctatatataacatatcattaataacaatttttactattctttctgttcactatatcattcacaactatatttcttcgattgtaatttatttgactcgttaattacttctttatgcttttttttttttttttttgttagtttttttttttt

SEQ ID NO: 62217 - DNA, 1135 bp, Cannabis sativa
  modified_base (37)..(43): a, c, t, g, unknown or other
ataatttcataaataatcataattaactgataatttnnnnnnnaactaagcgggctttacaatggtattgacaaaagtcgctaatatgtcgagaaacattacttactataatcagcttcctaacctaaggttgatgatattgatagacattgctaatatgtcgagaaacatcaataaattgtagaaaaactcaaaaatcaaacccaaacacacaactttaacataaaatcaaaaaaaaattatcttaaacttttgattgagcttttggattctcaggtcttccaatgtacgtggactccctcgctaaaataccaagaccttttaaaattttgaggtgctaggtttcggtggtgagtgcgatttgggcggttcgtgggtttcaaatgaagaaaatagaaagagggggagacaaggcagtttgactgtgttcgatgttgtggattgtggtgatacggtggttgatggtggtggatactgctgtggtgagtgcgagggagcgagagagattcagagggagagagtgtgagagttaggtgagtttgaatgggaagggtattttagggatcaaataaaattgaggtatatttagagaatattttgtaaagtagaatacctaaacccattttaagaattgattgtcaaatttccctttgcatttgaatcaaaagaataataattgacacacttaaattacatacatatttcttataaaaaataatatataattaatataaactacacatctaaaagtaatgtggtgcattaaaaaatataaatgtaaaatatttaatatatactactataaatttggactttagaggtagtttttaaagcctttcaacgttagttttggtaaaatttactaccgacgctgattcaagcgacgccgtagggtcaaacataactgatgtcatagtgtacactatagcgtcagttatatactaatatcgatgtcatatgtaataagaatcgacgacaaagggtttaaaaccgatgccatagtattaaaaattaatttttttttcagtttaaaatttattataaattcagaatttaatttatttaaattaaatatttattaatttaaaataattattatttaaattgaattaaatattatttaaattaatttcat

SEQ ID NO: 62218 - DNA, 711 bp, Cannabis sativa
tcatttttcaagaaaatgaaatgagaattagtggggaagaaaaaaggagatcttttcaggtttaaaggaattattaaacaaggtgttttgagaaatctttgattcaaatcaatctaaacaatgcacttcatttagaaatatatcgtcaacaaactatttgaaattctttctcaacttccgtatctagaaacatgagtatttttttttccaataacgataatcatttttagttaaaaccattactatacatttttaaaatattttgaattagaattagccatgtaccttaagttacacttttttttttgaacttagctgtgtgagttacgattagagcatttattgtaaatgtaaagcacagtacatttaatatttataccaattttaccgtataaataaaaagaaatgtataaataaacaaacccaactttaaataaataaaatcattaacaatagagtttcataattttaaacataattattttgattaaaaaaacctcaaatatatttactgcattgtagctatttatgattttaaacaaatatttgtgcgaaaaaaatatgttttttttaaaaaaattaattaatatattccaatgcacatttatttatataattatacataattaatattaaaatatatatatatatactagcaaaaagctacgtgcaatgcacgtatactaaattttatgctagttttttctatgt

SEQ ID NO: 62219 - DNA, 531 bp, Cannabis sativa
tttttttttgtgatccgcctaagcaattaattactacccacttaatttgtttgccctctttgtgaatgttggaccctagcctcttcctattgaagacgtgtccatcaccatcattattctcctcaacaaaaatgacatgttgagtggcaagtgaagtctgctgcaaatgctccacttgaagagccaaatcccctgtagcttcctgaacatgggtctctgccacaatttcttgagcttgggatctagagtattagcttcctgtatgggtgcctctaccacaactgttggggtatgagatcttggatcaacttctaacaggaacttgaggatcaattgttgggattttataccctaaataaaattcatttcaatataattagatttactaattaataaaagattaaaaatcattttatattgcatagttcacaagattttttcatgattatatatttaatgtataaattctattaaatctaaaacatatagttattcatgattatagtgttatcaacacagtagaatataatc

SEQ ID NO: 62220 - DNA, 1107 bp, Cannabis sativa
ggttcaaggaatcgttgaaggcgaatgcctttgattgcagcaagtacttgctgtttccagggaaggtaatttgtttcatctaaacgaacagagagagagtgtgagaaagaaacgatgttggttctaaggagttgatttgcagtggacgactgaggattcgacgaacctccattaatgggaattgaagatctttccatggagaaaacgagaccagctctgataccatgtagaagttaaagaaaggaaagagaagaaagattttctgttattattgattatctgcaatagcagagattatatacaaaacaagatacagatagctaataaccaattaataacaacaaaccgtaaaataaccacataacagaatcctaaccaactctaactaattgccagctcatcattagttatagtatccttatcaattgtgacgtgacattgtttgtggtcggttaacagttttttttattattaataaattatatgaaactcaatattaaaatacacttataataatatatattttttaatattataattgtgttaatttaattttatctcaagggccagggttaaagtcaccgacggcatgattgctatgtttccttttaaatatatgcaatttagtttaaaatacgcactaatgtttttgtagttgagttaaataaaattttactgttaattgttattttttaattatatttaatattacataatcacaaatttttacatttaaaatatgacacttaaaaaaaattatactcttacttaaattaaattttgtgtgtcactagtattaatataacattattattagataccaatagtgtttagtacttttaaaacgtgtcacattaagtaaactatataagacttaatatttagttggactaataacaacacggatgagagtactaaatatcttttagcatttctcgtgttgtgttaatgtacacatggagggaacacttgtaagtcaagaggtatgatatgtgttgacacagtcagctaatctatagtctataatttgaagttcttcactatcttaaacgtaagcgccaagggaagactgggtgtatggctttgaaattggatatgagtaaggcg

SEQ ID NO: 62221 - DNA, 884 bp, Cannabis sativa
ccggtttcgaaccaaaaaactaggtttcccctacaggataaccggttgatcagtttcacagcacctgtaaaaccggttaaccaatttctcaactgcagaaatgggaaactcgggctttcgcatcaaaacccaaccaaaactccatcaaacctgctcaaactctccaaaatagtttaacaatataaaaataataaatccaaacatccaaacttagaattacaatcaaatcacaaaatcaccatgcttgaaccaaaactaggttcataaacttaatttttcaatttaaacctcacaactcacaaaaaacatcacaaacacacttcaacaaccttcaatttaacttagaaatacactttgaacttaacttagcactacagccccaaaacatatgaaaacaccacaaaacctaactcaaaacctagaaaattaaagagaagaagaaggtgatcttacctccaagcttgaacaatccttaaaccttatcaatcctgctagaagtggttgaatttgaaaagaaaaccccatagcttcagctgggttctaaggcttcgaaggagaaaaggagggagagagaaaatgctatgcaatgttccttatttttctacattatcccatcttatttcctaatattatttaacttaatataaacttaattttacccttcgtaaaacattaaagcctaaaattaatcctaagggtgttctagtcatttctaattccccgaataaactagtatcttaaattccttaactagtctggtaaaaatccatcgtatcaaactcaaattattgtgatatttttgaccactccgtcgagttttccatgaccatcgaactctaaaatattttatcctaaaaatagtatccacgatacccccatagtcc

SEQ ID NO: 62222 - DNA, 923 bp, Cannabis sativa
  modified_base (883)..(883): a, c, t, g, unknown or other
tggcgtataggtttcgaggtcctagtctagggtccaagtttgggttcaagatggggtgtagttcaagggctgaggctggggtttaggtctaggttgaagttcgagtttgggtccaggtcctaggttcgggatgggctgtgttcatgccgtggctatagtataaaatattgatgttttcgtttgttttagtaaaaaaaaaatctaaaagtagtttttaaaaatattaacccactaacaaaaaattttaaaatgacaaaaaatctattttttattttcatttttgaaaatacaatttaaaaaaactaaaaacacaagtaaacactctctcttggtttcgactcttcccatctttgatacaatatctgttaaaagtcacattttattatatatattttattttgccctttgaattattttgttcaagcctatttttgaatatattgtatttgtatttaatcaattttgtgtatataatatttattcatactacaagaaatgtcaatttttccagcacatctttgtgttggcaaaagtttggtattgtactggtaaaatagaattcatttttgatgtgttcgcaaaaaggattggcaaatcaacgttggtattagaacttttgctagcacaaaatgaaaaagcgctggcaaaaatgacttttttcagcgcgtaaatgcgttagtaaaagttagattttaaccactgcaaatgtgtgctagtaaaactttgacctttttgccagcgcagtttgtgaaatccgttggtaaaagttacttttaccagcgcagtagcaaactgtgctggtaaaagtgacatttcttgtggtgtcatatttagatttttgggttttttctaatgcaaattggaattttattaatttgctaanggctaattagcaatttttccccccaaactttgacatatac

SEQ ID NO: 62223 - DNA, 1360 bp, Cannabis sativa
atttagtaaacatctcacatttttcacattagtcacaataaatttgtactactaagacattgattagtggttaaaatatacttttatttattttaaatgataaaataagttgagttataattgatatactgtatgtctccatgaatttcactaagtaagttttcaacactaacctaaaacgggaacttcacatccctaaaaatgtgtagaattcatacacaaacttaattaacatgggtttcaatgggttcataagagtacgtaatgggatagtcccagtcgcattttttatttgggaaagaaaaggagatctacgggcacacattccaagaagaatttggcagtctatacgtggtcgtatggaagtgggagatacacttcagtttaacattgaagataacattatccaagaaattcaaggtggtgaaagtgaaaataacattgttcaagaaattcaaggtggtgaaggtaaaaataagatcgtccaaaaatttaaggtggtgaaggtgaaaattaaatcgtccaataaattcaaggtagtgaaggtgaagatattgaagaaaattaagaaattcaagccgttcaaggtgaagttgatgatcagtattcaaatctttttacgttggccaatgttccagtagaagaatgtaattaacttcggttggttcaggtcattctgcctgcctttgcctttgccagttcaggccgcccttccggttccaaaaagagttccaataaaacatataagtcttctacgtggggagaaagtgctttgatgaaaaaattaaatatttcattttatatcgattgtaatcatgtgagaatattaatatttttttacatgtcgtttatgtaatgacacataaaaatgtgacatgtcgttttataactactatgatttttttcatttatattgtaatgcccaaaaaagattattaattatggtacattttgattacttttttgagagtttttctcttttatttcttcaaatatattgccttttatttctttatgttgttttgccataaggaaatatgccaacgcttcgtgtgatttttataataatgtaagtataattttaattttatgctttgtaaatataatgtgcatactatatttttactatactattatatgtttttttatatgatgtaaaattcaaataaaatattttataataatttatatattttataataatattataatattatatgattaaattttgggatattagcagctaaattatctgaattttaaattttttaacacttaactacaaaaattgatttttttgaggcaaaactacctaaactcccattttgttttgttctgtacccctccgtccaaaaatcac

SEQ ID NO: 62224 - DNA, 1578 bp, Cannabis sativa
tttagttgagagttttcaaactattcaatcattaatgaaggttaataatgatttttatgaaggttgttattttataaaatctctttttgtaatgagtaatgaaggttaatatggggtcttaactacaccattcgtattttccatggaaaatattctaaaagctacttttactatgggtaagaatactacataatttatatttttatatttatctattgttcatatttttggtaaatattttttttttattttcttcattttttatctatttattttaattcatttaaaatatttcttttttcttttttaattatcacgaatttatataaattttaactcttgttttttttggtgaaagagggatgcaaagcacccattcattgataaaacgaaaaaacggaacaacaggagtctaagtagcctcagggacaaaaccctccagaactactgaaacaaacaaaagacaaactaaaagagcaaacaaagaaacagacagataaggaacacacactacagacaaggaaaacaataaaagacttcccaggcaccaaaagctcccagcagagcagaagcaatgagggcagcaggtggagcaattagaagccaaaattctaccctggatccggccaccattccttatagtcttcaaacacctttggatccatggaagtgatctgaatgtccccaaaagcattatgagccatgaaattctcattcctgttgatctttttaacattccaattcacaaactgggcagagagagttttaaaatgagtggaaactccatctaagtttaagttactctgaataccgtgagcttcgcggatgctggacactgcagaatcgttatcacagaaaaaattcacagaattaaaattcaagtgagctgcatgcctagctgcggacagcagcatggaagcttcagctagtgtagggtctgtcactgagaagtgatctgcaacgacgctacagatgcgattcttcgagtctctgaaaactcctgcaccgaaagaataattcgagtcaatggtcacgtctgtgcagcaggtcatccatccaggcaaaggagtaagaaccgttggaactttacacggacgatcaactttgcaagccaagtgatcgttgaggcgcgtactcgcattctgcattgccatcgatatttgaaggagctggccgccgtgagtaacttcattccgcactttccaaatgacttcaaaaatacacagagcacccgtcataaagtcatcaaagctgagagtggctggtctgtttctattgcttccaaaccagtccatccattcctcccaatttccacaattactggcgtttgttctaataccccagcagcaaccaaaccagagagctgaagcataatcacaactccaaaacaagtgaaatgacaattccctctccttatcacaaattgggcagagaatggaaggtaagttgaacgccagtgcaattctttcatgagtagggagagcattactcataatttgccaccacaacagcttcaagcgaacatggataggactattccaaatgagtttccaggtcccaagaggtgagcctgcacat

SEQ ID NO: 62225 - DNA, 1294 bp, Cannabis sativa
gggacgaaatctaagctgtctcgaagccaatctatactccctcagtgttgaccaataatggagatcatagattacattgacatgtactccttctcccgctcactattttagattaatgtgtttattttattaattctcagaataaattcatattaaccactttaataattatgattaatttatttataataaaagtctcaaattataaataaatttcccgtcataatcattaaatctgaattaactctttaattcataatttaaaattatttttaaattaataggtcaattttgaattttcaaattaattctaaatttatcttagccagtttacatactttgggatttaaaaataataaacacataggacaattctaagatatcatgtttctactatgagatgcatgataatataattgtatagaatttttatgtatgacatgttattcactaatgcatgagtatattattaatcaactattaatgaatatttatttaaaagcaatagataaataataatgatgaactgtgtgataattatgtatttctaattttacaatctttgaaattagaaaataaattacaaaacttaatctccatcgtaacaagggaatttttataattttgtaggatcgtcataagcttcaaaattaattaaactaattttaattaattattcttaaattaaattttaatttaatctaccttttaaacccttttaattaattataataattctaattaatttattcttaaataaaccttttttttaagataatataattatcattttagtcttgtcttaaaataatactatttattatttattttgggttaagaaaacttttgtcttaatttggttttaggtttgagtttgaatttcaaacctaaaatcaattttatttatttaattcaaaaataaattttaaaaaataaatatcccacaaaactttgatatttttgacttaattattaaaaaataataaaattattttattatttattattaaataattagaatagttattatttgaatttaaaattcaaataaataattaattataatatttatttagaattcagttaaatagtttccattttatttgttaatatgttgaaaaataattacaaattatgagcatttaaaagcatcaaccaacaataacacgtaatcattaaacccaaaatctagtatttatttagagcatcaaagacaaaataaacatacataccatactatccatgagagccattatccttcaggctcgtttggtacgccgtataagggtcgtat

SEQ ID NO: 62226 - DNA, 2149 bp, Cannabis sativa
cactctttccctacacgattttttttttttttaatggaaagggagtaatgagaagaaaggagaaaacttcattgctacacagtaaagaaaaaggagaagaaagaagaacaagggaagaacaggagaagaaaaaagaaatagaaaagtgggaagaatagacttaggcgtatcatcaaaagatttttgtggacgtcgattctattaaaaactatatttttaatatatataaatttataacagagtggacataagtaaagctatatttttttgaatggacagtaaaactttattaaaaacttattacaaagaagagagaaaagattaccttgaaagccaaaaaaaattgtttctttccttttcctttcttatacatttcacctttgagctgattcattttttttattagaagggagtaaagagaagaaaagagaaggcttcactgttacagtaaagaaaaggagaagaaagaagaataagggaagaacaggagaagaaagaagaaaaaaaagggggggaagaatgtagacttacacgtataattagaggaattttgtggaggtaggttctattaaaaattatatttttaatatatatatatataaattcataacagagtggacataattaagtaaagatatatttttttgaatggaccataaagctatattaaaaacttattacaaagaagtgagaaaagattaagttggaggccaagaaaagttgtttgtttccttttccttcattaaaagtttcacctttgagatgattcctttttttttaatcataagggattaacgagaagaaaggagaaggctttattgttacagtaaggaaaaggtgaagaaagagaaataggggaagaataggagaagaaagagaagaaaaagaaaagggggaagaatgtagacttacacgtattattagaggaattttgtggacgtaggttctattaaaaactatatttttaatgtatatacattcataacagagtggacataagtgaagctatatttttttgaatggacaataaagctatattaaaaacttattacaaagaagtgagaaaaaattaccttgaaagccaagaaaagttgtttcagtcctttttcttccttaaaggtttaacctttgagttgattccttttttttttatcagaagggagttaggagaagaaagaagaaagcttcactgttaaagtaaagaaaaggagaagaaagaagaacagggaaaggacatgaaaagaaagaagaaaaagaaatgtaggaagagtgtagacttagacgtataggttctataaaaaattatatttttaatatatataaattcataacagagttgacatcagtaaaactatatttttttgataggataataaagctatattaaaaacttattacaaagaagagagaaaagattacattgaaagccaagaaaagttgtttctttccttttccttccttaaaggtttaacctttgagctgattccttttttttatcataagggagtaaggagaagaaaggagaaggcttcgctgttacagtaaagaaaaggagaagaaagaagaatagtggaagaacaggagaagaaagaagaaaaagaaaatggggaagaatgtagacttagacggattatcagagagtttttgtggacgtaggttctattaaaaagtatatttttaatatatatataaattcataacagagtcgacataaataaagctatattttttttttgaatggacagtaaagctatattaaaaatctattacaaagaagagagaaaatattaccttgaaagccaagaaaagttgtttctttccttttctttcattaaaggtttcacctttgagctgattcctttttttttttatccgatgggagtaaggaggagaaaggagaagacttcattggtacagtagagaaaaggtgaagaaagaagaacaagggaagaataggagaagaaaaagaaaaaggggaagaatgtagacttagacctattattagagggtttttgtggacgtaggttcttttaaaaattatatttttaatatatatataaattcataacagagtggacatatgtaaagctatatttttttttgaatggactataaaatttttttaaaaaaacttaatacaaagaagtga

SEQ ID NO: 62227 - DNA, 1307 bp, Cannabis sativa
ttttgacacttaccattgatcttttcatgcctctcagtcaacacgattgcggaagcctgtaagctacaccgcaaatgactcagacattgatgatcatgataaattatttgatggcgaggcatcagaaagagatttatttgaaaatgctgattctaatcttggtcaaaatgaaaagcatgatgttgaaaatccttctcccggaaatggcttggatggaaactatcttgaagaaggtgggggtttctgtccagatagcggcgaaaatgaccaaccaagtgtgagccaacttggtgtttcccatcttgagtctgatgttcgtgaagaatactataagaccggtggagggttttgcatggaagaaagtgaaaccggcccagatgacagtagcatttctgggcaaggtccagctgctgtcttagacaattcgtatctttttccttgttcgggaatggagagcacagatgcaggtgcttcagagccaattattgatcaggcgaaatccgcagcgaatgatgaacagtcaaaattgcgtgggttatcgccagagataaatcctgtgggaactctacaagccatgccttacctgagaaagaaacgaaggaagagttgaacatttgttttgaatttggatgcaaagacagttttgtgtataattatcatccatgtgtatttatcctatgtaggctcaaaaagtgttcattcaaatgtattatacaatgctttaatctatttttctatgagcccgtccaaggttcaatgccactcagagaacaaagatgtataatttgttctactagggatttcaccgaggttggtttatactatgttaataacagaaaaagaacattaatcttaattagtgtaatagcacaatatttacgtatcttatattagaatttggagatttacttgttaacatttgatagaccacatatttttatttgaaaaataaattgactattatttggttaacaaaagttgtgcgttaacacaaattgcaattagtttagaataggtggacatatggattatgtgtttgatgatttgttgtggtaaaatagtgaactaatgttgatgagtagttaatggtttagtaaatgagaatagtttgggttagaagatggttgtatgagaaagtaataggctttattgatagtttggatgttagttacactttttggaatttttgatgggatatttatagttgttcaccttttacactttatagttagaaattagaattatttcttttcgattcttcttttactagaaagaattttatataagtacatctatatatttttaga

SEQ ID NO: 62228 - DNA, 1532 bp, Cannabis sativa
tttcaaagtcaacaaacaagtgtgtcccattcttcgacattctgcgaggaaataagcaatttgaatggacagaggattgtgaatagtgctctcaaaacttctggacggagaagaattaggaatatacctggctgtcacggaacatgctataagtgtcgttctaatcagagaagaaaacaatattcaacacccggtctactaatcagtaaaagactcattgaagctgaaggatcatcctgttcgggtatacactgacaaaccataatgccaagtattgcaaaaatcggacgcctctggacggttgctcaaatgggcagtagagtgtggccagtatgagattatctttcaaccccgaataacaattaaaggttaagccttggtggattttgtagttgaatgtacaggtaaagaagagagcattttagaaaataacccagagccagtacaaatacctcagccgagtaatactgaagacaagccgacttggaagttacatgtggacgggtcggctacagatcaactatccggtgtaggaatcgcccttgtcacacctgggggcaacacctacacgctgcagtcaaatttggatttaaggcaacaatgaagctgaatatgaagctctgatcgccggcctaaaactagcccgagagatgaaggccgaacagattgagatctgcagcgattcacagttggtggtaaatcatgtattcgaagagtacgaggctcaaggcaaaaagatgatagcctatctaagcaaaatacacgatctactcgcacagttcaaaagctatgctctcaagcaaattccaagggaagaaaacagggctgctgatgtattagctcgacttgcaagcagcaatgtcagtgataaagaaaatttgattcctatctagtttctcgaaaaacctagtatcaccggcacagaagaggttgaaatgattgatacatccccaaactggatgacgccaatagcagcctacctcaacaatggagaactcccagacaatagaaacgaagcttagaaaatgaggagaaaggttgcacaatacatcatggtagagggagttatgtatagaagaggatttccatgccattacttaggtgtgtaacataagaagaagttacacgacttttgtaagaagtacataaaggattctgtggtaaccacacagccgggcagagtttatctaagaaaattcgaaggcaaggttatttctgggcaacaatgattaaagactccaaggcctacgttaagaaatgtgataaatgccagagattttcaaagatacctcaggcaccgcccaatgaattgaatcagatgcaaagtccctggccttttgccatttggggaattgacctgatcggacagttgcccaaaggcaaaggcggtgtgcagtacgcagttgttgcagttcattacttacgaagtggacggaggccgaggaattgggaaccatcacatcaaagaaagtggaagacttcattgtgaagaacataatttgcgagtttgagttaccatacaagatagtctt

SEQ ID NO: 62229 - DNA, 768 bp, Cannabis sativa
agttaatgttaatctgatgcttgtgttaaattgatgtacttttaatttatatgagtaattaattataagagatacaatttgttaatttaaataattaatgatatgacaaataaatgtaattcaattttattatatatattttttaaaaaaaatatatatataataaaattgaattacatttaactttaaattaagtcatattttatatttatttcttcatagtaattttatatatttaaacctgtgacgagaatattacatatcttacccaaaaaaaaaaatatgtaataagattacatgcacgtaatcaccagtggcggaactatgttattgtatggggtggccacagtggcggaactagacaaagactcaaggaggggccaaacaggaagggcaagcaaattgtatttttacctatttctttttagaaaataataataaaattaggctatttaaaaattttattatcttgaattattacaatgacgatcatcgtatcccttaaaaaattttctactaaaacatgtcaatattattgtagttgatatattattgtatttttttctactacattaatgtagttgatatattattgtcagtgccacatatttaatttaaaattttaaaaaatattttcttattaactataaattataggataaatactatttcgaaccctctgattgtgaaatgataaaatagaccctatattttctaaaatagtaaaaataagaccctgaactcttttaataattttattttttaata

SEQ ID NO: 62230 - DNA, 1085 bp, Cannabis sativa
tttattatggaaattaattattaatattgaattaattatttatgatgatttatttgaattcagaatgcatttttgtgtcacatatagaaatttcataatttttggaacgcggtatatggctattgtaatcacatcttagtatttttagtatatcgggacaatagtttagacattaagaatgtcaggattggtcgagattttaaaatttcccaaaataccccttagtatccttttaggttgtgttagtgtgggaggggcaaaatagtcattttgccccatttatattttgtccattggtggacttggttttatttaataatttgattttcggaattatatgatgttagtaatatattagtaaagcatcatctattcatttcattttaatttttttttaaaaaaaaaataggaacttggaaaattcaagagaaaagcatttctctctcaaactcactctctcttttacggcccccttagagcagctagggtttgggtgtgattttctgcatttcaagcaagattcttcaaggattaggtgttcttgagttctaggtaattcttgactttattcttttatgttttttttttttttgagttttaaggaattgaattatgcatgttttgagttgttgattgctgtggttgctgctgatgtttgctatgcatttctgtagttaaaatatggttagaaatgttgatttgagcaagtttagatagctagttggttggatgagcaagctttgagtttttgaactcaagcttggctcatcaatggtagttttgaattctgtgtatgggtagttgttttatcactttgaaaaatggttgttggggtgtataaagcaggtctggaaagtttggttgggtttggaaacgatttggttggggatttgaattttttggtttttctgggtaaaaccggctaatcggctttacaatgcttgtaaaaccggttacccagatttggcagtagggaaactcaaaaattcagcttgtcgtttcgcgtcagtttcagtttctagttggctgattccctgctagtttgggatattgccatattgagttgcagtagataggtttttggt

SEQ ID NO: 62231 - DNA, 896 bp, Cannabis sativa
gccgctaatgagtgggcgggaaaattcctgcccattacatttgaatgtattagcggctgggtattagcggcggatattttatttttaaaaaaataaataaataaattaattaattactattagcggggggtccgccgctaataccccgccgctaatagccctatataaaccccaccagccccaactttcccatttttcctctcttcttaaaaaaatcaaaccctaatccccatttcaaactccactctgaaccctccgcctcccccaaccgcctctgcctcccccaaccgcctctgcctcccccaactgcctccgcctcccccaaccgcctccgcctctgattttggtgataatcgcacggcgccctccaacacgggtattgaatctacactttctcatttttatttgcgttttgaattttttttttttttttgggttatttgtgatttattttcatctaaaactgaaaaatgtctaagttatatctatatatattgtttattgtggtatgtataatctgtgtacatatgtatatttagattggattttttttttgttttgtgttaaatcagtatatatattgttgattttggtatatatataatataatgtgtatttatagatatatattttattcgggtatatatatatattattttgtgtatatatataagatttaggtatttatataatataatctgtgtatatatatatttgatatgggtatttattattttatttgtgtgtatatgtagactgtttatatatctatatttgatttgggtatttattgatttatttgggtatatatgttcactgtgtatatatatataatttgggtatttattgttttatttgggtatttttagtttactgtatgtattcatatatataat

SEQ ID NO: 62232 - DNA, 2360 bp, Cannabis sativa
cagtcctcaaatcggttttttttttttccgaaaattattgttaataaaaatgagtgtttaaaaccgatgcctataataaaaaatacttatcggttttaaaaagtccttacgcattggcatcaatttaaaatagttattgggttaaaattgaaacggtatgtttcaagagcaatatagtcattagttttgaatcctctagtatactatatatactcgatggtttaaaactgtcgactatagtagagttatattaaaacccccaaatctcaaattagatattaattttttcttctttaaccttgatccatctttctctgtaggcaatttttgcctcatcaacgaccaccacaaccacctcgatcatcctccctcctgtgtcttgtcactctctccctcttgtcgaagaccacccacaaccacctcgtctccatctctctctctctctctctcgtctcgctctcgaccctctcgtcttgtctctctccctctccatcatcgaggcccacgacagtctcgaactcaaaggaacatcgagcgctacaactccgtccatccttcacactcccaccggagaggaatatatatttatttattaatttataaatatatattttttaaaattttaatatatatttatagaaatttaagtgtctacatatttttatgtgtattttattttttaaatttagggaaataaataatttatttaatttgtaagtaaaaaaataattccttgtaattgtgtatgttctttttaggttgaggtaaataatttaggataatgcttcagtagaggtattaaaaatgactctatgtagagttatttttttttttttaatatgtgtcattattttattgtatgttcattaaatattatttcttatttatttttctttcatatataattatttgttaaaaacactattattccctttaaacaaaaaagaaaaatagaacttattaagactgtgttagtttttacatatataattattttttctccttcctcttttttttttctaaaaattcttaaaagtttcttatcaaagaacctaaactatatataaccaaaactaacaactttgatattttttcttttaaaagaaaaatagaggttattaaaaatgtgttagttaagtcggttaggttagttaaattagtttagtgagttagtctttctcttcatgcctatatatacatctattcctctcctccctttccaatgtaacaaacactgaatattcatttttcttttcaatgaaaattactctgtttcttggtcactaatatggtatcagacgattcctccttcttcaaccttcaagaattcaattgaagcatcttttatcttcaacaatggtgtgtacacgagctaccacctcagctactttcactgcacaaaatcctccagtggtcgatgctgcaatcgctccacaaccacaaaatgaatccgctgacgatttacaaccagatatagatcatgttcctcctcctcaacccaatccagtcgaccaattatcataagaacagaaccctatccctcgatccaacccaattgatcgacctccatatgaagacattcgttcttcatattacgtgagtaatgcaaaccaccctgaattggttcttgtttctccgattctcaccgattgcaactttcaaccatgaaaaagagatttcaagatttctataggcgcatgaaacaaaactccattcttggaaggtagattacctcaaccccctattcatgactctctttacagttcttggataagatgtaaccaattagtcatgacttggatccttcattctatttcacctgagattaagagcagtattatgtatctcgacactactgtcgagatgtggactattcttaactacaaattcaatcaaggcaatggcctaagaatctttgagctaaatgaaaccttaacttatctacatcaaggtgatgatacaatgagtgcttagttcataaagttgacagccatgtgggatgaaataaatcaacttcgttcaagaattaactgtacttgtgtaggtgcagctcaaacacaagatcacatcaaccatgatcaggttttacaattcctcaaaggatttaatgagacctatcatgctactcgtgatcagatattgttaatcgacccttgtccacctctcaacaaagtcttttccacggtcatccaccaagaaagacaaagaacacttggaaacagattaacccttcccattattactacaacaaacactaatcctccccctgcactagatcccaaccctgctgtcaaccaaaattccaaaaataaaagatcaagaccccactgcactccctaccaaaaacctggccattacaa

SEQ ID NO: 62233 - DNA, 1003 bp, Cannabis sativa
  modified_base (105)..(108): a, c, t, g, unknown or other
atcgctttgcttcaggcatgcgtatgaggcatcctgttcggattgtattctccgagcagatactcgaagtcgattccacatgtcaccatcatgtgatgccacgtnnnngtgcaaaaattgggataacaactacaaatttgataaaggatttatctatgtggatcaaagttgtatctctgttgtttttttttttttgttattttttagttttattgctttgttatgttatggatagtaaagatatctttgattttggaagatttgttgtaatttgtatgtgaaagccttcttgtaatgatagttgttgttgactgggattttagtcaaccaacgcggagtcgtaataaatgagatttaaacaaaaattgtaacgataaatgtaattaatgacaccaaaaattgcaataaatgtaaagaaagacactagaatttaaagaggttcggccccagatgccggtatcctacttcccttgtgttttattaatctgaataacaaaagtcaagaacatgctcttgattgcaaagaatgataaagtttttatttttctaagtgctcaaaattgtggatccccttcccaggtcatggatgaccctttatataggggaaagggtcgatacttctcacttcaggagacacaactaacgcggagctatctcaaccgttttccttgatttttggagatggttgaagtctgatttttatgacaatatctcgctatttttgtgggttgaaaattgtctttgagacttacatgggatttgaacatttaaaatattcattgacgatgagggtctcctaagggcgtgatacggtcgttgactaccttcggggatgaaaaccattacttagggacgacacccccgagtcccaacttgaggagggtgacaatcatcatttcgaggtgacaccccgagacccctttgatgttgtgggtagccttggtgtcatgaggatgcactatatcaatcatgtcatgcctaggtggaatgcatttttttacca

SEQ ID NO: 62234 - DNA, 1166 bp, Cannabis sativa
ttaaaatttaacataatattatatgaaaatatgatatataattcaattcaatataatatatacaatacaatacgacttaatacgacattccaaacgaactcttagaataagaacattatatattatgatccattaaaggaagtatatatatgtggttatggaagaagaagaaatagaaataatttttttatttttttaaaataaaaagacccgttgcgaagagacggtaaatcaatagagagatcgagtaagagatcgaaaaataagattaaattatattaataatattaatattaataatagacattattaattaagcttaacattaataaaaacactaaatatgagtgattaaacgtacacacacgagtcatgaacacataccataccaaattaaaaactcaataataaagaaagaagtagtgttccaataccaaaacttatatagattatgataataaacaatcataacactttcaaggacttgttgttgaaggaggtccaaagaaattattcccaccagtagagcctcccaatccaccgaaacccgggagtcccccgctgcttccaccgaaactaggtagcccggatcctcctccaattggcatgccgaagctaggtaagccgccactgcctcccggagcgaaaggaccaaaggttttttggtcagtaagaggaccaccattattattggtaggcaaatctcttgccctagttgctcccatttcaataattgctaataaagcaattaccattaggattatattgcaccactttgccattttgataataatgtagatatgttttgagatgatgatgatgtgtgttaatgtatttgtggcaattacaatggatgtaagctcctttttataggggattctgaagatgagtatatgggtgtggttgtgtgtgttgaatgagctagctagggttttattaaagaaaaagtatgggtctatagctagctagctcatcatctccataaatgcaattcttatatggaccacaatatttatgattacttgtgtgaagtgggtagaaattatatatgatgagcatggagtacttttttgcttttatatgattaaaaaccaaaccctagcttttcatgtcatgatcaaaatatttgctcaatttagtatttaattagttttaagttatttgtt

SEQ ID NO: 62235 - DNA, 3371 bp, Cannabis sativa
tctcccccagcctcagcatgcagcgcctacctcccctagcctcagcctgcagcctgcagcacccaactcccctaacctcagcatgtcgtgcccagctcttccccagtctcagcctgcagcgtgcaactccccctgcctcagtctgcaacgtccagctctcccctagcctcaatctgcagtacccagctcccccagccttctcatacaaatagaaatgaggaggaaatatcgaggctagggtcgtttaagcaaggagatctctaacaagataacgactacacaatgagtatgaataatggagacaaagtttaactcatccgagatataagtaaaagtgggagttttggtacaactaaagatgtctgagacaacagaatacctgaactactaggttacctagtgtaaaagtgacctaacatgctcagacttaagaatctgatgaagttcaaaataccaatgaaacaaaagttttccgaaggaaagtttaagagtctaaattttttctttgaatattcttctattaaaatctttgaatatcacttttggctcttaatattttgttgacaagttcaaactgtcaacaatagctaagacataagttattgttttcaatatatctttcacattttttcccttatctcaataaagtttcacattctctgtttctttctctatggttgttgaacagaactcttaatttctccccaacacgacctgtgatgagccctatcaaatgagcctcgaaccttgttataacaacagtaacgagtggagctctctcttacttcatcaccccgaaaactaaacgcacaacctttaatatgttgttcttaatctcaaaaatcccctttgttgaattttttgtttcttatcgtttgaacgtatgtttgattttgacatgggtttgaattgtgtgaactctgcattttttttacaattatttttcactaatacacgataagttttcaatgcatattctattagaattattcaacactcatataacatgttaacatttaaatctatacccacacatgttaatacaagtgtataatcaaagaaatctatttttatagaaaacctttattgatttaaaaagaaatatacaaatagcataaacataccttaatctattaacttagtggcgtttggatggaggtaataaaatggaatggaaaagaaaggaaacaattttcattctattattttgtttgattacatattaaagtgttggaatgtcattccaatagaatgacattttaaaataaaaggaaaaaccattccaatgcatgataagaaaaaatttaataatttttttatcaatttttttatatgcattttaaattttattttatttcattcctatttctactctcattcttatattttcatttcttccaaccaagcgccaccttagagtttctctaaaatgagaatagagcgatttcttgaagaccacaactaatatataacttaatatattataattttcaatatttctaatttaatccctcaataaattaaaaataaatattacttaatggatttacacatttagtccatactttaatacccattaagtcacaattactaaaataataaccactgtgacaatagtactagaaataactggttgtccttttgcgtttctctttatcgagttaggagtcgcaaccgttcattcaccctcatatctctgttagattaattgttgaattgacgagatgttagttaatcattgaaaacttagaacacattagatgcatttcctattttacaaaaatgagacaaaagccattgccttaatgtagagcactatacaatgcagaaagctggacaagaatggtaagctatctgcccagtcttcactccatcattggctcgggtttccccaaaaatcttctagcttcctcatcagtaaattcactgctaagcagaaacaaactttagcacagataaataagggaaaaaaggaaaatgcaaacaaattgaaaagcaatgatcaattatgaagttttaacctgtccgccgcttctgtcttcgatatcaaggtgatctgtgtggatgctacaaattcacaaaagcaggtgaggaatttctcctggcagaatttgaagatatgatgcaggaaatcattgaattgttttggttcctgcatatatagtatttggcttacattaacaaatgttgttgccaaccttagtcaaaatacattgagaaaacaaagccccaaaaaaacgtacttgctcaaggatacaacccttgcgaagggcagctaaacattccacggctttaggatagttatccccattgtaagagtcttctactaaattgaatatcctttttttcatttccgcaatagctttgttaacccattttggactatccctgcgggaaatcatggcttcaaaatcttctataggtgtcacattaccgatttcctccaccttaacggaagatttattttcatttgtatcaggattggcagagggagcaggtaagagggcataaccctttctgtcatttgatccagatggtttatcttgcaatgatcggctagttgatttcttcagctgcaaaaaaggtcaaagtggaaatttaacgcctctaatttgaatgttggcatagcaaagaagtttaagcatgcatcattaaagtaacctttggattttctttgaggttgaaggccatccgaaattcatcaagaacagacttgttttgtgaaattagttctggatcaggttcagtgatctttgaaagagtttcatcaagtggaggtacagcttcatctgggtgctttgatttcaactcgagataacggtagaaacgctgaacagattgacaccaatcttatttgaaaacccaaacagcaataaaactgggagaagtcctcaaacacagttttcatgaccatctctcaaaatattgttcttgaaaaattttaaaccatcaataaagtaattcataattgaaaatgggtgtccacctctacaatattgtcgcatcatggtgaaaagaaacttttctgtaatctttccatagctggctatgttataaatcagcaacatatgaaagaaaacaaatcaggggaaaaaaattacctccagcgcgggatttggtgtaaactcaggcagaagagcttcctctttatcaggaggtgcaaggtcaaacatttgtacaaacctatctgctgcctcttgctgttggtctgttggttgcatagaagctgggagattgctaaaagaggggaactgaaattctcgaacatcttcagcaaaaggaagtacattgaagtaaaatgaatcaggctgcacattaccaataaacagaaaccccaaatgatcaacaggtaaaataaaataaaaaaaaaa

SEQ ID NO: 62236 - DNA, 1016 bp, Cannabis sativa
aaatatcatatcatagccttatcacaaaacaaaattcataccctctagcttattggaggtctcctcatcaatctcacaaccaaacccaaaatatctttcgcatgaaacgttgtaaatcttcttcttagcttcctcaacgctgaataaaaccacaaaattagagtttaaaaagtttgtacatttatagtcaaaacagaaacattgagatattcataaaccaaatgtgccaaggccaagacaatagacctcccaagaactttagcaagcgtttcaacatagcaatcaatcatctgctgtttcgtggcgccctcaccaccaggcttgtccataacgataagccagtgctcgtaatcgcatccagggaaaagaggagccatttcagtgggcggacggtcactgaaattcgaaccggagttgagaggagagtatgtaccggacctgttaacccggcaccgaatcgaggtgaatcggttaggattaacggaaatggacttaacggcgtgagaaagaggagtgagagttcgacgaccgagaatgagagctggaacggtagggggcttggttatggtagagacaagtcgtttcgggaggaggagagaaaaggtagggttgcgagctgttatggtggccatggctcgtgctagggtttgagccattgttgaggtttacagagatagtgagagtgagaggagggtttttgaagaagaagatatgcttaggttaaaggtttttgcagtttctttgagatatttgaggggacggttgggcctcagtgggccaaggcccatgatcgaagtttacgacaagtcgttgagcgtcgttaacataatcttttaacacaataattagcattttttagtctcaactttttcaactcgaaatatacattttaaagtaagatgatccttccatcttattctattctgttcaattttactttaaaatgagtaacacaataaatagtaattaataaatgaatataaattaaatagttttcactttttttattttaatga

SEQ ID NO: 62237 - DNA, 2641 bp, Cannabis sativa
ataaattagttttctccaagttcttatgcatgaattcaattcaccaatagtgaagcaaggcatcactcatcatcaatcttaattttaaatcagaactttttgataaaaaaaaacatatagaattccatgtaattttgtgattacgaagctaaaactatacaatctacatcatccttaagtccaaataagtaactattaaagttggaccaaagccatgcttttttttttttttggctagtggatgaatctctcaaacaaaacaaaaaagaagaatggttttcacagttacaatgtcaaagcagattcattcttcattgctccctcatatcattactaaaactaaccaagagtttttatcttgagtttaaatcaaactccccaacttcccgccacccatcctgcgtgcctgtttctccattatcggtctcctcatcattcaaaaaatcttcagaaggctccttctcatctctctgagaattgtttccccacccattgatcatctcgtctgtattgactccatgttcctgctcacccatattatgaccacttgaaatatcattgccctgtgaactatgcgaatttgaccttattggacctcgagccatcatttcagcgtgagcttgtgactcggcccttgcttgctctgcctgaacaaaggcagccattcgcattttagcttcatgagcctcccgaccagctttctctcttgattccaactcatttttcaactccaaatacgcccgtttctcctcttggcacaaagcttgctctatcatcattctctcctcagacctgaactccccaacagcccgtttgcgagagataatgttgaaggccagagcctgcttctcaaatgttgctgtaaactctgcgactttgacagatatattgtgatcccactgctgagagcgagatggcagttggcctgttgtatcagagtcaaggattctatcatcttcctccgcctcgtaatcagctaccacatgataaggcaataacctgcacataatgcttagagctgagtaaacataaaagtatcgaaccacaaggtaatggcaatgacatgaacatggatgacacagacaactgacaaggatccaattacatggtttcaatttcataaactgcataagattccagcagcataaagatttcccaacaacataacctgttcgtggaatatcatcatctaagcgggtgtatatttattacacatgcaagtatcatctgtttgagtgagttatcgtgtaaaacataaaatcatcatcaaacaattttcaaaacaaatgatcagataaaagcagaaaagtatcaaaacactgatgcaaaggcaatgacatgaacatgaacatggacgacacagacaactgacaaggatcccattacatgttttcgatttcgtaaactgcataagattcagcattataacaatttgctaacaacataacaccctactattttatctcagtgagtgtacatttattacacagcagtatcataaccgttgagaaatttgtcaaactaaatatttcaaattctaacatttccaacataacctcacttaatttattctatgtgaccataagatcagtgcaaatctattgtcattttacaaccataatggttgtttatggtcgcacactgtaattcatcgtagtttctacaacaatacaaagttattttgctaataacattttttataaagttattttgcctatttttacaaacaccctcatctgtttgagttaaaatcatttgagagctagtgcgaaaaaaattgaggtttatgatggatagtaatgagagcaaagaggcccatagttcccaattccaatatctcatcctccagattgacagtaaagttgaaataccaaataaataatacccataacaaaaagggacagtctttacatataaagctttaccattttcagcaaatcatagcaattattaaagtgttgttatgaaaatgaagaaagaaagaaaggaacctctcacaggcgtcttcgagggaggaaaatgggcgcttgaagtccgggtggcaaacacgccaggcgtcctggtaagccatctggagctccgcttggtttccgggtcggatagttttctgctgcgattgctgattggaattagaattgggattgggattgggagcaggcgtgggggttgagttagggttagggttgggagtgggattagggttattattaatggggttagggttagggttaatgggacggagagtgagagggcggaggtgggcatcgatgttagaagggaagcgagaaatggcttgttgtttgtggagttgctgttggagtagtagaaactgttgttgttgctgctgtaactgctgttgttgctgttgttgatacagaagctgctgatgttgttgttgttgatgttgatgttgttgttgttgttgttgttgttgttgctgttgttgatgttgttgttgttgttgttgttgggctaatgcttttgcttcttccatctctctctctctctctctcccctctctctctctctctctctctctctttgaattcgtcttcttctttctgatctctcgtactttctttctctcttttcttttagaacacaaaatgaagagatgtgtcgtcgtttcctcccttaaaca

SEQ ID NO: 62238 - DNA, 935 bp, Cannabis sativa
tgaattgcaaatgaggatgtactgtactgaacactataatagagatgagtacgaaaatgaaacaatgtaattccaaatgcatcaccaaattcttcagcctattacaagatcaatgagaatgtttgtctgtttgctcctatgacaggaatgaagaattcgacatattttttaatatacataagaatcaagaactatttattgatagagaaagaaccaaaagatggtaaaatatcatcatatattgaaaaagaactccaactccaaactagttctgaaaacactatttatagttcttaagagaaataagtctatatattaaagccttgccccaaactgaaccacaacccacccccaatattcaaagatcctcatattcctttccagctacagacaagctaatagtcataaaatccctattcaaaatttcatatcttatcatggatgaataagaaatatattttcatacaaaacataagcataattcaatattaacaataatcattacttcataaataagaagataagagtgaaatcaactagtagataaggagtaaccattaacaaaatgtaagaatcagaaaatcagggtccaaaagaaaaatccaaataaatatgttggccttggaagaaacatcagagcttatccagtagatctgataattctaaaatgaaactcctaagaacaagccttgaagatggaaacattagttcaaaagttttggttttcataaaaatgttaaaccctcactataaattaaatgtaaaactaaagtgaaacttaaaattggaaattaaatgcaaaatattgcacattagcaatctcgaaatcgttaagcatctctcgtagtaaacatgtacagtccaatgactacagatccgtaatgactgataatgaaaacagaaacatatgagaaatgtttgctcttccgtttcat

SEQ ID NO: 62239 - DNA, 1061 bp, Cannabis sativa
aacttcctagaatatgtaagtgatacatatataatcaagccttttatttttgttttgtatttttgtcttaagattaatgaataacatacatgaacaatgttaggcatatgaagtgtggaaagaagggaaacaaatggagttcatggatccttcacttgatgatacccactcatcatgcaaggtgatgaaatgtatgcaaatagcactgttatgtgtccaagaagaggcgaatgacaggccgtccatgttggaagtttcctcgatgctaaggagcgaaactgctgcagtggcagtacccaaaatgcctgctttttcaagaataattgaagatcatcatggaaattatgctttatcacgtcccaatacttcttctgttaacaatgcaacagtcactgagctggtaccccggtgatagccacagaagcatgtacacagcgccgaccctaagttgaaatgagatataggcaaaaaaaaatttttaggctcttactataaagataaatagtatttttaaaaaattattaaaatcatatgtatattttttaaaaggtattttttttattagagccctcaaaatgagtgggctctagacgcggacctagcttgcttatggtacatgatgtacagttaccaaatctaaaaatttatatttaaattctttttgtgattacttattggtcattcatatgtataaagtctaatttagtggatatatcaaaccgaaacatgctatgttacagtgtactactacattggtaaattttattgccaatggtttgaaatagcagaacactgattatctaccaaaagtccaaaagttgatattactgagttgtttttaagatgagataagaagtttaatcattaataaaaccagtttaatctgagactgaatgcccgggaaaaatgcaggttaagtaaagagtaatatagttttactgaacatgaactcagttgtaatgtttggtttggtggaatgtaacagtagtggtaatgataatagtaatgtaatggaataagaatagtaatgggaattaattaagatgtttggtttgttattg

SEQ ID NO: 62240 - DNA, 1548 bp, Cannabis sativa
acctgcaaattgaattcaaatttgaccattatgaataggaaagacattttaaaacttaataagaaaaatatatccttccactcttttatggaattaatgtataatctacaactcaactgaattttctgcaatgcaatttccactccttggccatctggatgcagttcgatctacaatgagggaagatgacataattatgaatatttaaataaatccatcatggccggacgagagaaaattataatatttaaaatgagattataattatttttaaaatgagattataattattttgaatttacatatttgttaatttatatttaagggttaaagaatattctgttaattaatgatatattctcttaaagttaagatttaacccattaacctcagccaaaaaaaacttattattttttaaaagaattttttttttttaaaaaaagtcacctaataatttctcataaaccaataattctgttatatagccacattttatatagaatagatattcccaattttgtgtatttactatagggccaactggccaaggatgtgactttcgttatagggccaagattcaaaatggctttaaatctaacaattaaagtccctttttataaaaattaacaaaatgtccattctgttaaaagtttgatgatgaaattacaattataaccttgaataattaagtgtttgatatagttattttgcacaatagtatatcgtttttatgtgtaatagcatattaaaaaaaacagaaaggtagtatattagtttaagattgtagtatattatttttatgtgttatggtatataatgaacgaaagacagaaattaaaaaatgcagaatattagtttaagtttgagatatagttatatttcactagaaaatattgtctttatgttcattaaaatatcatgaaggaaagaaaaagaaaaaaaaaacatgtggaacattaaattaagtttttggtatatatatattttttccactatactggtcgtatattaatttttcagtagtatttatgcttacgattgcaaaatatagtttttatatgctattgtatatcgtgaaaaaaaaaatcatttaatagtatattaggtaagtttatggtatattcatattggtcgaatgtatatcgtttgtatgtgatatgatatatcgtgaaggatagaaagaaaaaaaaaactattaaatattaatttaagaatttagtaattttttttttattttgtacggtatatctttattatgtgctatgatatattaataaataaatagagtggtatattatttttatttgctatagtatatcatgaaagaaagagaaataaaacttgtggaagtttatttaaatttatatagatatatttgactatagaattgttgtggtatattcatattactctaaggtataatatttgtatgttatattatatatcacgaaggaaagaaataaaaaaaaaattaaaagaattgaataatagtttagtgttcggtatatttattttgcactatgatatattgtttttatgtgtaataat

SEQ ID NO: 62241 - DNA, 816 bp, Cannabis sativa
acataaacccatttaacccttcgtgtaaaggggacagtaaaagaacacttcggtaaaatcctctctaagcttccttcttcactacagaggagaaaatactatagcaagaactagggttcttcaagctgtaaacaatcacttgtaatacatttaaagcctccaaggccaatacattgacttgtggattaggaatcattaatgcccgaaccacgtaaaaaatttctatgttatttacttaatcactatttaatttcttaaggctcttacttatttagtttctgaaaaatctcgataaatattttggtactttcattgagaattgaagaaagaattcaagctacctagcatctgcaatgaaggtggctataaggaaaattgttgtcgaaaaacctcttcctgctggccaagacatcctcatgaacgacattaatccaccccatgtgagggatggagaagcgtctgaaattgatggatagacgcctaaaacgaaccaacaacgagagcagttcattgagaaaaaccctaaagaataggaaggtggaaaagatgacgattaagaagaagatgatggagaaatcaaagatggctactacaaagatggatacgactacgaacaggatccagacctactccgagtgtccaatgagctacttgaagcttagcaaaaactagttgaaaactttagaaatatttgagatttgtttgttttgtattttcttgtcttcattacttgctaaatgtttacaaatttttgaattgtgtatgaatttatattgaacctatatttttttctgttattgatcatgtagttacaat

SEQ ID NO: 62242 - DNA, 835 bp, Cannabis sativa
caattgacttaaacaagtttagactccatctaaagtattgtagcaatcctttgtaatttactttgccaatctaattattgaaccccaccaaatagcaaaattcattcgtcttttgatgtgtgagtgcttacttcctctcgaagtaagactttgaaatgtcttctcccgaaaacccttctcttgctcaatatatagttattcaacttattataagaacaatataagtacaataaacaaagactaaaacctatctgaacactttaagttttcacaaaagaaactctctccctgtgaaaatgaaaatatgaaaatataagacttgaagagataagaacgttggatgctctctaggtcctacatagaaaccctagagacagccattacacgttgttacagttgtacaaaactttcctaaaataagtcttgctttgcagcgacaaaatcgcactctgtagtgataaatcgggaaactttccaaataagtatgttgactgtggatttagccaatcgacacggagtctaactaggatcagatttttcttatgactgtcacgtgttgaatgataacaaatataaagacacgaattatagaagtttgatccctttgttcaagtaatccgcttttagttgtatgcactcttgagataatctcccatgaaactcttctaatttaatagatgaattattttcatcaactgaaccttgactaccaacatcatcaatctgcacagatttttcttccaatatcatctagattcttatctacaaagaatccatccaaatataggctcaacaatttctcctcagttaacaacaaattcttcactttaagcta

SEQ ID NO: 62243 - DNA, 1568 bp, Cannabis sativa
aatagtttttttttttttacaattttaggacattaagcctttgggagcccgcggcgctctcctgactcgcctaccctcaaggttgcccctaaccttaacatgtatcaaaaacttgtacattgtattgtgataatgcttttatcaaaatatatatgaatctttctaaagatttatctaatatgattaatttattacttattgcaagttagacaaattgtctccgaatctatggatattacaaaaaagattttactttcagtcacaataaaatttataattaaaagtaaaaaaattataacaaattataaatcatcattactttatagtgactaaaaagtttgtagctacatgtattagtcgcaaaaatcacaatttgttgttacttgtttattgagattttcagaaaactaattataaataatcagacctgaagaaataaacaagtgaaagaaaaaaaaaagtagaaatgacacaaacagtttttacgcaattggaacgttaattagccttagttcacgagtcaatgttattatgtaactttgagctagaaaagcctttgaaaatataatgagcataagtcctcaagtttgcctgagcaaatgttgcaagagaattcaatctttaactcgcagaattcattgggtacttataatatctagagaattacacttagtttccctttttttctctattgggtttacattgaattacataacttgcgctgtctcgtgaagtccagcccatggaagagatgatttattgactaggcaaatgagatgcggttgaattgtgggcaactaatcatgaactaattgcttgatctctgtttaggaagtttttctttttaacttgatatgatcttctgtcgatatttaggagacaattatatccttatctgtgcaaaggaataaaaaagggaaactggactggtcttccaggaacatgttgtctgactctttcgacatcgcgatattggacttgctttcggatacaagctgtcattggtggaaggtcgtttgatcacagagccaaggcacgttcctggaaggtcttgtataagttggacttggcctaatttgtcttctttagggaaccactagcgagtctttgatgttgacctagattccacgtgtcccttgctcgaaacacagataatgtttacccacaagcttccaaaatgatatgtatggtggaagcttgcatcattccattagtgttgacatgtggagaattagaagtaataacatgacttactaggtgttaatcaatcatggaaggtgacttccatcctcacttgcagtacatctatgtggcagtcgcctagtggtggaagaccaagattaacgaggagttactttctagaatcgcttttattttgacggttgttcactttttggcatgaaaattaaaaagtagcatcttcatcattgatttgtgcctcgatttcagggagcattaattgtggttacacacttagactgttggaatccccaaccgttagatggactttacgtttctggagactttatcgtggatcgtccattctctttcacgtggattgccacttt

SEQ ID NO: 62244 - DNA, 1472 bp, Cannabis sativa
atatatatttagtataatagcatatataatagtatagatagaagaagaacataaaaataaaagtggaataaaaacttgcattattcaaataaatattacaacatgaaaatcaaaagatacaaagttaacctcacttttgcatatagaatcatccctaacctttcgaagaagattatgccattatgctcatcattctctcaaaaattatagaaagaaatatgagaagaaaagtgagaagagattttgctatattgtctttactctaaaaattacacactttaacaaagaaaatgagctcctatttattgggtgggtctcaagaaaataaaaattatccggcgttttattaaaatttatgtagtatatttaaaaattactaaaaatatgtatatttttaaagttaaaatatttgtttttggacccttgggttgagtgggccctagacgcagacccagtcaaccttagtccaggccccgactctacctttttatagagtctccagaaggattaaaatgcataatataaataaaattgggttacaaaataaataataaaaataaaaatctgcttcgtgacatgattaatattattatcgttatctttaatcttgtggtatttaggagggtttggtgggttttgtgataattttgtggtccatttagtgttgtttctgaaatttgggcttcaaaagatgttgagtgtgctcaagcccaaaagaactttgattggatcacacatgtggtaggtgaaagaagaagatgggagagcagccaatagacaagtgccacacgtgcgagctgagaagggaagaagatgggccacttaggtgctgatgtagctcctagagcaaatggagaggcgccatttggcgctgatgtggcatcatgttgggctgaaggagagggagaagatcttgtgttcggcttagctcatgggcctatcttttttttcctttaatttgcgctgctcatttttttttttggattattttacaaatatacaaaattaataaaaaaaaattataacaatacgattttatagaggatgttggtaaaagaattacatgtgagggaatgtgaaactcaactgtagaaagattttcatatgacccactagaactctatgagactcaccacagtcgaatataaaaaaatgaatattgatattaggtaccttaagttagatacctaacaccatactagtgtgacacattataaatagttggcagttttctattttatttatcaaatcaaaagaatttgatattaaattgcattaatagtggtattggtatgccagatcttgtagagttggacaccttaatgtgcctcttaaaccatctccaaccttaatgtcgaaaattctttttattctaactacaaacactaaaagttacactaaaaatattacaagatatcattaattataaaaatattataaaatttaatagctaacaattatggtatgtaatt

SEQ ID NO: 62245 - DNA, 1079 bp, Cannabis sativa
accctctctttcttcttcctcacattcacactctaagcttctcagctttagctctctcacactcccacctcactcttcttcctcacccctcaaggctaatcctactatggctacccctgaaggagctgcctcctcctcttcctccgcttctgcttcctccgccattgattttctttccctttgtcatcgccttaaggtgagttgattattattataattataactgtttttgttttggtaatggaagatgatttgattgtttgtttgattttgcttgtgtgtgtaagacaactaagagagctggatgggtgaagagagatgttaaggatccggaatctgttgctgatcatatgtatcgaatgggtgttatggctcttattgctaaagatattcctggtgttgatagagacaagttagtgctcattttttactgtacttgatgtgcttttgttttgtgagactgagattgttgttctggtactgtttcaggtgtattaaaatggctattgttcatgatattgctgaaggtgagatgccacatttttaattttgaatgtgtaaatgcttgttcaaaacaaaataatgtaaagattgagatttttgctcttctttttgttgggttatgtgttgaaatacaaagtaaacataatgtaagtgatgttttgggttatgtggcttactataaatagttggcggttttctttaatcattattaaagtaaaataactgagacccgatattgaattgcaccggtagtgatatgacacctaataagggtgctatgcattatggttgtcatttaacatttctcaaaaatgggatgattgtttttgcaagcaaggagaatgtggattttgatgattatggtgaatagaaattcttgtcttaatggataaaacaaaggtttgtttgtgtataggcatgttctagtaatggctaatgggcaagtgtttataaaattgattggttcattgttgatgtgtttattgtaagtttaagctctttagttagcacttatgttgtttttctttattggagtagccattgttggggacattaccccttctgatgggggctca

SEQ ID NO: 62246 - DNA, 1361 bp, Cannabis sativa
tctcatgattgtaaatgtaacattgtgggtaggacatccatagttgcacccctttaaaaataaaatggctcatttctttatttagttgggccatgaccacaacttggtcaaagcaatataacctttggaatcccaagatggagtaaagaaaggagtttggttcccaaaatgaccttcacttactaaactagacataggaataaagtgggtgggttccaatttaattaattcaaagtgacccattgggttaagtttactcttgtgggccaaagctgaaacaaggcttaaggaattgggcttgggccatatttggtagggtttgagtacctgaagagaagaacaccaaccaacaattcccttttccttttcccagttcagcgactttactgagtgaaccccatacgcgactgaattgatggatgatggtggtaatttttccttcacgacgatttgctcctgcgtcggcgacaacactctctccggcgtcacctccagctgccccgaagactccaccaacagccacgtctcccccttcttcgtctccggcgacgacctccgctattggttcggctcagtcaccgcctgcaatggaatcgacctcggcactggcgatgaaacccaccccaacgacaccaccagcgggacttcctcctccgacgctatcgctaacagcgtcttcgttttctcttcctcgtccggcaccacctcccacacagccttcttctccggcgatggcaccagggacgctatctccttcgacacaaccaccatcttctctgatgtcgttcgttgccgatgtgcgagcgaactccatggaacaacttcccgatctggtgccgttcccaacaaatccttctgctcataagactccaccagcagccccgtctccctcttcttcgtctccggcgacgacttcaactgctggtttttctccgtctcttcaggagatggtggtgccgcagtgatagtttccctgaaactatcgagtctagcgaacgctagtttgtgttctcttattgccctgtccatttcttcatcgtttctaacatccttctcttcattaatcttggcctcaatatcctttgggagatctgatttcacaagatctgtgtcatcttcaaccttaaaccttcgatgatactctgaacctttgtgcgtggattgggaacggaatctgcgaatcagtagggatttcagttcattccacgtttgaaaaggatacctccgattttcccaacagaaccatctcagagttgatccttcgagacaatgaattgcagtgtctaatttttccgctggtgtcaaatgttgtaagctaaagtgcaattcagccctgtaagcccattcctcggggtcatctc

SEQ ID NO: 62247 - DNA, 750 bp, Cannabis sativa
tcctcggctacttggaggagtctcatttggggaagagatctccttctcaagggcctttgttgaaaagtgggcaatgtaattatatttctgctatcaactcaaattggattcctcatttgaactcccccagtcttttgaatggtcctccctttcctacccttactatgtctatctttattgatgaggctggatgttagaatatcactaaacttaatcttttctttcctctagatattgtggatgctattcttcatgtcccaattgatctttcttctgctgatagtctcatttgggtgcatcattcttcaagtattttaactataaattctacttaccacttggctaagtcctcttcctattccgattctccctcttcttccaaactttcttgttttaaaagctagtgaaaaattatttggacatttaagatcccccaagccccaaaatcaggcatttcatttggaaaactttcaatcatgtcttgccttttgctctaaacctctacaagttgaaagtcttagaaaaccctacttactctctttgctcttgtaaagtggagtctatctatcatgccctcttagagtgttccattgctagatttgtgtgaagaaagtcttattttaaacaattttatcatgcaaatggtaattgtgatattaaggagtttctccttatatgttttgataatttggagaaagagaagttaggtgcaacatgagtatgttgttgaaactgtgcaatattttattc

SEQ ID NO: 62248 - DNA, 1541 bp, Cannabis sativa
gcaatgtttagaaatattttgtaacgggtcgggacagagtgttaataaattcaaaacctcaatattcttgaataacaatactaatgagggtatgaaaagaggcatcaagcaggaactgggtctcaacaataccatacgtaacatcaattatttggggctcccgttatttagattctgacgaaaggatgctgatttcaacttcatcttagataaccctagtatctaagcttcatggctcgaaattgaagacgttgtccaaggcgggacgagccacattgatcaaatttgtggggcttgctttgctagtttatactatgcagacaacgaagctctctaaaaatgttgccgcgaaggttgatggtatggttagagacttttggtggggttgtgaacagggcaatcatggtatctagttgaaggcctgggaccacttgtgtcttcccaagtcctagggtggtcttgcttttcgtaagtccttggaaatgaatcaaagtgatatttgttaagtggggttgggctattcttaatgaggagcaatcgttgggctatagagtgttaagggccaaatatcttagaggtaacaagttcttaaagtgtacctttaagagctctgattcgtgattctagaagaacgttgtgcgatctaaaaaacttcttaagaaaggagcgtgcaagcttattggggatgggaaggagacgaacatttgggatgactcgtgtgttatctatggacgagatttctaccctaagcctattactcatccgccggaggacatgaggaaagtggcagatttactcttacctaatggggactgagataactcaaaactcattagcctttttgacctagaaactatcaacaacataatcaaaggtggcaagcctagtggtcaaaggagtgatagatggctatggagtaaaaaatcgaatgggttgttttccaccaagtctgcctaccttatccaagctgttgagtgtgctccttcgtgcaatgttaccccaacactttggaacaaattatggaattcaaaaattttggaacttcaaaaagtcttctagtggagaattctctctaattctctgcctattcgtgcctctctcgctaagaaaatgcatattgacgaggtctcttgccccttttgcagggagaaagatgagacaatggaacatctctttctctactgaaacttcgactatcatctgtggcagtcttccccttaaggagttatgctagtgtggaattcaggagctcgtgtttgggattgggttaaatttctttggaatttgaattctagtggggcggatacttaaaaattgttactctatgcttcgattgtggaggatatgatttggagggcacgcaatgacaaggtacacaagaacgtcctgtgtaatattaaacatgctattgactctatctatttttgttacgcagattatggatcttgtttacttacctctttgaagtttattgagtcacctacatggtcgccgccactagtggattgcgtcaaaatcaattgtgatgtcaaagttagttg

SEQ ID NO: 62249 - DNA, 817 bp, Cannabis sativa
tagttttataatgaattcatcaactgtggtgaattctctcttacattctaaaatgtttgtcactataaacaccttagtcatcttaatggcattttatcgtccttaattgttttagacaacataaattctttcaagaatatattttttcaataacctattaggctggttgttaacctgaatatgctctggaagcttaaaacaatttaagcttgttatcaaagcaaattcatccaatgcaaactttattttctttctatcaaaattcaactctagctctgttttattatctgataatcttgatgtagcaaaagtgaatagataatcatgttagctggttgaagagatgcattcaaatcgaaaagaaacccaaaagagtagtttccaaatttgtctcgttgctgctcactaagtttttttttttttttaagtagtgacttttgggcaaattactaaagtaatagacaaaagtgaaataattaaatttcctttcctatttcttaaatattttaattttttttatttgttaaacaagtttagcagttaacgtgtcatccttttttgctactgtagtttgcttttaatgggatcaaattataaaataaagctaatatataggggttctataggttagagtattctacataagcaatatatttatgttaatattatgataagaaaaattaatgagatgcactttcaatggctgaacaagtgtgagaatgatcacaatatctaaaactatataaaaatagtcaatatgattatggaaccaatggagattcaatagtacttatatatatatttataggttgagtga

SEQ ID NO: 62250 - DNA, 3214 bp, Cannabis sativa
catttccttcctaacaagtgttacaaaaactaaattcaaaaacacccttcttccctaaacacacaactttctatggaaagaccattaattttctagccaaacaaacaaaattgaataaagtatgtaactgaactaaaactccatcaattcctttcctgccttctcagaataaaatcaaaaataataattgggctataccttaaacccaaatactcaacttgttactttgaaattagataatcaaatcacataaacacaacctcaaaccaaaattataccaactcctctctaccctaacagagtaaattaactaatcttgctcttaaataggctcatttccaaaatcttacttaaaactacttattcaacacttcattactcatacaacatcataacaaaattctagctttacaaacacaaaccaatatctttactgaaaagtatacatttttgttctttgtataatgaaaaaaaaaaaaaaagattctgacctgaaaaatctccgaccgatccgagttgccgagtcgtcactgattttggagaatctgagttcgaaaattctggaacttaaatttggaaagtgttacgacgtaaattatggtatccacaagtttaaattcttaaatatccaacggtcacaaatttttggttggtagatcaacggtccgaacacggtacacgtagatgcaggtgtagtgaaaatgaatctattggatgacgtggcgagtgctggagcagaaacacaatctatgtgaagctgtgacgtggagtgttgtgattgatggagaagatatttggtgaaatgtaaggatgacaattctgaaaaattgggaaaataggggtagtggtttacaaaatattcaacctatatattgggacccacctagtacgttgcttaacatcaaccagttaaattaaccaatttttaattttattgattttgtttgactttaatttgaaaaatatttaggttatttgtattgtcggtccttaaattatatagattttagtaagttggtccttaaattcgattttttagtaaattaatccctaaattatataggttttggtaagtttatcatcagactttatattttattagcagcattcagtctccactcttaaatattggtatttttattattttttattgattttactttaatttatttttgtgtataaattcaaagtagttttatttttttaattatatatatttattaattatttaaattttacatcagtcctaataaaatttcatgagttcgttgttaagcataaattttataatataatttacttaagtagtttataaaaactcatttaaagaaaaaaaatactttataaaaaaaatatatattattttggctacaaaataatattttattacatatataaatagattttacaataagttcttttaattatttaagaaatgagaaaaaatatttgcttatagtgcagaggaattattcgatagcaaaaattaatattttgtgtaagtgttgttcataaaaagataaattattggttcacgtgtttatatagttttgtaatgtttaaatatgtcttgattaattaaaaaatacatataaataaaaaaaaatatatgttttttcttatttcgacatatttaaaaaatatgtcttaatttgtttttttttcttcttcttattttgatatatttaaagaaaatacatataaaaaatattgtatatcaatataaattgtcttaaaattaatgcaaaattaaataaataaacaaaatactattctttaagagtgagaactttatgtttcaagaaaataaaagtttggggaccaatttgtcaaaaaaaaaatttgaagatcagcttgccaaaacttatatagtttgggactaatttgcccaaaactaaagtttggagaccaacttaccaaaacctatatagtttagggacctgacatacaaaaaattctattttttgttgaatttgtttaggcttatttgtattgtaggtccctaactatataggttttagcaagttggtccctaaattttattttttagcaaattcgtccccaaattatatatatttttgcaagtttatccttaaactttattttttagtaaattggtctccaaacttttattttattagcaacattaaatctccactcttacatattgataatttaattatttttttttatgtattttacttactttaatttatttttttgtgttaaatttaaataattttatttttcaattttaatattttgataaaaagtaattatattaatatattttatttatttatttttatttttcaatattcttataatatttaattttttaccaaatatttaaaatatgctttattcatatataatatttaaaatttgcatcaacattcataaatttttatgagtttgttgcgctcagtataagttaaaaataaattttttataaaaaaaaaatttagcaataaaataatattttactatatatatatgaatagattttatattaagttttttcatatatttaaataatgaccatcctctaatagaggaaaaataattagagaatgtaaaaacttttttgacttatatatagttttttttttttctttttgcatgcacatgaactatttgatttgatgagaataaacatttgtatgaagtgcaaataaattatttggtagcatattaataaaatatatttgttttctttttatttcagcatattttaaaaataaatgtatcttgattttttttccttcttattttggcccatatttaaaaaaatgcatatagataaaaaaaaatatatatatatatgtacttttttaatttgataaggtatatcaatataaaaatatttaaaattaataaaataaataaataaaatactaatatttaagagtgaagacattatgtattcaaaaaaaaaaatgtgttgaccaatttactaaaaaataaagtttgagaactaactcgtcaaaacttatatagtttaggaattaatttgtcaaaaaataatatttgaggaccaacttaacaaaacttatataatttaaggacatgtggtacaaaattacaaataatccattttttaacaaatatatatgttttttaattattataaagacaaaatgtgtgtatatatagggaaatttacatggtatactaacttttgccatttttttataaaaatatttttattttt

SEQ ID NO: 62251 - DNA, 579 bp, Cannabis sativa
ccagacggaggctttttctctcttttcaatattttaattttattttaatttgaaaatattatttatataatttttgggtagcgttttgttcactcactcgctctgatgtttcaagtgtcgagattcaagtctttcgaaaagaggacaggacagtggttcggcctacatagtgggccctttttaccttgctttttttttttttttgtgtgtgtgtgttgaaaccttttgtaacttcattaagataaaccaataaattcaaagctacaacagtagcaaatttggaagggaaatttgaatttccatacttataaaaccccattattatttcctaaatacatacttactaaaattgctaatatatgccaattttattaattttccaaaactaaccccagccccccaacccctctctcttcgtttctctaaaactggaaaaaaaaaacacagtatttactccattttcgaaggaaaaaaaaattattatatacagttgaaaaaccaaagtcaaagtcaattatgtcttcaaattgaatgggccgggcttgaaggaaaagtctccgcttctctgagtcactacac

SEQ ID NO: 62252 - DNA, 982 bp, Cannabis sativa
aaaatctactagtagcactttcacgcttaactgctaatgtgattatttataccgctttccattttaggcagtagcatctagagtatttatgtgatacaatgccatgcttagaatgttaattgttaaatgtttatttgattggaatgaaattgttgagttagagtttacaggtaataagtgcataagtgtggtattggtgcttaactcgctagggttgttgattttagggtcatttgtaaaaatggaccctcggcaatcatctagaccacagggcgagcaagtagagcctggtgtagaccaaaccaatccaccggcaccgcctgcacctctgcagaatttaagggataatgcagaggttggcaatgctaatccgcctgctgactggcaacagatgtttcaagaaatgcgaggtatgatactttatcaagaggaagaattacattggctgaggcaaccggctttatagagcaagtgttaccaccaactcctgtgccaatggtgggtaacaaggggtttatgttgacacacagagattcagtgtttgagcggttcgtgaagctggaacctccaacttttctgggaggcactgatataattaaagttgagcagtggatgagtatgatcactcgcatccttgataacatgggggtgacgggaacaaagagaataaactgtgatgcctttatgttacaagatcatgcccgcgtctggtgggatatagtagggcagactcaagatgttagtgtgacgacttaggatgagttaagagtctgtttgaagaaaagttctataacatcaccgtgagaacgtctcatatagaagactttgtgaaattgactcagggaataatgtctgtggccaaatacactcggaaatttgattggttgtccaaatttgctggtgatctggtgcctaccgatttcaccaggaaacagaagtatgtgagaggactgaatgtcacaatcaatcgggacttgaagat

SEQ ID NO: 62253 - DNA, 649 bp, Cannabis sativa
aacaatgcagctttaacatcatcttcatcaacaattgcagctttaacatcatcttcatcttcatcaactttcacatcatcttcatcaacaagagtatttcattctgtaactttgacatcatctttatcaacaagagtatttgattctacgactttaacatcttcttcttcaagtacttattatttcattttattttcattattcttaatttcttctttaataagaatgcatttttttacatagttctctatcactaacacactaggttgtgtcgttcctataattgtcttgagtgaacttatcattctttccattgatgacattttttctttcactaatgacatttcttcttttattgatgacatctcttctttcattgataataataaattattgtccgaactagattcacacatctttatttttttttttctgaagacatctacaattaaatgaaagtaaatagtatgagtaattatattttaataaatttttgagtaatttaatcaaaccagtttgtggtgtatagaaaaaacacaacaagaagaagaaaatgctaatcatgagattggaagtgcaggccatgcaagcaacttaactttcaaaagaaaaaaaggtattgccaatgatgaacgatacggtgatcctc

SEQ ID NO: 62254 - DNA, 1682 bp, Cannabis sativa
caattaagttgcacgttagttggcttgcaacagatataactatggcattacagtttcaacagcaacccacgatccatgcttcctggaattgaaacctttgtctgatgcaaccttctgtcgaacacccatcaacctttgtctgattgtgtaagtgatagtgtaagaggtattttagtaattaaaagcacataaaatgtataaatattgtctacaccttatacaagtatttttataaataaagtgtgaatttgtgtttttcatgtaataattctaaaatcttattccaatactttaatggcgcatttactaaattttaaatggaatcagaataatcaatgagagaaatgaatgagtttaaaataaaaaataatcggaaacaatattttattatgctgtttactaaactatccgaaaaaaaaaactagaatcatattattttatttatataactagaaaaggtattcagaatgctttaagttgataagattgtcattattagaacatgtaattattttttgtttatagattttaaaagggaatatttatctttttcatttttaattaataaaatcaaaattaaaataaactaagttagaaaagagaaaggtattctctataaaaatggggagaaccttttcctttattttctccctaatttgtgtgggcaccactactttttcctttttcaaaatttagtaaacaattgtatggaaatcaataccatacatttaatttccattccctttaagtaaacatgtcataaaatgtaacaaaataaataaattaaataaaaattaatttcttttcatttcattctattttattatctccaactaaataccacttaagaccatcaacatgaaatgcaaaagttgatctatatttggcacaaataatagttttgtgatatttttgcatcaacatttattattatactctaatacataattataaatcttgatgcaaaatttaatatgtcatttaatactcatctaataatttattaaaaatataaaataataataatcatacagttgtaaatataaaatttaataataaaataataataattataaaagtcatgctaatgtgtttgctaactaaactttaataataaaatattacaaatggtataatagtaaatataaaattatagtatttattgtgattcaaattttgtatcatgctatattgtgatctaaatttggattactttttcttatgtgaaatattttcatcacaatttggtacactattaaaatagattaataaacttttaaaaagtgaactatatttaatatatgcatcacttcaatggagatactctgaaagaattgggttttcatatatatttcattccatcatttttctatgttcaactaatgtaatttaattaaaagctaatgtaatttaattattagtaaactaatgtatggaaatcaatatcatacctttaatttccattccctttaagtaaacatgtcataaaatgtaacaaaacaaataaattaaataaaaattaatttcttttcatttcattctattttattatctccaactacataccacttaagaccatcaatgggaaatgcaaaagttgatctatatttggcacaaataataattttgtgatatttttgcatcaacatttattattatactctaatacataattataaatc

SEQ ID NO: 62255 - DNA, 1385 bp, Cannabis sativa
ccaagagaaagggaagcttggtaatacgacataatggtaagcaatacccaaagaattctagagcttgagaagcgcatgggggaactagatggcctagacgagagggtcagggatctaaccttcaacaatcagaactcagggccaacagcgacacaaaaaaaagttgccacgttggctcaagacaatgctaacttgttggctagggtagttgtgatcgagaggagagatgttgctacagaaacatcaggtgtgcctcagatggtggatcgcatcagggcattagaacaagcaacaacagacatgcaggctgctatcactgtgctacaaaatgggtaggctgcatgacaagactccctcaatgatacgatagaggattgtcatgtctctatcacagccatttgggaagagttagcaggaatgtcaactaagttaaatcttaccatgatagcagcagagtgtgcaaataccagcggatatggaggtatggagtatggccgactgagagcacctatgcccaaatgttatggaggggtgagggatgcgaaggatctccaaaactttctctttgacaagaagcagtacttttaggtcgtgcagaccgactctgaagaagcaaaggtacctcagctactatgtatttgtctggggatgccaagttgtggtggaggacaaagtatgaagacattcagagttgtaagtggaccattgagacttgggaggacctcaagaaagaattgaatggccaattcctatcagagaatgtcacctacttggttcgacaccagccgagagagttaaagtaagttgggacagtctgacactatgtaaagaagttctctagattgatgcttgacattaaggacatgaatgaagtcgacagacttgtctacttcctcaaaggactcaagttgtgggctaaacaagagctgcaaaggtagtgggtgtcagattttgccactgctcaagctgcagccgagcggctgactgattacacctctgagaatttgcagccgaagaagacgaatccctagaccagcaccaacaatgctgcgagtaaaaagtcaggaaagcaacggacgagtaaaagtgggggaggggataagagcactcctgaatctagctcctcctctaaaagttatgctgcaatagggaagaatccccttaagtgttggctttgtcaaggcccacatagggcagcttcttgcccccaccaagttcaagttgagtgccataaaggcatccattgctcaagaggagcaaggatgtgaggaagatgatgaagatgaagactgcgcgtccatgagcgtcgttcgattgatggctgctcttaagaagcatggcgcaggaggaaagaaagcacttgggaagggattgatgtttgtgga

SEQ ID NO: 62256 - DNA, 1094 bp, Cannabis sativa
aagtgaagaatatgagaatggagtccttgcttgcttgagcttgactccttaatatattatttgatatgtagaaatacgagttcgtacattgtaattaattgagttgacgtcccttgacttcttttgcttatttccaataaagataaagaaataaaagacaagtattttcaaaggacacccaattttggtctctctctctcacacacacactcactcactcactcattcaatggaattgatcaagaacaaggtagaagaagaagttgatgattatgatcatgaagatgatgacacagacgaagaagaagacgtaataatagcacaagtaaaatggaggaagcactattcatctatccaaaaaatcctcttggttggagatggtgacttttccttttccttaagcttagctagagcctttggttcagcaaggaacatggtggccacctcccttgattctcttggtacgtcgtctccttctttctccatcatctctccaaaacaaaaacccttttagatcactttcccctttgactttttgtattctgtaaatgggttttgattctcatttaacagagaagataaagaagaattatagcgatggaataaggaacattatggagctagaagaaaggggttgtgttgtacttcatggagttgatggaaagcacatgagtgatcacttcttccttaaaacccagagatttgacaggatcatctacaattttcctcatgttggattccacttcccggaagaaaattgctgccagatccagttaagcccttcaatttttctccctcttatttgtttttctacaaaggaatagtaaagtagactttgcttttttgtttcaccttaaatttttaaaactaatatacattattgattatgctttactaatggtggatgagaaattgtgtagtcttttttgtaaatttggtacattgtgctgtctcatcattgttatacattagtaacccttaacttgtatgtatatatattttgttttctataccaagaatgaccataattttgtacttgaatgtctttgtcttcttgtaagtaaaggatttttagttacaatacttgagtataa

SEQ ID NO: 62257 - DNA, 793 bp, Cannabis sativa
gtcgtcttctcaggtgaagttgcccgaattaatggtggttatctttctagttaaatttttgtttcagttgtgttgggttgctgcatggttgcgcgataattgcctagatagcatggatcctgggttaaaggtgtgtgtaagtggtatttgtgtaattttttttatttgagctgtatatttatttatttggccaactggaagtatttttgtaatattgttacttttttagttaaaattaaaaaaaaaaaccctaatatttataaatgttttttttattatttttattaataaaaaaattaaattaaattaaattatagctaatttataaatatttttagttatcatttaaattaattttaattatttaataataatctaagactaaaaataaatatttaatataattattaaaatatttaccagatatatacatgtgaaaattgaatacaaaataaatttaaataacaaaagttaattttttaacaacaataagagaggtgttttttgtttttgtttttgttgttttcacagaaaagattaagagaggtttatggtaagaaatatatcccttcacctatgttagtggtgacttttatcatcttttctagaaggaaaaagaaagtcctacgcccgaaagagtttgatccaaattcactttgaaaaaaaataataacttctaaatttcaaccattgaaagtatcttttgtcattatacataaacacaacaacataagccaattcaaaaaaaaaaaaaaaagaaaaggcaatggggatgccaatattagctgataat

SEQ ID NO: 62258 - DNA, 1289 bp, Cannabis sativa
  modified_base (1228)..(1236): a, c, t, g, unknown or other
ttttttggaaaactgtaaaaatgtaaaaaaaaacattctttaaacgtaaaaatgtaaatatttaacaaaaaatggtatcttatgtaattattccaagaaagaaagtgaatgaaaactgaaaagattgttagcttttagttcatatcacaaatatagaggaatgcacctaaatgtttttcgcttcattgtactattaaagagaaaagtatatacatgaacacttctctaaggcaagtgtcaacaaacagtcaagtacaaatacaaaatgacccctggtgaacagcttgtgtatgtaatcaaagaacattactggtatacatgaaaaaacatacgccccatatgactcaatatcctactgatcagagcttccttcttaccgagtactttaactctgttacagtcaaaaatcatgaaatttttattttctgaaatctaaggtgtaatctaaaataaactgttagcctttatacattttctacatgcttaaggattcttttaaaaaagccaccattattgtataaactatgcaaacttttaatacgtctaagttctctttccttgtctgcaagatagattcatagatcactgaagcaaaacaattctccaacctctccattgtctgcaagtttagtccaatcatactttgcatactcctgaactgcaatttcagaagtagcttttctctttttggaggcatcactttccttcttgtctccagcattttcagtttcctcatcataatggtccccatagatggaaagcttaaactctttcaaagcgttaatcgcgcctggtctgtgaggtaatctacaatatataaaattaattacaaattactaacaggatgcaacgagcagacaaacatttattatcctctaaagctggatttccttttggtatgcacaattttcttacaagaagagtggttgtacccaaacatatttacctaggcatgccttcctcatcaggtactctttcatctttgatgtctggcatctcatcttcctccaaagcaagagtctgcaaaaccgcataatgtcgcttcaaagctgcaacaaaaacagtacgtgggtactgaagcatcttattttttttctaaaaagaaaaaataaaaaagaaagaaaaacagagaaacacaattggtaatctactatctcataatcagtgatcgacccagaatttttgatctgtaaggggcttaactgttataaaaatatttattatttannnnnnnnnaaaattataactattttgtgggggctttttactattttgttgtataattattt

SEQ ID NO: 62259 - DNA, 1160 bp, Cannabis sativa
  modified_base (1094)..(1119): a, c, t, g, unknown or other
taaaaagtttagctcatagctaacttaaaaaccaccattacaagatgaagtttagacatggagtttgaatgttagagttaaaaaaaagagaaaagaaagaaagaaatagcaaacaacactatatagaggagaggagagttttccaaaaggttgaatcttgttgtgcttcttctctttttccttcttcttcctcttctttcactcttattttttttctgtagaaaaatggcagccaagctccccaacgtccagcccttttttttttctctaaatggaggccccctttcttttcaaaatcctcctaggtttagtaccatttgccgaaaataaaccctacacatggcattcatctagcctcttcatgtaattgctccagccaccactcctagaatgccatatcatctccacaaatgccacctcttttaatgaaatgctagctcatccttttttcaagaaaataaaacaaatcagctactaacctgtttgctggagcaaaaacttcacagaattttagcaaaaattaagaacatgactaacttgctattttctttgccaaattatacacaaaagtcattgatttctgttaacagcttgagattacacacataaacataaaacactgaaactttcacaaattaaaagacaaaataattacaatgacacacaattacataaaaaaacatgtttaaagtgaaatcaaataactctttactcaagagttatcaaatacccccaaacttatgacattgctggtcctcaagtgatgagaacaaaaccacagcaactagaacaacaaacagcccacagaaattcaaaacaaaagacactgaactgaacaaaaatactcaacaaaaacaggatgcaactcgtcttgtcaattcttacgcctaggggaaatagctctcaggaataatattttgcaaaaggtaaactgaatgaagatgttgctcaagctttaaactaaaatctttaagtttaaatgtcgctgcccaaagtaagtgtcaagtgctcctctctttttggcatagtttttcttaaacaatttcgatcaactaacgtttaaactaaacattggtcctcaagttcaaatgatnnnnnnnnnnnnnnnnnnnnnnnnnnctctccactaatgtagacacacaccactccaaggatcaata

SEQ ID NO: 62260 - DNA, 657 bp, Cannabis sativa
tttaatattttgaaaattatatttatacttaaatttgtttattactcatcaatgggcaataccaattaatggataatacgcatgaagaagtatttcattatttacatataacatcatacacatatatttatgtatatgtatatgtagttatactataatttacacttctttttttcatgttttcctgtttccttcagtgagttataatgcatactactgttacatccttttaactatgccttcgcaggcttaaaagactaaagttctaagaacagcttagaacaagctatatccacaaaatcaaaaataaaacctaaaaactctaataatacagtttctttattatttatttttaaacaccaacagttacttctaaacacatattacaattttttttttaatttttgagtgtatgccgaattcccattacaaacaaagccaaaaaaaaaaaaaaataacacaaaataaacataacctaatttggaatttataaatatttatatatatatatatatatataaatctctaaatacatataaggtgttttgttggactacatgatccaatgtttttagatcaatctagattcgattcagttatatattggatgttaaattttaccatccgatccaatctaattaattttagtcatccaat

SEQ ID NO: 62261 - DNA, 942 bp, Cannabis sativa
tagtaaggttttttcaaattcattttctctagtgacatctattaccaaggaaaaagtgtattagttagatgtgttgtttgaaaaattataactttattcaagagtgattttaattattaggtcaaaaaaaaaaaaaaaacattgctattaaggcactagtggtgcttagcactttcttgatatgtcgctttgcaattggctagcgatactcctttaaaatcattacattaaattctatgggacccgatacttaattgcactaataacaatattgacatgtaggaggttgctaatttatgcatgaaaatggaattgaagagaatttatgcatatcttgttacagccacgggacgatgaccactttattttttgcttacattacaacatcttctacaaaagaacattacaacataagtagagggaaataatagaaaaccagcacacacttttttaaggttacatttggaagttgaatcaagttatctttcatacaatttttcattctacaccaaacgagagaattttttttttttatttttcacttttttttttcttacatttttctttccccactaaaattcaacttccaaacatagggtaaaggaacaggcatacatatgataatttattttattgcgtgtcgccgaggccgagggggctgaatcccaagttgatccctagaccgtcaagcatcatgctcagaccattctttcaaggttggtgtagtcactgcaacattcttcatatcaagtatgttggctggttcagggaataaaagagagaaatttccatatcaatcatggtgtgttagtatatgtgtgagaaattgggcattcctataacctttttccaaacaaaatatcaggacaaatttagcaaatcaagttaatcatcagactaagagatttgaacttgaaaacttaatgcaggcatgggtgatgg

SEQ ID NO: 62262 - DNA, 1255 bp, Cannabis sativa
gaagactggaatagcgacgacttctcctgttagttcctcagaaaaggaagagtgacatcaggattactccagctgctgatacgtccaagaagctggcgaggccctcacaagacaaggggaagaaagtcgtgattgatccagctgttcgagctcgcgatttcctagttcttcaggagaagttcgtgagtgaggagttcaggtcgaaggttgagaggactccctctgaggagcttatgcctcgatttgcagagttggcttcgcaatttatgactatgtttttgaaggccatcgttgctggttctaaggaagtcgagcttttaaagaagcagaatgtccagcttcaggagaacgtcaagaagctgaagcaggaagcgactaacaaggacaaagagctcaaggaattctgtaagcaagttgaacttgaagccaagaaatctaaggcgaagattgaggaaatgtctcgcgacttggaggccgagaaggagaatggaaagaagcagtatgaccaagcggtctctgactatatatatacaactctttccaagattctagacttcgacttctcgatccttggggcagaggcggctgagatggctgaggcttttcgagctatgtcacctacacagacccaagggggtgggggaaatctttttcccgaggacgttgatgctgcgaatactaaagaggttgctgatgaggctgccagtaaagtcgcagatgaatccactactccaactgcccctatcgctcccaatgcttagtttacttactttatgaatattttgccaaactttttaagcggtacgcgggtgctcgcgatttgtacttagacaaatttctctttatggtttttaatattttgaacaacatatatcacttcagggatatttatttatgttatcatactcgcagtacacggctactcgcgccttttgctatttcgattgcggtattatttacagcttggtgtaaaaaaacgctaaggtaaaatgaattttttttttaaaactcgagaaaaatttaactttcataaagaacaagttaatcaatagtacaaagtgagtgggctatatacccctatacttagaacatttatatagataaattaactaagtatatatacataacgagtacatattgataataaaatttcaagctttcgccattccacgctctttggattgcagtcccatcgagttctacaagttgatatgttgcgttaccaatcttctcagcgatgaggtatggtccttcc

SEQ ID NO: 62263 - DNA, 1035 bp, Cannabis sativa
ggctgttgcttagctgcttattacctttgtgtgtgtttcttctctgttagtgtgacaccttgttagtgtctcatgtctctttttctggatttatttgctctaattgatgctttttctggttaaatgttgtgttggataccaaggaaatgtaatgagggtgctcatagtctagctgtttgggcaaagaactggttcggttccattgataatgggaggtagatccttttgtatctacaaagtttttaaaatgagacgatagtctttaaataagtacaattgtggtggtcaaaaaataacacaaatttataattctcttcatttgctatccataaaaacttttctgcccatagcattaatgctgggtggtaatgtgaaatattaagttttaagtgtttaatcttagaaccttttaagtaatataactacctttaaaagagaataatatttgtacttaagaaaaaaggtgaatttcaattattttcttccattatattaatttagatagtatttttaaataataaataagtataaatagcattaattagggtttattataaaaaatgtttagattggttttttttttcctgaaattgagttaattttatgttattagtaataatatatatgttttatatataaattttaaactaattaggattttcgcctcttaaattttaacatgtaacaaattatatccttaaaattttttacatttaaggatatttgtcaaatttcattcaattttactaattttgtgattatccatgtattaatcatgctctttagactttgatatttactaaatcatgtccttcaaactttgacatgtactaaatcaaactttctaaactttcatccatgttagatttttcttactaaaattagaaaaaaaaaatctttaaatccaacaatctcaataattcatgggagatatttaacaactttaatagttcatggaacatgattcggtacatgttaaagtttagagaaaaaaatcataattaatttaagttttatgcaaatggtatacataaa

SEQ ID NO: 62264 - DNA, 1146 bp, Cannabis sativa
gttatggtattaaattttttaattaattttctcgtatattttaaaggaagattataaaaaaatgttaaataatggcttttaatttttattttataaatatcttatatacgattacgttttgacaatgaatgactaataataacgactataataatttttttggtaatatagaaatgaaatttgattagtagaggatttttttttcaggctaaaaaatattatatatatttaaaaggaatatttataggctaagaatatattgtcacctaattaataatggattttattatctttatactatttcaattttaatatcttattttgaaaataatttatcgtattatttatcaacgaaatatgattaatatatgaatcttttcttgattattggtttgatttgttttgtgcatctaattaataattctttgatttgattaaatttgctatcattgtacatcgattatggataactgtatccctatttaattattttgtattaagattattgggatccatatagttttaattagaatataatcaatcaataaataaatactaattaattaatattattgattgtcatcattataaatatctaggtattattcttatcatggatattcaaaatcagtgtcaggacagttcttttgatcattcgaataagaaatctatactacaattatacactaaaagtaaaaaagagtattagagacgacaattttaatggcaacaaaaaattgttcctaatagtagtgatattaataattatttctattttttagtttaatttgaaaatttagtagaggagatgtttaatatttttaagaagacaagtcatccctaaaaattggacaataaatattttatttaaattaatagctataaaaaaaaaattaaaaataactggagcactttttaaaatttttaaaaaatgacttttgtcgctcttaaaaattatttttcatttattatcattaattttctaacaatattctttattttcttagattatatataaacatactaatccttagattatatataaaacaattcataaaagaaaaaaaacaccatttataatggactgctgtgcttttcttatattcttgtttataagagatcgagtttcataaaaaagattagaca

SEQ ID NO: 62265 - DNA, 1007 bp, Cannabis sativa
aaaaaaaacatcaaaacccctacaaaacaaaaattctaatacacaatttcatacataatttatcttttaagactataagactttttcattaattccaagtcgaaatttcattttgtttataataaatttcaactaagaaagagaggtgttttttttttttttttgagaattatttcatatattatttttttaaatttacggtttgagtttctaaagtagttacaacggtaattgcaatagggattttatacgattttttgatcaatttaagttgcaacgctagttgtaatatggatttttatgtaaaatttcttaaaaaatgtaaaaaaaactggtttgaagtgtaaaaatgaatggaaatttatttagaaataacaataatatggtgttcattttattttattttaacaagtcagcatcaaatgttgtaaatcataagagaagggatttgttgttttcttagtctggattggtcctttatgcatatggtttccctgccaactagctagctaggaagttagctggcagacaagttggtcacagcttaaataaataaattccaatatttctcttctcttcggttctcataatattaactttatgatcagatattcatacatactatggtgaactgtaaatcgtaaaggtcaaccatatcatttgcattccttgtcaaaacatacccacttgtattattatttattgcgcacaaaaatgtaggtttctttttcactattttgtttagtcataattaacttataagattatattaaatttaaaattttgataatttgatataatttcttctaataatatgattaacctattattatactatactgaactattttttttttttacttttagtaataaatgtaaataaattaatattgcactcttattttttaattatttttataattaattattaattatttattattatatataatacatatattattataaggttagttttcaaaatatgtatttcattttaataactt

SEQ ID NO: 62266 - DNA, 1203 bp, Cannabis sativa
atatatagctactacagaagctattaaagaggccttatggttaaaaggacttatggaggagctaaagttaatgtaaaaggtgtctataatctactccgatagtcatagcatcatctatttgtgcaaaaacctggtttttcatgacaggacaaaacacattgagataaaatatttattagggataaagttacacagggacagatcgggatagacaaagtgcctattgaagtgaatccagcagacatggccacaaaggttgtgtccctcaataagtttaagctttgcttaagcttattggcgattaacacaggtcagtaaaacccttaatgggttcgagctaagaccctcagttacactcaaacaacaacaaaagttttagtgcatagttcatacggggttttaggtagaaattgttgaaataaaaccccatattacctgtacactgtaaaaccagaacatttatcaaagagtacacacagttaaaaatactaggtggactttggtctctaaatacctaggacagatcagcaaattagttacaaagtctattaaactttgtaactaactctcttctctgtactccactacaacagatattaaaagccagataatctcaatcacagagtagaacagaaaacatacaacatagatccgaatatatctccagaccagaaatcacacaaattagatccaaaaattggatggttgaaggagacacacattgggtgagttttggagccctagggttagggctcagatgttcaacaccaaaccagggagatcgattcatgcaaaacaaggaggagaagatgattagagattaaactcagagagggaaaaatagagataaaagagggaaacaaattctgtaattaaagggattaccaaaatcatacctttgttttttttggaatctgaaactttgtactcttgatctttggagatctatagtgaatctgaggcgagctcaagaggatgtactgagcaacaatttttgtggaacctctataaaatctggtgttatctcttcttttatttttttgcaatttctatattgtgtgtatgtttatgtgatttctgggttgttaaatcagtttgggaaaggctcgatttaagggattattttttggtttttattgttgttgttgtcttcgtgttctacagtgaagaaccacgaagaataaggctcggtttggggttgat

SEQ ID NO: 62267 - DNA, 1172 bp, Cannabis sativa
ataatactatctgcaccatatcttatcccaatatagatatatatatatagttttctttttattcttaacgtacatatggtatatatatatatcattgataattaaaattattttgattatcatccataatcaatattatatatcaaatgtttaaattatgaaaatctaatgacgataatgaactggtgatcaatgtggattataagtgtaaatatattttttttctcgatttttagtttcatctttgtttactttttattttgttgggagacttaaaaggtatgagactatgatactatacttgggttatgtttttttttttgttttttttttttttaaaattttttttcaaactttgagatatatttattttttatcttcttttgtgttatgctattttttttttttttaactttgaggcatatttgttttttcatcttttatggattatgaaggcataataaaaatttgtgagaatattagtttaatttaaatttaaaagctttttcaattatttaatttttttctattttgccttaatggatacctaatgggttccccataatcgataggtattctcataccccgaatccgctggttattagacggggatggaggcataaataagtagcggagatgggagagaagatttaatttcccatacattaaccgcccaatttccatctgtatgggtgagcaagtgctccacgctatcctcttgtgttagggtttcgaattcagtctcatcgttcaaatcgaccaattcaattaaaatagaggcataacttctcgaaggaactctgtgctgctgcataatcttagatctaggcagctattgtttgaggaaaggggagtagagaagaagagattgggtgaattgggttgtacagagatggaggacgatatggtccatatgttgcttcacagagtggaagctacatatgagattgatgtttggactagtgttttgcaagccgccatcgcagagttgtaatgacaaaatatattttaaatttattttattctttaaaattattttttctaaatatatgtttttgggattttctttatttgtacaattaaaagcattttttcttcatttatacggaaaacactgttgtgatattttgcacacgcaagtgcacgtatcgtaacaagtagtaaactcacca

SEQ ID NO: 62268 - DNA, 1722 bp, Cannabis sativa
atacatattttgattttttactactaattctatatcaaaacaaattgagaacaacattaatttgcatctaaaaaaaataaacttaactgtattatactatgagccctctagtggataaggtgacagctcctgcataaaagctggaatgatgaaatgacccacttattttcttgaaaatcaaaaatagattaagcatataagtcttctaagaagatataaagaatatccaactaatataatgatattttaactgttaccatcacttaccaacataaagcttatcagtactcattacaaaaatcaattttgtactatgcttgcttttttttgctttgctttgcactatctttcctccagtaatgatgtactcgcaggctttctcttagttatttcatgagaaagattacaaataacaattaatcttatagatcaatcctctatccatctcaagcatccaacttgcacaagacagaactagtattttgtaacttttctttttatgaagattaatagattagccaaatgtcaaaacttcaaaagaaattgcataaaaacttattgagaaaatacaaacataccttgtatctcttctagtccatcttcattgtaaaatttcagattgtcaccacatcgatgccttaaatctatctacaatacatcataatcctggaaaatatatgctggaaaattaatgagcaaaatcaaaatagatctactaataataattgtcgaaagataacttttgtcccttagaatcctcacataatcctttcccaaactgtaaaaaagaaaaaaaaaacaagcaaaatttcttgaaaaaacatagctctgaaacagaacaaaaagagcactaacagaataataaattatgtacattatcgcaaaatattaactaattaaagataagcaacataataattacttcattgtacaaaaaataagagagtacacttcaatcactatctatgatctatgatatgaagtagtagtaataaaagttataaaaactatatatatacaacataatagagcaattcttgcaattcttctgtcatgcttctctgtataatccagaaaagaaaaaaaaaattatgtatatatatatattagtagatgaaatcaattattgtcaagaataaacttctattacttaaaatataaatcctaaatcgcctaaaacagagccaaaatttaacttttggtaccaataagaatcaaattcaagtgcccaaataatgtttatactaaaaattaattctttgtcatttaattaatgataatgtcaaatcttgctaatgcttcctttagaagaatctaatgaacaagtcatacctttggaagattctttctaatgcttcatctagtataatcatatttggattacgaaggaatataattgcagatcttgaactcaccaatagattgctcctctgccttgggcctttggccactgtttttgtatgtgtgagcacgctagagaggcaaggacttgaatgactgtgaatcgtctaaaaagttaattattttgagctaggtataattataaacatttaggggattggaaaataatcaaatgcgctaaatctaaaataagaaatgcttaaaaaaaaaggaaataattaatctaagtcaaagtgcttctcgagatccatcttcgtgatcctaggtgacaacccagtaacttacaaatagttacccggattctcaacatcactcattgga

SEQ ID NO: 62269 - DNA, 968 bp, Cannabis sativa
gggagcataaggaaacagagaaagaaaaagaaagaaagaaacagagagaaagagaaatttttaacagactaaaaactattgcagtcatccaataaaaattagataaacactaaataaataatataatttcaagaaaacaatttgcataacaattttacccaaatacacactgtttgatatccaaaaaaaaaaaatcaaatgtgcaaaacactagatgcatatactgaatatttctagcaatactaaattaactttcacaattcaatgtttcaatactcaacaagcttggagaactataagattttaaggcatatatttatgcatcacacaagttgcacaaacaagacaacttacttaaattacaagatatatacatcgatttatacataaactagtgagtattatatattatatatgagacagtctaagagagtagtcctcaaactttatctaacctaaagcccaaattaataaaaaatccacaaacttcataactattattatttaaaattggaaaacagaatcaatcaatttatggaccacaatcacctatgatataagcaattgataatggattcaagatgctgaagagatgaattgagcaactgggctttgacagtttcaataattatctttgaatctgatttcagaaataaaaaataacataaacacttaaagctttgtacaaaacactagccagtcaccacattgccagagatgaaggaagacgccgcctacgagcgatgcaggtacaacaaaagacaacaatttggtcagatatgggtttggggatcatcgatttggtctgactttttttttaggtttgggtattttactttgttgttttagagaagacaaagaaaagctaataaataaaaggaaatagaaaaatccaccgtaaaacaatactgaggacatgtccacggtacaggagcttacccaaaaaaaaaaaccgcgaatttctccct

SEQ ID NO: 62270 - DNA, 630 bp, Cannabis sativa
tattcaaaatgggttctcactactcctgagaataacattattattgattcaatattttcaactcatttgactatgtttcctttcttgaatatctcatctcattttctcttatattgttaatatgactattaagatttttgcctgatttatgcacctcttgaattttttagtccgttaaaaataatctctaaactatgaaaagtgagtgtaaataaaataataatatggctacttaaccagttttgtaagtttttttatttttttaatattaaattattttgtttgccacatgtgataaaatttgacaaaataactaatttacaatactataaataattcatcgaccatttataacctactaaaaaatttaaagacaataatatatatattatagtttgggggtcaaaaattagcctattattattattgaagaattttaatcaaaacatatttttaatcaacaaaattaagggatcgacagacagttaattctgttagtctacgtaccttaatcaaagaaattccaattttaccctccaaccagtaaactctgcatatgggcatttctgtactttcactctcttctcttcagttttttgaaagtttgttagttagttagttaaaaattgg

SEQ ID NO: 62271 - DNA, 791 bp, Cannabis sativa
atagaaaacgcaagggaaaggcggtggaaggtgaaccctccaagaagtccaagaggaaggatactccgacggttagctcagactcagggattcctcctgaggccgaggaatatgtggtggcttctaatatcgtccttactccggtccctgctgatgaggaaaggcagcaactacgggtggccaagtacaactatgccatggacgagtacaccaagggtaatgcggaggcgaaggccttgaagaaggtcctgcaagaggcccaacagaattccatgcgcttgggggctttcctgaacgcttggggatctaaccgtggatcctctgtcagatcggttcaactgtttcattggccccacccttgctcattttgcctctgagctgaccatcctgtttgtgtctcacctgacccagctcccggccaagagatatgcggcctgggctacaagtaacgccatctaccaggtccaagatattcgcgccgccatgtccgccgtaagtctttacttgtgctttctgggatttttctttatatcatcacgcctcccatacttaacttcttattattattatcttggcagattgctgcagagaccggccgtctttcgaagactttgatagatcaggactacgtcctgttcgagttcggaggtatggacgaggccatgaaggttttgaaagacctggccgctgagaggaaggcattccgggaggaggctcaccagagggaggctgaggcggagaggaggcaccaggagggcttgcaggaggttgttggaattattttacgagga

SEQ ID NO: 62272 - DNA, 930 bp, Cannabis sativa
tatatataaataatattttattaaatataaataaaaagtcacctatgaatttctcataaaccaaaaaatttagttatataggcacactttatatagaatagatattttcttctaccttttttatgtataatataaatagtgtatatatatttatattatatttattgtaatattcatttaatctctttatttattcttgtattatattataatataattgtatataatatcttaattttcttatattgtaataatatctcaaacatgcatgtgagtggagagttgcgtattattgacttagttatcatgtgaaattgtaacccctttctttttaggagaaattaatgaagatatatattattagaagaattttttttaaaaaagaaagtcttgggtcttctttttcttggattgttttgtaaggatcgatcctcttttttctaatagcaatgcttttttctaattcgtaggtagaaataaaacaaataaaatagaatgatagtcaaaagaatccttttgttctcccatttattattggtgcgaatagcatatagctctccccacctgtccttcttaattgataataacattataacaacgactcactctctgtgtgtgctccaattccaaaaattatgcttgaaagtgcaatatttatgagtacagcaagtacacataaatttgaatggtattgattaattaggttagatttaattgtgtgtttttttttttttgaaaggaaatttaattgatattacataagtgatgaacctactagttgaatatatttaattttcacactaaataaatatacaattgtgctcgaaatatttgattccacatttaaacgtgtaacattaactccttcaggaagaaaaaaaaataaaccatgtaacattattgaaagctgagaacacacaacaactactt

SEQ ID NO: 62273 - DNA, 1062 bp, Cannabis sativa
caccatttaatctcggttagccaagctcgaaggacatcatcgtttaacttctatttatagaagttatagatttcgtatctatgattagtgctctaactcaactctaatattgtgttcccaagatgtaagtattaggccgatccaattggtcaactttaacaaacaagtgaaagaatagaaatcatacacttaaataaaaacctaaccatctcaggattgagatcatagatctaagatcaactaagtgatatttacttataaaagatattgcaataaattaatgataccttttttattgtgaatatcggtccagtctaatgtataaccatacatccaatacaagcttactttactaatgccttggaaaatatattctactataaaagtgtaaataaacagaattgttaattattatatcaatgtaaatcttgtgtactgataaatcatgggactaattagtttaatcacgtaatcttgattattttctactctgtagacaatacaattatcataaatatcaatgtgataaggatttaatagaatttatatatcatacataagatcatgaaacaaacatgtgaacaaagaattatattaaacaagtaataaaataattctgttcctttattgataaatgaaattcaagataactttgaaataggattttagttagggtacaaaacccaacaaaatctcacttgcactaacataaagcaatcagtacatttcaactaatcctagattttctttgtgcttttcaaatgtagtctttgtcaatgtcttggtgaatgggtctgctaggttatctttgatattaaacttttctaccaacacgttgttgagattttatgccctaaataaaaactattttaatataatcatatttgttatcaataagagattagaagtcatttatgtttacatgtagttattaatatttatggtttaatatacagtttctattaaattcagaacatatatatagttattcacaattatagtaatgtcaacacagtgggatgtaattgtaattatatttttcaaaagtttatgttccatgat

SEQ ID NO: 62274 - DNA, 969 bp, Cannabis sativa
ataaaattgtatattaaatatgtaaaaaaaattatattatatatgtatagtgtataatatatatgttcggtcggttctcagttgaatcggacggtttaccattgacactaaaattgaccgtacaaaggcagttaggcaatttttttttgtttttggttttttcagtattcgaacagtcgatgtactcaattttttcagtttcttgaattttttgcttagcctaattgaagctaactacttaattatttaattatattaaattgatatttatatttctaagtaactcttaatctggttaataataaacataaatgtttattattttctacataaatattttttttaaaaaaaaattaatttataaaatatatgcgtttgataaacaatatcaatatatgtttattattttaaaatatacattcttacaaaaataaaaaaaaaaatataaccatttttatattataacagccttactataacatgtttattaaaattaaacacttttaaaataaaaatatacaataaaattacaatgtgcatgttataaataatatcaatgtatgttttttatttagaaaatattaattatttcaatttttaattaaattactaaaaaataaatactaaaatttaaatattgtgattattatataataatatatttactaaaaatttaattgtaaaaaaattatacatgtttaataaataatatctatttatgtttattatttaagaatatattgattatttttaattttaactgaaatactaaaatgtaaacacttaaaatttaaacatataaatatttatattattataaaattattatactaaaaaaaatattttatttataataatattactgtgaatgtttaaattattataattattatttataatataataatgcagttgtttattaaaataatattttagaattttttcaataataatataacatgtttatta

SEQ ID NO: 62275 - DNA, 816 bp, Cannabis sativa
tgcaataggggtttctatgcctaattccgtaaaaatacaaaaaaaaaaactgttttgaagtgtaaaaatgaagaaagcccctcttgaaaaaaaggataaaactttaaaagggtagcaattcatggggacaaatcctatttattaatttttttaacaagttcattttatatttttttttattccactttatatcatgactttattttgataattttttacaaagttaccttttttctttgaaaacatgcaaagttacctttgagaaataaatgataattcttttttataacaataatgttttaaatatgccattgttagccctattggaataattgacatcacattattatttcttaaattgatcttgctacttgatgagatggaaacattcaaaatctcaatatcactctttattgtgagataaatagttgtgagaaaattttggttttgaaaggaaagatcatcattttctagttcttaaaagctagggcttcatgtctcaatcaaatagttgttgaagatttagatttagattttttgcccctataaacttagctaaattattatgaagtgtagctagtatttggacctataatcatgtgttaaaaaattaattataggcataaaaaaattaaatatataacttctagaatcaactgaagatggatagaaaataagttagtttgagtatttatgaaataatatgcaaaaagaaaaacaaagatcctttttcaaaaggcccattttgttttttaatgtaattaaactatgaaaaataaagcccaataaagtttttgagtagaaagcccaaacaaa

SEQ ID NO: 62276 - DNA, 712 bp, Cannabis sativa
  modified_base (193)..(196): a, c, t, g, unknown or other
cttataattaaaaagtaaaattacaatagaaagattaggaaaagaagaatataccaccacctctttaattattattttttttataagagaattattatcatattattgttgcatttatttttaaataaatatgataaattgaatgatcacgtaacttcattttttacttaattaaaatattattattattatnnnnattattattattattatcaaaaaataatattattattattttaaaacaaatcaattatttacatattatttttaatgggaaatcaaatattaaaattactataaattatgaaaaataagatgttagaaaataaagtatcatctcacctctctatactatcataattttttcacttttgaaagtattttttattttatacaatccttttgaagatgaactattattatttaattaatttttttaatgctgaaaatgcgtatcatgatcaaataatcaattgaaaatatcaaaaaactgttaaaaaaattaataatcccaagatacaaaattgtttacaatatagcactataatgtgtataataattagataataattaggtttgcgtataagattaatccatagcaattaacaaaatttgatagtgcaatactatcaactaagtcttcttccttaggtctctaaatcagaagcaattttatttatttgattaccaaaagtatacaattgtgatgaga

SEQ ID NO: 62277 - DNA, 1003 bp, Cannabis sativa
  modified_base (35)..(35): a, c, t, g, unknown or other
  modified_base (583)..(599): a, c, t, g, unknown or other
acagtatttttgaaaagatttccgtgtgacagtanttttgtaaaaattaacctaaattctaatatgtttgtaaatttccctagatttttgcaggaatatatatatatatatatataattatactcactttattttatatgttttaatttttaactttgttttcatattctttaagatatatccacttttatagatggtatctctattataccccttaggttaatgtaaattatgtgctagacttaagatcttaaaattgtttttgtaatttttcaaactgcaatcgcactgcaagatcttaaaatcgtgaaatctaccgcaaaaatacagtacagtacgatttaggcaatttatattatcgtcatattaaatattataataaaaatttaaaaaaaaaataatttaataaaattgtaacaatactaaaaaaaatattaaacttttagcgtcataatatatacactaattaactcattatatttaatattctctaaaaattatataatgtatatatatatatttttgttagaaattttattacaataaaagataaattaagatatatacaactcaattgtaaaannnnnnnnnnnnnnnnnataagagattgattaaatatatcttacaacacacgtatatacactatatatattgcacatatatatatgaaaggtaaaaaaaagaagattacaacacatgtaatataatacacacatatatatatatataacaagagaagaatatatgtatatacactcactcacgaccttgagtgtagatcagtaggaatcaccatgacttgaacaaggtattacacatttgtctaaaagcttatttcccctatctctaagtactaagggaactctctaagaagtagcttttagaattatcaagcttaggggtgcacacgggtcgggttttcaaattttcggggtttcgggttcgggtattcgggtttcgggtatgggaaatgtacaaccgaacccggtgttcgggtgtacgg

SEQ ID NO: 62278 - DNA, 1007 bp, Cannabis sativa
tgtcttctgataccatgagagaaattgagggagagagaaaagcttgaatatatttccactaaattgaattgggtacaatggctaagttggtttatataggttgagaaggtgatcaacttagttggaacaactaacttgtgtcagctcagcctaccgacttcataacagaaatagcagaaaaaataaaacagaaattaaacaacactaattctaatttctaataaccttcaactttatactacactttgtattattaatttttattttagaaagaacataaagttcttgatagattaaaccgaaagaagaatgggatctgtaagggtgatctctcccctttgtcaacatttttagcaagtttgtcaacaaagaacaattctcatgaggagcatacatcagtctacaatttgaaaaacaaaactcttaagttttatcatcacagtaaaacaaggcagaaagttcccagtcagggggtttttcccattgataaggccttgattgcttgtagcatactacactttgtatttcactatctaatttaactttcttttttcttatctctccactttgggctcccttatataatttgtttattcttaaaaaaaatcaggtaggacattgtcattactatatttgtaattttagtagatttttaaaatccttaattttttttaaataatattaaaatacgaaatatggatgaaattattaaaatcctgaagtgcataattgtaaattgtgaagggcaatgaacaatttgcatcccatacaatgataaatacacctcattattaaaaaaaatacacttaaataaggttttaaaattacttttaattgtgttaaaaaaaaaattacttttaatatttttttaattttttttcctcctattattttagattaatttcaatacttattttgatttcagttttataactttttctaaagcatgtatgtatattttttattttttttttctaagaaaattttatttataattttttatttta

SEQ ID NO: 62279 - DNA, 1830 bp, Cannabis sativa
tttgtgggctctttgaaatcaaaggaataatctttaccataatcaatatacccttcctcctaaggaagtgtatgattggagtcttaacttctttttcaagtatttagatgtgcagcaggttcatccaacaagtcacaattctactgctcccattgcaccaatgcaactaattgaatcgggcaacctcagaatttttactgatgcaactattgatcctcagtgcagaaaacatagtgttggagtgatagttttaaatgcttgcaaccgggttaaagcatgtttttctgctccatttattgggcttgtttcccctgttgtggctgaagctaaagccatatatcaggctattcagtgggctcaattgattaaactacttgtgaatgtgcttatgactgattgttgataaactttgttcttgtaattggaataatagtattttggataatatattatttaacattaagaacttataatcttttagtccaaatctaactatttgtcatggtcatagagagttcaatatgattgctcataaaattgttaagttaggtcttgaattagataatgggttggtttagaatgattctcttccttgtagtatgatgctttgtaatcttttcccttatcaatgaagcacaagtttctttaaaaaaaaatatatatgtaatgaatagtcctaccacaccacggtagatttgaaaacttagtgaaattatccacaaaagaaaggatgattcgaaaaaaaaaaaaaaaatgagtcaccaaagttgaaagttcacttcacagttcacacgttgatttttgcaataatagtatttgcgttaggaatctgacaaataataaaattgagatttgagatttgcgtttggctaatgtcaaacagatctacaacaaccaaactaacctcatttcccctccattactcctctctcctcttttagtccaaatcgtcaacttccattctctctctttctctgcacaattgggtttggaacgagggagattctctctctctaacaaatctggagaaatactgaaactcccgaaatgggtaaagggtctttgatcatatacataaccatagcattggcggtgctcttgctggtttctcgagctccaaggaaatcctcctcccaccaccgccatcgccgcctcaaactccgctccaatttcacattcgctcctcccactcttccccaccaccaacaacagcattctgctgctgcccaccacgagcccgttccctttgatcccctcgtagccgacctcgagcgccgccgtgaggacagggagtgggagaagcagtacatcgagcatactcacccggaattagctcaccacgagcctgccccgggggaggagtcacagcccgaatgggaggagtacatgaacgccgaggactacttaaacgatgaggagaagttcaatgtgaccaatcggttgttggtcttgttccccaaggtggatgtggaccctgtggatgggttcgttaccctcgacgagttgactgagtggaacctcaagcagacccagactgaagtgttgcataggaccaagagggaaatggagcttcatgacaagaaccatgatgggcttgtttcttttgctgagtatgatccccccagctgggctcgcaatacaggtagctatatctcttttctcattcttatattgattacatttggtttttacatgtttcccattttttagattagcttagctggtattaacatccgtggaatgagaatatgatttctgtacactgggttttctgatctatttctgcttgatcaaactactcaaactgacaagtttctgctctgatcttgg

SEQ ID NO: 62280 - DNA, 2047 bp, Cannabis sativa
agcttggttatgagaagaaaggattcgaaaccccagacccccaaagaatttggaaacagaaatagagtcccagtttttccaatgcactttttttgtgccctgagatccccaccagaatttggcaatcatgctttggatttttgaacaaatggatttgggaattttgaaacttgacattgcaaaagagggaatagcttggactaccgctttaataaggatctctttaccagctttagagaagagtttttcattccaggaattaagttttgaggaaaccttttgaagcaagtagtgaaacattgaggttgaaaccctgccaacacaatggggagcaccaagatacttgctgatgaagccttctcccataagctggagatcgtggcggaaaagatcttgggccagagaagtggtattgggggagaagagaatggaggatttctcacggttcaccaattgaccagtagctttgtggtacagatcgagaatactattaagggaattactggcttgagagtggacaggagaaaaaaccatgctatcatcagcaaacaggagatgggacaaagggggtgctcctctacaaatccgaatacctgaaaattggttctgagtttcgtgtaaccgaattgcagcagagagaccctcagcaataagaaggaaaagataaggagagaggggatccccttgcctgataccacgcgatgaagaaaagggaacagtgagagagccattaatggaaaggcgaaattgaacagttgaaagacaacgcatgatcagggaagaaaactgaattgggaaaccaacatgattgagtaaatgagttagaaaatcccactccactctgtcaaatgccttttccatatccaacttgatagcagcccaacccaccttcccagatcttctagaatggatagcatgaatgacttcgtttgcaagaagaatattgtcagtgatttgacgacctttaagaaaagcactttgattgatgctgacaatggagtgaagcacaagctttagccgattcgcaagaatttttgaaagacatttgtaaaaagtgttgcaaaggctaatcggacgaaaatcacggacatgcttgggattcttttttttagggatgagtacaatgatagtttggttgatggaagagatgtccccctgatgattaagaatgtggagcatagctttagtgaaatcagttccaagagtggaccagttacgcttataaaagtgggagttgagtccatctggtcccggagctttgtccgcagagaggctaaataaagcactcttaacttccgtttcagtatagggctcagcaagtaaatcgacttgagtggtggatagcctattgggaatcccttggagaagagtatggacagcctctacgcaaactccctgggaggtgaaaagagagctgtaaaattggagaaattgagacgtgatagttgttgggtcatgagttatggaaccatcagaaagagtaataagtcggatagagttattcttctttctggttgaggcccggtggtgaaaaaacttagtgtttttgtccccagcacgcaaccaatcaatcctggaacgctgcctccagtatatttcatctttcaagaggagaccatcaagcctggattgcagggaagcaatgagagaaccagagttgggagagtggggagtggcattcaaatgggagtccaaagcagcttgagtttgagagatttggagtttaataggatgctggtttctactccaattcctaatcgtagcaacacagttagattgtttgtcgagaaaaagctgcaagggggatgaaccagaaggcccagaataagcccaagaagaggaaagaagatcagagaaagagggatctttcagccaatgattttcaaaatgaaaacgagttggtcttgaaatggcggaaagaggatcttgaagcctaatttttaaagctctatggtccgaaccataaaaaccaagatggaaaagagtggcatgagggaaaagatcacgccagcattgatttgatgtacaccagtccaaacgttcaagg

SEQ ID NO: 62281 - DNA, 588 bp, Cannabis sativa
ctcaaggatttgacataatttttggtgtatttgatttctatatcaaatttattatttttttttttattttggtgcagtggtggctgtagtggcctcgtggtggatgtggtggtgatttgattcctcatatcaagatttttaatggatgtggtttaaggttattgtgcatttaaattttactggtttgacatatatatatttggtagagtggtgggtgttgtagtagtggtggtagtgtcagtggtgataatagaggaagaaggaacgaagaaaaaaagcaaattttttctacataatttaatttaatttttaaattacttattttattttaaattatatatacaatatttgaataataaaaataacgttcacgaattgaaatatccatgtataaaattgtgtgcagataaatattcaggttgacacttaattgtggaaatctataaaaacggtaaaaaaaaatgaagtttgaaagtttcaccttaaaaagaacgttactaaaaaaattaagtacataatggttgtggcatcattttcaggtgttgttgttaacatataattaagtaaacataataacagaaaaataca

SEQ ID NO: 62282 - DNA, 1384 bp, Cannabis sativa
atagattcacttaggtattatagtgtatgatgatatcgactttaaatgtagtagtactacacatatgtgatgacatcaattatgaaatgataggatgagttttatatagattttgtttagatctatatatatatatattatatatattaaaagaattcttgatcatttctattcatttttccattataatgtttgtataaaagtgagtatttaattcattatttgattaatttattttatatatatataataaactaagaatgataatgatcactataagtaagatacagtaatgacattaactttgaatataatgaaaactaaaagtgacatgcggtatataataacggttttgaaattataagataatcttttatatagatttattaattattttttctttattagatctctatttttttgtgtaaatttttaatttctattattaaaagaaattatattttaaacaaaatctaaccgtgtaataccttttgtttcctagttttatatattaagtgttactataaattttgaactgttaaattttttatattaataaattagtaataaacaatacctcgcaaccaatactcttaatgaggcacatgggaattttgaagttttctttgtggaaactcccttccaattttggtgttatcttatcaccctgtaataataatgtaagatgagtacatttattattctctccaacaaatttagtacacaaattaaatatatatcatgagttatatatcaaaattctgatgtaatggtattgttgttctattttttattgcaacaaattaactcatttagtgaggagtactaaatatacatggtaaagttgttttacatattatatctattggatatataaataatgacgtttaagaaatttaatatgttttagtaattacctgtatatatcaatttatatgataaagatattaatgataaaaatttacctgaagagatttttgaacaatttcagttgattgcctgagaatgttggcaacgataatgaagaaagaattggcatcaaaggatgaatcgacataagtggcatgagtatcgttaacctgcgccgtgataaagtcttctccaactttgaatgggttgatctccattgagtttttcttttgtgtgtgtaaattattatatgaaactataattattttgttattgtgtgttcgtctgtgacaatcgtctgttatgtggagccttatttatacccacccatccttctaaataatagttatatatttaataattttaattatatatacacgtattcacatgatacaagcatgccctaatatgaagatttttgttcaagaatttaagtgtgggatccattaagtgggagcttgatttccaagatata

SEQ ID NO: 62283 - DNA, 1515 bp, Cannabis sativa
  modified_base (1352)..(1356): a, c, t, g, unknown or other
tatagatatttagggatttgaaattaaaaaattttaaaaattgtaaaataatcacaaaaatttggatttttgggtgaaaatcacccttgggcatactacaggctgcacgcagcctaaaacacgcgcgaaatagagaggatttagtgtctctgaccgagaaaactcggtcacctgtagcatctaggcgtgcgggatcgtgctgaatgtggccgtgatcgagctttagacactcatcttgtctgacgcacacgcgcgtaagccttccttatttgaggatctggtgcgatggtgcaccaacctcgacacccaatggaccaaatttttcaaacttttatatctttctcgttttcatcaaaatcgagttctttaaaaccaaaattgcttaatttttttttacaagaaatccaaataaattattttcagaacacaaataaaattatttttcatggaaaattcgtaattcacaaacattcatcaattcaaacataaatcaacatgaacacatctaattcatcaaaatcatcgttttaaatctatatttcatgaaagtaaatcattaccatgactctgatgccagttgtaggaaattattttactaggatctagatttgctaacatgtatatttattgtaatctataatctaacaccctaaatatgaatatcctaatacaacataataaacacatataaagtttagaaaaccttacattgatggcagaaaaataatatgactcattttgttcagatctctagcccttgattcatttctatagcagagcattatcaagatttgaacttggatcttctctccttcattttggataaccacagtcttctacactatgattaagtacttgacttgctatgagtgggcatggtactctatcattaaaggctcgaattcgacgaataacaatagaaggaattcgaaatcactatagaaggagactctcattttctagttttctgacaaagaatgaaaactagcttaacatagatggatgagaatgagagccatcttattccttttatagtatttcaactagggtttaagatttaattatatggattaaaaaagataaatcaatagggaaaaatcaagcttaagtggtcggccatagtaatgggcctcactaggtataatttttctattttatttcatagtttatcgtttctgtcagtaatgccacatttttcaatttcaatcctataaatgtcaaaagtatttatttaataattataatcaattatcaaaaaaaaaaaaacattaccatttaacttatttattaattagaaatttcttcacaattaagcccttgcttagtggaaattcataaataagacatagtcnnnnnttaaaattataattgattaataaaaactaattaactaagtctacaagcaatattatcccaactagtatgaggacaatggccctatgtaatcaagcttacaataattggtcggccatagtagtgggcttcactagttataatttttctattttatttcat

SEQ ID NO: 62284 - DNA, 882 bp, Cannabis sativa
aaaagatttaacagattgaacactataccaaattttagaattattgatctaactttatatcatgatagggttttggtttacagagtatactcatgagtgtgagacagtgatttgagagattaagtttatcttaaaaaaaacatgtaaagataaaatgttaattaggactggtaattttaaattttgatatgtattaaattatattttttaaaattttttttgtattgaaattgttggatttaagaatttctgttaaatctactaaattttactagtacaaagattatctatgtactaaatcgtgctcccgaacattaatgattattaaattgtactcctgaattttgatatgtatcaaatcgtatccccttaacttttgttttttttttgtttttttggcttctgttagtaaaattagataaaaattcttaaattcaacaattttaatagttcgaaaaaaattttaacggcctaaaaaatttagaggcatggtgttagattttaaaattataataaataaaggtgaagaaaaagacaatgaaaaaaatagaaaattgtacaatgtatccttaaaaggattttactgaagtatttcctatttgattcgacatctaagagaattttttagtccatttttttttatggtcatttaggttgtagctatttaggacatcatataaaattttgaaaaatttttaaaaatttaatacgccgaaaatagagttcaaacagtttatttcgtacgcatataaaataaaagagtatcgcgtgcaataaatataatttgaatcctatttttagtgtgttaaatttttctgaatcttttaaaattttgtaaaatatcttaaaataactacataaacgattataaaaaaaaataga

SEQ ID NO: 62285 - DNA, 1052 bp, Cannabis sativa
gagtagaagttttgtcctataacagattgtagcattcaaagtcttgaagataattgggtggtcatgtgacacggcttgttcttcttggttgcactagagatgatgaagagtggacaggaggtttttcatttttgggaagtattggatcttctgtccttgtttcattagtagtgtcatcctgcaagtgggactagggatagtagcactagtattgtgtattgaataatcatcaacgtgtgtgcctgtgatgtgaggatgaggcagaaccagagatgagaaaggatcgatagtggatcttttagtgtttagtgtgtgaaaagggaaaatatgttcatggaagataacattgcgagatataaaaacttatttagagttaatgtcatacaatttgtaaacttttacacctctagggtaacccaggatgatgcaagttctagcacgtggctgaaacttagttctatgtgatgttaaagtagtggcaaaagccaagcacccaaaacatcttagattggtgtattcaggaattttgtcaagcaaaagttcataaggagttttgttactcaaattaggagtaggagtttggttgatcaagaaagcagcagtcattaagcactttgtccaggattgaattgggactttggattgaaaatatagagcccttaccacattgagaaggtgatgatattttctctctgcgacaacattttgttttggtgtttctatgcaagtaaaatcgtgcaaaatgccatgccttgagaataaatatttaaatgtaagttatggtgcattatcagacctataacacttaaaaacacaattgaattgggtttgtacataagcaagaaagtccggtatgatagtaagaacatcatatttctgtttaaggaggtatatccaaatgaatcttgaatgatcattaactaaagtgagagaatatgtatagtctgaatgagaagcaacatgatagaatccccaaataccacaatgtataagatcaaaacattgtttagcaaactagtattattaggaaaagacaatttcttttgtttagc

SEQ ID NO: 62286 - DNA, 6650 bp, Cannabis sativa
  modified_base (6581)..(6581): a, c, t, g, unknown or other
ttgactataatacgattgaccataatcccatatgcactcagtactcttggtgtactatagtgttggtagcatcaatcaacactataagtacaactagccataataccacatgcacttagtaatctcggcatactagtattggtagcactagctcgtacttttggtaaagtctaacatatatctgttggtattccggtgcaactctgtgtacaccataccctgatgtgttaatctaattgctttttatttcgtctaacatattttggttggtatctcggggtaactctgtttacaccatacccataccctaatgtttaccaaaattttcaaaacttacaaaatatgataaagctcaaaaaaatataattaacgaagaatgaaacaagagtttttacgtggttggggcgttaacgagtcttagtccacaagtcaatattattctgttacgacgggaaaaaccttatgatttaaacaagtttttaaatcttagaatctgtgtgagcactcaaggaataagatttctaaccctttgcttgaatggattttcttatatttatagtgctatagtactctttcccgctgatggattgaatacaaataatataatgatattttggccgattttgtgaggcccaacccgtgagactttgaccttctgttaacgaggaggccatttatcacgttgatagttgtcaaacctgtcctacttttgtagataataaagacataataattcttgatttgtaattaatttattttcttattccgatgatacaaatcttggacatgatcctagaaataaagcgttgatattgtgagatttggcaatgaattgctgcgatacaaagctagacattctgatgcccattaatcaccaatctaaaagattttttgaggccatctagtcatacgtgtgcttaaggtgtatcttgtatggaggagtcatctgtccaacataggcatgacttcgctaatggatctagtccattatctcggttgggcctgcaattgggcttagagaaactgagttgaaaccatcttcaaattacatgtgtcctccatccagaaaaatacggataacatttacccctaagccttcagaatttaatgggttttagaggcttgcattcaaccttttagatggcatgagggcatgtggaggctagaaaggcaaaaacattttgaattctaaacaaatttgttatggtttgtagctttttacttttgaaatgaaacgacacgtggcattatttctttagctcatgggaattactttcattaatggagcgcgtgcaacatgaatttgtaaaatgacagttgatcgtgtcagcgagtgtcccgaggagactatcaacatccaaatatctcgattccaaataatgtattaaatgcaaatttgaattttttttccaaactgtcagatgtgcagtgtgtttcttggatatcattttggcccttcaattgaaatcatgctgatcaccattaccattgtataagtatagtaaaaatttcccatctaccacttttggccaaattttattttgagttcaaattttagagagaaaaagagaaaaaatttcttttggtgaattaatcactattttgaaaagtgtattcatcttcttttttgaattcgtgagcaagaatacccaggagtgcaacccccaattttgaccatttattcttctacaacattagaaccactggatcttcagttgaagatcaaagaactcctcaacaaagctcgctaccttgaaaccaggcttgtgtgccttgaaaaatgttttttgacaggggtttctgtaagactaacacacgatgttcaaattccttctccacatcctccatcttccccaaattctccattaagtaatcaattttagtatttttttaagttctgggcggtattgacattctgtttttctttcttgacgataacatgcttgccctaggtagatgaatatgattttagtcataggagaaactttaaacattttgctgaaatagggatattttatgtgcatattgcttgtagacatcattaggtttggcaatcttttgtctttaccagtgaattgaaataattaaaatttagcactaagcattggtaaaattaattcctctgtttggcatcattatggttcaaaatgacacacatagtagcatttgattttatttcattgttcctgatatgatcatcctagcaaaatgttcttcaagaatttttcttccgaatgtagggtccggtgggtacctctccaagcagtgttaagggaggacacttccgtacccttgctatcttcttaagtgtgggtatttaactgcttgattttttctattttttcttttccaccatggctaatgctattcaagctaacgaagttgaagttttggagcaagtataagttacaactccatcagttgtgtataactcatctccatgggagattgattaatacacaaacaagtttagaaattatgagtcctttcgtgcatatgaaggggatcgttcaggcttgttcttgaataggctctctattttgggggaattcccatgcaagtgtattgacaactttggtatgtggagttggccccatattgagatgggagcacacctttcgcttaagagctactttgcacgcttttgtgcagaagtaggcattgctccgttccaatttattccttaacactacaacttgttggtaggatgatttatactctatcaagccaagaaggtggatgttttgtgtctagaggaaattctttagttttaccaagtagaatcgaccccatatagaagaatatgagcaaaattagcttctattgtcgtgaaaaaagatacagagcactggtttatccaaccatcactcacgcataatttctgagactactagtattttaccactagcttcccattaaagagggtaccaaccctgtccttggattttgatgttgtatgtaaatgataccattttttctaattctattcacatcatttagtttgttatctgatgtggaatttttctcttcataaatagacaacattgcatgtccagtttctaccactttcttgcttggaaggaaggccttgtaccgaggcttttctctagagcacctaaaagtggagaagcttgtcacctcaactaaccttaggcaagttggtctgattgctcctcactagagcatcaatgcctatcacgtcaaagatgtccacagcgaccctccaaaaattaaagaattcattgtggagatagtcactgatgaggcaaataaatccatcaagaaaaataaaagattactaaaagattgggcccaactacattcggagaccatgagtgaggaaatagagcttgaagtttttttcaaagtagttatctcagatggcggcactttgggggcaagcacatctggaagaggtaattccccttttggcttactttgtactccgcctatggaagactttgacccatacttcttggagttagatcattatagataccccataattgaattttatgatagggtagattaaatggttgaaagcccaacaaattttcttctgcctacctagtatgttaaagtagatacattcgtcttgatgatgtaactaagattctttcaatacggtactttcttaggtaggaaagacattttattatttgattttgggtatccaaaatatagtagtgttaatgattgaacccaaacttgtgcttctttattttatttgaaactgatttttttattgcttccatgttactaaagttttcatgttcttctttacagaaaacccccaccatccagatgggtcttgtaaatgacttcttagggaatatcactgctagaaccaaggaggccaaggacgatgctaagccatataaagggaaaggcatgtctaagacatcttcccagaatggagttaaagaatcaccacctccggctaaggtgcaagaggctgcttctcaagttcttatcttggaaattattctaagatcttgtaccccaacagacgtggtggaagcacctattcaggaagctaccttagatcttgagctcaacaaaatgtgatggaggccaaggcttaaaaagttacttgttctttggctcttcaagtggagcatttaaagcaggttccactttccactcaacatgtcattgttgttgaggtggatagtgaagatgacggtggtgatgatagatccgtcttcaataggaagaggcccaagtcgagcattgacaataagggcaaatggaagaagaggtaatccaacaattggcttcttaacaaaggtaggagaaagaaaaggttgcccaaaaagaggtggagctcaaagaagcttaaaagcaaaatataatatcggaacaaaggcgaagctatcgtagtggcaaggaggtttggaccccaagtctctagatgctagacttaactccatcatacaccttcaaaaccaatccgcaaagctaactcttcgtccacttcctttaaccacttttactttgctcgctcgtccattagagccactgaaagagaaacatgtctaactcgagaagtcaaattaattgtccagaagaagtttgaggctgaggcaactaaagtcctccaacagaccaaagtaattgctaccagacacaaggctgagttggttgacttggcggtgagatttggtgtatttctaatcttgtcttcgactgtaaggcgatctcaaaaaggctctagactatagatggaagtcatttggctccatttacggcagatcttctagagataaatagtgacacctattgttggctaggattggagagatgggccatgatgactagtgaagatccaaccatccttgctgacttttgctgacagcagttggctagggtaagtattcttacatacatttgacaatggctttttcttaatacttgttattgtatttgatttctttcaacatttcccatgggaacttattggcatagaggtgctttgaagctatggaaaagatgtctcaagagttagagattcttagagcagaacgggatgcttctgtctggaagaatgaggaggccttggtttatctatagaaagcccaaacccaaactaaagagctagtggaaaaacaagttaaagaaagattggagtcaggcctaaataaagctttagctagttacaaagaagaagtatggacgctacaaaagcatggagatggctacaaagctaactatcaaaattatcaggctcaggtctatctgctggatactcgagtggaagcctcaaaggtaaaagtttagaaatctgagaacaaagccaataattctattcttgaggcaaccaggttaaataaagagattatagaaaatattcaaaaaattcatgacttggaccaagaagttaaattgttgaccaacttttgatcttttgctattaatgctcagaatgaggtcttcaccaagcttgctgaggtggaagttgatatgatccccaagctaacccatgctgaagatggatttctggaagttgagcgtaaaatagtcgctaagaaagaagctaagaaacaagtggagctagatttagctaaactgaaggcagcaaataacatggtgaaagaggagttagctacaactatggctgaaagagtagaagaatttttcaatatctttgtagctaattttcatctactttgaaagaaagatccaaatatcacaaagcttcttcaagggaaagaagaggaatttctctcttagatcccataacttaaaagaataaagatttcttctgtcctggaagttgaggattctagatcaaattctgcttttctggctgaggaacaaattatccagccctcttttcagtcttttactgcagattcaatccttgatgcttccgtgccaaccaacactttgtccagctttgagtggctttatcttttttcttgattttgggggacgattgtctccctttttaattacgcgaagataaaattttgccattgttgtggggcttttggatgtgtaaattttactttagtacaacttttatttactatatcttttgttttaatttattaagtattttgatagttaaataatttttacttgctaagttagtctacttccggactacttgatgttccagttcaaatgtcctagacattgggatttcaacatttatatttagttttttttgtgaaatttttactttcaagttctttgaggctatggttccaatgacccaagtcttaggctttttaatattttttatactatagagaattaaataaaattttcttactttcgtctcgataagattctaattctaaaggcttgaaccatttagaattcaactttatttcttatgtcaaagcctaaacttcttcaccattagtgaacttgtattaacttaaggaattatttattacaagtgaaataagataatgacttcatcctggatcgctgaggcttcggtttcaatggcccaaactttttggacttcaatttatgcttctactaccaccttaattgatcaatttgcatactaatttttagagatacataattgttaggatttatgtctgttgaccgagattttcggnaactattaaaatatgattatagtagtgagctgtaagaaagcgagatggagatttttacgtggttggggc

SEQ ID NO: 62287 - DNA, 1085 bp, Cannabis sativa
atatctactaaatatctactaaatatctaactctcttacagctaatatacacctaatatctaacaggttgaaatttactctttgatgttatcatccgtgatctggaaggtttggttaagtttgggtacgcattgtgcaagttttgggatttttagggttttttggtgtaaatttgttaaccggatcacaggcaggatccccaaaaaatccattttgttgattcgtgttattttcagagccttagtttgttgtttccttgataattagaatattgtcatgttcattatcgatagcaaaacttgtagttgtgagtttaggttcccaatttgggttttagcgtgttatttacccatttgcgtaaatgtgacataaggcatccatccagcgcatgatttttcattcaagtaagctagtacacttgaattcagaaacgaggtaagaatagcgtagaacgtatttatataagaatatgtgtatgtgtaatatatgcatattgcttgtgattcgtatactaccaacattagtatggtagaggtattgagtgtattgatatagtgtatgattttcaatgagtacaatacagtattaccaatactagtatggttgagtacggtggtacaacacttaatggtactcgaggtacggtgcaaaccctaccaagactcgtacaatagcggtacgtagttcatgtggtacagtggtcgtaccttagtaaagaacgttcttacttatctaataagccttgtggataggtgtttggtagcctagatacaagtcggtaaaatatcatatgttatatgctttacagagtttgttgactcacagatattatattccgtgtgtaggtaatggaaagacaaaagctgaactggagtgagttctgagctcaggggatgattgtacatgtcgagacggcacaacctggagtgttcagtctcaggacgacttgggctgtgttttgtagtcactgtgcgatatgtctgtaaaacttattttgattatgattgtaaaagtttaaacacgggatctcggtttatgtaaatatatatatgtttataaaatttaatagtttaaatcaaaaattt

SEQ ID NO: 62288 - DNA, 1272 bp, Cannabis sativa
ccactcaagtgaacaaaggccaagctctcactagttttatggctaatcatagagacatatctccccaaatctctcaaagcttgggagaaaagcaagagccagagaagaagcaagagcaagaacccaagaggtgcattgaccacctgcccgatggaggcatggcccccaaggcacctggggcaactgaggcacgaggcaacaaggttagtttaaaagcttctaacaacgaggctgaacatgaagctctgaatgctggccccaggctaacacacgaagcacaggctaactacctagtcatgcaccacgactctcagttagtcgtagtttatgtccaatgtgaatatacagctcaatacaagaagatgatggcctactagagtttttaagatagctcaaaggctataatagaaggtaagcccccaaagacggcacaacagccaacgcactcgctcaactagccagttacgccttgacaaccaaggcaaacttagtacctgctcagttcttcaaagaactaagtccttctatttcaaaaggaagagacatgctagacaaccagatggatgacacccataacaacatacctccaaatgaaaaccttgccaaagcagggattaggggatgactacaaggtgtccaatcctacaaagtataacacataaaagtggtatcccaacaccaccaaggagcgtttccaagaaagaagttgtatagctattgacataagtgcacaaaggctttatggcaattacgttgggggttaataccaatcgagtgtagatgggataaactgtagcatcgacctggcctttataaggctgaccaacaatgacctcagcaggctggccgaccatagaatccacaatctagtcggccactacctccacatgttggctggcaatagtctcatccaacctcccaagcaatgctccctcaatatggctggccacctggtctttccttggccagcctgatccaccagcaacagtttgctctcatacatttggtctatagtgaccaagaagaaaataacatcttgctacaaggatcccttgacaaaagggaaagaagaagagactaatccaactcaaaggagcatggctactcacaaaagtttccaggcccttcaaaaaatagaaatagaaaataaattcttcgtaagagatcactccctaaagaatactccttgattgcaaagaccctacagcaagcatgttcggaccaaactgagaaggtttgtaccatgttactgttggaattatattttaccag

SEQ ID NO: 62289 - DNA, 1194 bp, Cannabis sativa
agcaatgttatttggtatcttaaattacttaacaatatgtgacactttataattggttaatagtttcgactagcaccctccttagtgtcataccgctattagtataattaagtagcaggtcccatataatttaagaaaataatttttaaaaaatatcattaaccaatcgtagggtgtaaagtgctgggaaccacccgtgcaacatcaatgctctttattaaattaaaatgtgtaggacccgatattattaaattgcactaataacaattagtcatatatatttgtggtgcttagcacttcaagtgcccttaacatttttctataaatatatgtatattctaagctcttttcataaccaattccaaaataccatggaactaaatatcaagcaaaacgtaatggtgactccagcacaatcaacttggaaagggaatcaatctttgtcggaatgggatcaaattggatgcaccacatatacaagttctatatacttctacgccccaaccacactcccattccaaaccattactcaaaccctaatcgattccttaagccacactctaccccacttctatccactagctgggcgcttgcgcagcttaaacaacgggcgttttcaaatcgaatgcaatggaaacggagttgttttcgttgcagccgagctgaacgctgatctttcttatttcgagaaagattacttcacaccgactcctgagtctgatcgtttacttccttatgtaaacgagtctctcccaatccacgaactccctcttcttctcgtccaactaaccaagttcagttgcgggggtttaagcctaggggttaccgcatcacatgtcctcattgacggactaagcgccgccaacttcatgactgagtgggcccgaatcgcacggggcttgccgttacagaaggcaccatttttttgacaaaaaggcctttggagttggagattgttgtggttcaaacccgcaacgatttgatcactcaaacgactttggtaatatgccgtttttgctgaaacaacctaacgcggaagagcttaagaagatgaaaacaacaatgttcacactaaagcttacgaaagaacaagtccagaaacttaagaacaaggcaaataacgatctgaaccgtccatctcgaccttacacgcgttatgaggtgttagcagctcatatttggaggtgttcgagt

SEQ ID NO: 62290 - DNA, 803 bp, Cannabis sativa
atttcctgctctcgtaaccatatttcggggattgtctattcggacccccctacccacccatggctcctctcgtgtgtgtatggtccgccctataacaatgctaaaaaacagttctggtcggaatttgtggctctgggggacagatttggaggcccttggttgatatttggtgatactaactttgtccttagtccctctgagcgggaaggatcgtcgggccgggatccctttatccccttcatctctcacttagtggattcccgtggcctaataaatatgcgcattcaaggagatatgatgacctgggataatcatcggtctgggactcaccatgttaaatctgcactggataaaggcattgtgaatggagagtggattcatctgtttccaaaaactgttctctactctatccaaacgagtacctctgatcatagacctctgtgcttggatacggggggaatcggtcctaaattccccagatgtttcaagtttgaggaaagttggacgagggattgcagaagcaaccttgtcgttgccaatgcctgtgattcggtggcccatccttgggcccctgctcgagtttttaaaaagatcggagccactcggatagcgctcctacaatggaatagaacccagtttggtaaaatcgatgtggtcattcatgagctagaaaacaaactagaccaaatgcaactattgcctgctggttccagagattggaatttggagatcgaaattaggcgcagcttaaatgaagccagagccaaaaaagcgctttactggaagcaacgggctagaatttc

SEQ ID NO: 62291 - DNA, 606 bp, Cannabis sativa
ctactttcaagggtaattaaaactcatattacacttctctatgtatatatatgtacgtaattatatgtgttggggtacaaaaatcgtaatatatatgtggtaattttcagtatctctgtagttctaatactacacaagttagaactttggtcatgataagtattgttagtcgtaaaagataggaaatttcgtttgctttttttttttttttttaataatagggatgtgatgtccattttctctttttcttgtgtggtgtggcccatcttccctttcttattccatatgtgtctttgttagtagatattgattgattcgaccatatgatattcatacagacttattaataatgtatttattctttctttacaaaattattatttatgctgttttttttattattaaaatagctttatactatatatactgtgtgtgtattgatgcatagtttcagtatagtttcaacttttaaagttgattgtttattactattctctatatgtggttagatggaaagtatgaaaaaaatcaaataagagtctcttattgatcaagtgtacatttttgtattttcttttaatattcactcacctttaacttttgggt

SEQ ID NO: 62292 - DNA, 782 bp, Cannabis sativa
tatatacatggacatcaaagctcgggtctcctcatcttcttccaatgcttcgattcgaaagaatctggtcttgttgggtagaaaaatagtattcattcttatttggcattagtttgccaaaattcttaatcagttatcaagtttttgatagtcattttcataatttttgtactgaatgagatattaatggtttttcttttctttaattaacatttgtgatatgaaaataaaaagcaagtttatctttgcagtaagttctgagtgttgcttaatgactttgtagaataaatttttcttttttcttgtaatacttttcattgatagatctgaatcaaattaatattaaaattatatgttttcttaaaaatattataattgctaaacgtcacaattattataattgttttgtttcaataaaattttgataaatacttttcacattccacaatgattattgaagagaacacttaagttaaaaaaataaatcactattatgaataaacacaactttacttaaaaacaattgacaatattttcctttcaaagattttctttatattttcatttaaaattttgtgttaaataattttttttaattcttacaatgttgatttaattaaattatatgatgaaataatttaataaattacctaaataaatttgatacatacaatacgtgcatatgcaacataatttttagtttatgaaaaattattgggtaactttttttaacacttttaaaatatttcaaatcaaatctttctattctcacgaaaacgatt

SEQ ID NO: 62293 - DNA, 616 bp, Cannabis sativa
ggactcgataggagagagatccatattaagtttccaattctgtctttctactgcttatctctgcttgtattaccttgactgattcttcttagtgttaagtcaggtctttctcttttcggttatttgtgtcagtagttagttaggttgttaagttggttaatgttagtttaggcggttgtgtgtttttcatctgttctcttgtgtatatataccccagccattctgtaattaattaacaccgattaatacaatcaaacactttctttcattccgcattaatccattagagagagattgctacaatatatttgattaagaacttcaacatgtacctacaaatcaatcaatcatcaatcatcaatatatataaaggaaaagtatgaggcgacgctctaaaattactctaaatacatctatttgttctctcctcaattctctcattattctaattttttattaagtttgtaaatattcactctaaatatctatgccaaaattatatcaaatacgtgtgcatatcaataaaatacgtgtatcaatattctctcaatagcttcttaaatttagaaactaaattttttcgtattgttgcattttcctgtaggataaatggtag

SEQ ID NO: 62294 - DNA, 1455 bp, Cannabis sativa
caagttgttagtgattgttggcgtcagtatgatacttttcctctcagttcaaaaatttctaagtgtggcgaggttctggctacttggggaaaagagaaaactggtaattttcatcaacaaatctctgaatgtaagagcttgattcggagacttaaagggaagaatgatgaagtgtctgtcgaggcccatctcaaagcggaaagagatctttttgaagtgcttactaaaagggaagtgtttgggaaacaacgctccaagcaactttggctcaaagaaggagatagtaatagtaagtatttccatgtttttgcgagtgctcgtaaacgccaaaatacgattcataagcttcaagattacaatgggagttggcttgattgggagtcgggtttgggcgatcatatggtcagtttctacactgagttattttctacttcgggtaatcttcatactgatattcttgatggtattgctcctgctattacttcagaaatgaatactgatttgttggctccggttactactgaagaagtgagaaaggctcttttccagatgcatcctgacaaatctcctggtcctgatggtatgactccgggttttttccagaagtgttgggacatagtgggttcggatgtggttcagcttgtacgagatttctttgattccgcctctattcctgaagctttgaacaatactaatctggtgctcattcctaagaagaagaatcctgaaaggatgggtgatcttcgcccaattccactttgtaatgtggtctataaggtcatctctaaggtaatggctaatggactcaagctatttttgaatgatattgtctttgagaaccagagtgcttttgtccctggtaggcttattattgataacattttgctgtcttttgagatcatgcattatcttaaaagaaagagcaagggcaaggtgggacaaatggctttgaagttagacatgagtaaggcctatgatcgagttgaatggtctttcctggaagtgttgctcttgaagttggggtttcatcctagatgtgtgtagttgattatggctttggttgtttctgttcgatactggatcatctccggtgggcaacatttgggtcctattactccctctcggggaattcgtcagggtgatcctttatccccttatcttttcattatttgtgttgtgggtctttcttctctcattcgaaattatgaaactaaagggttgattaaaggctgtcaggttactcgaggggctccccacatcactcgtatgttttttgccaatgatagctacctttattgtcgggcgctagaaagtgaagcacaaaggattatgacacttctttagagttatgaacttgcttctggtcagaaagtgaatcgtcaaaagtcatccattttcttcagcaagaatacaagtttatctactcgggaaaatatttgctcgattatggggatg

SEQ ID NO: 62295 - DNA, 1161 bp, Cannabis sativa
gagatttatttgaaatacgtgaatgcaatatgagttatttgtgaaataaaaatatttttaggttcggcgaccctggagacccgattggaggccaaaaaatgtcacaactgttttagatagaaatatcaatgggataattggaataaattgattttagaaataccgagatattttagggtactcgaagttggctaaataccttagaaatagaaattttttagtgactaagaaataataagataactattaataataaaagtttttattaatattattattaaaattattttattataatattattttaatatattattaaaacttatcagtgagtacaataggtactgataagtttatcttatatatataaattatacatgtcatatgtttatatcaaatgaaaaaaacagtacgaaaccttcttcctcattcttcaacaaaattttcttctctttttatctatctattttgatttttaacccgaaacctagcaatttaagctctggtagtagcgggatagcaaatccttgaagagagaaagcttaaggtatggtttaattacgttttaagctaaaaacgattggttttatgtaggggtttcgtgaattagaatagttattgagattctaaattcatagaattattttttggtacctatgggactagtattgatgtttacttgttgaatttgagttagaaatcgatttttgaacttttaaaagcttagtccgaacgttaatggcgtttttcatttaagggctcgattttaatttttgctatgcaagaatggtaatatttatggtatatatgcgccctgtgaagtttggagtgatttggataagttttgctagtgtttcggtgagtgcaaaaattgggattttcgagtttcatagtttttagaaattcttaggagatcagaaatcgtatttttgtcataacttttaactcgattgtccgttttggacattctatataccgtttcgaagcttgcgacaagctctacaatatgttgtatattttagaaccaaaatataagttttattttagtatgtctaaaccacggggtttggtagaaaaccctagattctcttatgtgaatattaagcagtattttgggataaacacttattgttttaacgttgttgtgacataggaccgaga

SEQ ID NO: 62296 - DNA, 1084 bp, Cannabis sativa
  modified_base (34)..(46): a, c, t, g, unknown or other
ataaataatttcatgattaaacataaacaactgnnnnnnnnnnnnntaactaagcgggctttacaatcacgtttttttttagttttctctccatgttcttattttatttcttgtttcgttcttcttcttcatctacttttcatttttttctttagtttttgaagttttcaatcacgtttcttggaaagataagggtatggttttttttaatcttattttccagaactggacttgcaaatatagcctctattgcattaagtgttgaggttgtgcgtggttaatttttttttattattattatttgttttagtgttgttttacagttatttttcgataatttatttttttgacgtcgatttcactattcttactacatctcgctggaattgatgattgttttttggatgttctcgtggtggtgtggtgaatctatccgtgggtgcagaagatggaggctataaaacacatttcttcttccttctatatagttattttgtggttttttttattatggttctcttaaaaatacatttgccgagctcactagaaaaaaaaaatcgaggtgtgtggttcttttatgtttttctaagtggttatatccgcttattattttacatttgtttttgtgttgattttagtaatttttttgttctgattttttaagattgggctttaaaatttaacttctacggcatttggtattgaggttgtgtagaacattgttagtttttttaatccttttttcctttcttttgttagattttttttagtgttgttttgcagttgttttgccatgattatttatttgacgtcgatttcactgttttttctcaatctcacttgaattaatggttattttccaattgttctggtgttcctgtggttgttttatccgtgggtgtggaagatagaggcctcatttttctttttgtgttcatagtataaaagaaaaaaaaacaattggccaagacagtataaatgttatttttgccgtatggcagtatattgaaaagattaggccaaaagttagtatttttgtaaatttccttattttaaaacgtccccaaggcccaatcggccgggc

SEQ ID NO: 62297 - DNA, 751 bp, Cannabis sativa
ttcaaattaatatgatggaaggtaataattcaatcctaccattttttaaggtatgaatattaccctcctcaagggtagttatattgggaataacattctaaagctaaaccctctaaataaacaaagtaatatttcacattaccattcccttactaagattaacttattccaaaaatgtaaaacagtataataatttaaaaaatgttagaaacgaacgttaaattaatattgtgataaattaaattattattgataataaaagacaaaaaccgtatgtacatgtgaattatccaaaaattaataacaacagccacttgagtgaccatatagagtattagggatcgaatgccaattgtgtaattcaaacaatatttgtataaaaaaacacttctatcaagaggaaaatagttaataccaaacatcttgatcaaaaaaatatttttttttccttgattttttttttttttttttttaaaaaatacattcaactttttctgcgtctcctattttctgttctctactaaaccataggctattttttttttaaaaaaaaaaaatcaatatccagaagaagaagattgaatttccattttaaaaaaaaataataaatataatattaaattcagttactagaatattcagctgtgggcaagaaaacaaatttttattttttttattgttttaaagaaagaaaacagcatatttgattcaactttcaaccttatataacagtaatttatatcctttaaaa

SEQ ID NO: 62298 - DNA, 808 bp, Cannabis sativa
tatttttaacaagtgcaagctttgttgagctttgttgtatttgtgatagtttaattatttagtgatagtctaaactgtaaaaatcgcaccgcaccataccatttttgtggtgtggtttctacaattttttagtttcacggtgcgggtgcagtttgggaaattaaaaaaaccgcatgtgcgagttggtttgaaaaaatagtcaaaaatcgcaccacccgcactgcgaacacccctagttagtgtcagcatacactcgctgcgaagacattatcagtccaaccttttgaagattttcattattgaatagagttctcccatgtctctcccatgcatcaatctcaatcatcatggcatcaactctcctcttcatgtcaatcagaggagcatgtcttttgaaagggccaaccttttgaaaggttatgtgtttcgatggaagaattgagtaagagccaccatatcccaccagaccagggcatcctcctggaattggaatgttgcacaagccagtctatcattgccggtgactcccataaaattcagagtctgagtaataatagtcagccactattcagctttcataacatctagacctcccaaaaagactagaggtgcctgcttgtggaacctttcatatagtggttccatccaattcacaacagcaaccggcccagcctacataacaggggtaggagccacctgcgctttaggagtgggtattgagggagcacttgctgcatcaaacgtttgatctctttgtcttatttgttaattatggcttgcattaatgtgaacctgatctcccaatcct

SEQ ID NO: 62299 - DNA, 1796 bp, Cannabis sativa
gcttttttgggaggtccagatgtttggaaggtcgagcagtggttgacagtaattgagagaattcttaactttatcggtgtcattgggactgatcgggtgacctatgccatgttttagttctaggaggatgctctcgtgtggtgggagttggtgtccctcacccaagacgtcactacaatgacttgggaaaagtttcgagatctgtttaatgctaaatattataatgaagcagtccacagtactaagagaaaagaatttactgatttggtccagggtgagaatatgtcagtaatgaaatatacaacaaactttgatagattagccaagttggcttcgagaatagtgcctacacacttcaacaagaaggaaaaatacttggcaagtttgaatgccgagattaggcatgatctggtgattactacaaatgatacaacaacctatgttgagatggttgagaaggctcttccagccgagggtgcagtggaatttcttcaagagccttgagggactctaagtgtttacgagaccaccacccttcctacttctgactatggtagagatggtggtgataccaacattgattgaaagaggaatactttcctgacattaggtggttcaagatagagcaaaaggttctgtgggaaccaaggaagaggtggtcatcaaccttattcttattttgagtgtccccattgtaagaaacatcatcccaggaaatgtaatctgaagacatgtttccaatgtagcttggttggacacttcaagaaagactctcttcaaataaagaaagaagaaccgaaataaaagggaaaacccatcccagctcggatgttttccattacgcaagaagatgttgcagcaagtccttctatggtaataggttaacttcctatcaatgaatcctattatattgtactatttgactctggagctacacattcatttgtagcattaacagtagttaatgaattgggtaggcctaatgatgttattgagatagggtttggaactctactacctagcagagaattggttatctccaaaaggtagattaggtctatgccaattataattgagaatagggagttaagtgttgtggagttggaatcaacagagtttgatattatacttgggatggactttctatccaagtattcaactagcattgattgcgaacgaaagatggtaattttttagccagagggtaaggaaccattcatttatgtcgagactgtttagggttctcaaattccaatcatttcagttttgaaagctaaagatttactgcacattggatgtgtaggatttttagtagttgtgattgactccaacagactttaaatatttgggcttgagtatgtcagagttttaaaagagttcttggatgtatttcccaaatagttattaggattactgccacaatgagaaatagatttcatcattgacttggcacctaggatgagctcgttccaaaggcaccatatcgaatggccctagcagaactcaaggaactaaaaatacaacttcaagggatgttggatctagggtttacccgacctagtgtgttgccctaggagcttgggttttatttgtgaaaaataaatatggatccctttgaatgtgtatggattaccgagaattgaacaagctgacgattaaaaataagtatccattgcccagaattgatgacttgttcgatcagcttcaaggtaaggctactttctccaagatcaatttatgtttgggttatcatcagttaaaaatttaggaggaaaatataccgaagattgcatcca

SEQ ID NO: 62300 - DNA, 631 bp, Cannabis sativa
tattggatacttgttatctttatgaacaacctttcgaaggagacccattcacttggattaaagggcgccacaatgtaaatactatcaaagaacgacttgattggtgcttcattaatgaccaatggcaaaacagtttccaaccgattataacaaagcacttggactactacaattcagaccatcgagccatttcagttgaagtactccctttggatactcgaaagaatgaaattaaaaagctatcaagattcaggttcgaaaaaatgtggctgtccgacacagcagcaactgatatcattcagcaatattggaagaaggatctgccaggtaccacgatggataaattttgcactaatcttaagtctgtatctgactctcttcaacagtggcaccacatgaaatacggtaacatcaagaaaaaaattaaagcagctcacaaggaagtggaactcctcaataatcaacaaacccgaacaaatgaatcagtgtgcaaactgaaaaagatggaggatactttagacgaattattatctcaagaggaggtttattggcaacaaagatctaggattgattggcttcaaagcggggatgagaacactaaatttttccatgcttatgcatcttcaagaaa

SEQ ID NO: 62301 - DNA, 1337 bp, Cannabis sativa
ttgtgcacctaattagggtgagatgcaattgtatgatatatgggtgcagatttttggcacggactcacctaattaggtgatgcagttgtggaatatatgggtgctaggctatggcacgggcttgcctgattaggcaatacaatacatgattatcagactaaagcatcgacttgcctgattaggcaatgtgatataatgaagatggttattttatgaggtaacatatatatataatttatatttccaaatgaatatgattcttattattagtataattgttttatattaccagatatctgtatactgatgcttattcatgacagatgccagtagtgatttagatttcatcttatgacaatgtgtgatggtttgattctgattgtgtataaatgataatatttgaataataaactatatgattattattgcttttcttgctgagtcttgtgactcacgggtgctatgtggtgcaggtaaggacaatggaaagttagagctgccacgagatgactaccttctccagcaatgtacatattgacctcaccagcttacgtgccaattgctactgtgtgtttcgattgtgtatctactgtgtgtttcgattttgtgtttagatggttgtcgtatatatttctttagtaaaacttttttatagcagggatccccggaacacgttttttatgccattataatgtccgtttctagtgttttactttagtcaagtttttaatattatcatggtttttaataattattctattagtattaaactattttataaaattacacatgtggcgtccctatagattagggcattacaactagtatcggatgtatggagtatacatcggactagactgatattgaacttggtaaagatatcataaacttactgttgtatctctctaagtcaatatcacttagttgatcttagatcaatagatcttaatcctcagatggttaggttcgatctcaattatattatttatgttcttagagtttgtactatcccgataagcctaatggtaaataattaaggtttatatttatattatgggttaatgaggtaataagtgggattatgatcttactaatttatttcagcaaaaaatttaaatttggctataagtggatatataagcgtaatttgttaattacagagatttatttgaaatacttagatatattatgagttatttgtgaaataaaaatattttcaggttcgggaaccgtgacgacacgattggaggtcaaaaatgtcacaacagttttagttagaaatattgatagaattattgagataagttgattagagaaataccgaagtattttgggat

SEQ ID NO: 62302 - DNA, 696 bp, Cannabis sativa
aatttaagtttttgttaacacttaattctttctatcattttttgacagttaaatgacaagttggatctcatgtatataggatattattcacatagacaagtgtaaacatgacactatactattggtacacataaataaatatttaaaataaaaataaaaatatattaatttaaaaacataaaacaattctttttcttttgttttctactattttttttccatatttttttctctttcttcattcttctcccaaaattgaccactaccaccatccacaaccatccaaaccgcaaaccaccacaagtgtctaccaccacccaaacctcttttgaagatcacaaatccaacataataacagaatcatataccacaactgaaacacaattttgttggattatattctaccaggatctagatttactaacaagtatgtttttaacctcttaaatatgaatctctaaaacgatgaaaattaaacacatataaagtatgaaaaaccttacattggttgcaacggaattaaatgactccttccgctcagatctctaactcttgttcctttttgtcgcagagtataattaagatatgagcccgaaactcattcaattgtttggattcttcacagtcttacacgctatgattgaggactaacttgctatgggtggacatgcactcaatcactaaaggctcaaattt

SEQ ID NO: 62303 - DNA, 579 bp, Cannabis sativa
tattatttttagtgaaatcttactctgaaaatattacactttaggataaatataatatgtatttttaaaataatagaaaatatagaaatttttcttaataaataataactatttgtttttaataaacttcaaaattatattaaaatataaatttgaaaaaaataaattacttctgaattaataattaattttttatgtttctttcaaaaaaatattattattcacgtgctcaaatatattaaaaaaaatattaataattatagtttttttttgttgttggggtaaccgataaaggttaaaataacaagggtaacaaaagttacacaaaaggtgaggaggtttctttcttccaagaaagttcattgtctatcctaaaggcatgcttagccaatctatgagcctcaacaataaagttgctacgaatgagagagagatgcctcaggaaaactagacaataaaactttaatatcagaaaagataactcccagttcatgtaaatacaatgtcagaccctccaaagttgagaccagagaaagtgaatcagaaaaaatcctctccacgggaagtcccacatcttga

SEQ ID NO: 62304 - DNA, 939 bp, Cannabis sativa
taatttcgtactttaaatgtatttaagattacctctaaattttagataattctaaataattttcaaaaataaaacagtaaagaataaggccaacaatattaatgtacacgaaattgtaccttgcatgtccataggaacaaaatgatttgtgcatattgatatcaattaatttaccatgatttgtgctcgaatttcgtccctcgacaaaagtgggctttcatcagagtctttaagcgatatgagaacatcaagcaaatcattgggaatactcagctcaccttctctccactctcgaattctttcattgattatggggtcatggagcttgttgatcactttcatggctttacgaacaatcctttgatggccatctaagtccagccatctaagccacggaagatagtccgatacagaaaaggcaaaactatatgaaagcagcgcaaacagagccttaacatgttcctcttcctctttcccaggtcctccatcatcccttcctttcccaaaatatcttttactgaaaaacatttttctcataataccaacagcgtactgttgtcccgcagttctaatgttaaccactcctccgcctttagcagacgagtggttataaacaaagcgaactagattatttgcttcttgggttctcttttcgagaagccaagcaactgtagagttgttgagaatattagacacaagtactctcctcattttcttccagtgatctccacatggcgcaatcacagtggttatgtaatcatgggagattaaacgagtgacacctgtgagaggtcttgaagcgaacaccttatcgtgtttcttcaagaactctctggcaatctccggagaggtgacagagatgacatgagtacttgtcccgaagcggatacaagcaatgtttgtgtccaattcttccatgagagtgtggatccatttgta

SEQ ID NO: 62305 - DNA, 864 bp, Cannabis sativa
agttagttagggtgttacaaaatcacttgactccagatctccacaatctgatggctccacaagagtttccaggttcagaccaaattcacatgggaaatggctcaagtttgcacattcatcacacttgtcacaactctttcacttcccctttcacatctcagtcccttaatttgcataatcttcttcatgtgcctgacattaccaaatacttgatgagtgtctcgcaatttgcaaaagacaattctgtctattttgagtttcaccctccttttttctttgtgaaagatcaggctactatgaagactttattggttgggaaggttgacaaagggctctataaatttgaccagcctctcgaatccagtcttcactccaattgtagctcctctactacagatgttgtttcctcaccaaagtctgcacttcaatgtcaaacattcagttctactgtacctttttcaaattttaatctttggcataatcgtttaggccatccatctaaacaaattgtataatctattatggctaaatgtaatatctctcctagcaataaaaatgtttttgatttgtgtactgcatgttgtcttggtaaacatcacaaactgccttacctaaattcaaaaactgtctatattgttcctttgcaaatgctccatacagacctatggggtccagcccatgtgatctcttccaatagatatagatattacattagttttgttgatgcatactctaggtacacttgactctatttacttaaaactaaggacgaggctcttccaaccttcattaaattcaaaatacagattgagttacaactcaatcatcaaatcaaagtcatccaatctgattggggaggagaat

SEQ ID NO: 62306 - DNA, 568 bp, Cannabis sativa
ttacaacttgtgatatacttcaagtaatcattctctccaggaaggagggttgaagtattggaatatattttaccaggaactagatttactaaaacgattaaaattaaacacatataaagtatgagaaaccttacatcggttgcagcggaatttaatgactccttctgcttagatctctaactcttgttcctttctatcgcagagtataatcaagatcggagtccgacactcctttagttgtttcgattcttaggcttacacactatgattgaggactaacttgctatgagtgggcatgcactcaatcactaaaggctcgaatttatttgtaaagaagactatagaattcaaattaaaagagccaaaagaagaagaagaagtctcaaactctctagttgtctgacaagatgaaaactaggttttgagtcattagtttgattttgagaccattcttttctttttatactaattcacttagggttaggatataattatatggaataaaaaatgataaaataatagcacaaaagggacttagtggtcggccatgagagggcccatcactagt

SEQ ID NO: 62307 - DNA, 1525 bp, Cannabis sativa
agcggtcggtgccgaaaaagtcactggagttgctgttggcgctaaaaaagtcatcagaattagcattattgccagaaaaatcacaaaaaaattaccaaaaaaccagcttttgaaaagaaaccagtttcttggtgatttttctggtaatttttctggcgacaatgccaattccgacaaatttctcagagtttactgttggtactgtaaaagtcaccagagtagctgctggtgtcgaaaaagtcgtcagagttgctaccaacgctagaaaagtcgtcaaaattggcattgtcgtcaaaaaaatcaccaaaaaaataccaagaaactggtttcttcatcaagtaactagtttcttcatcaagaaatagtttattggtaattttttgggcgactatgccaattctgatgatttttttgaagtttgccggtaccggaaaagtcgccggagtagctgctagcgtcagaaaagtcatcagaattggcattgtcaatggaaaaatcaccaagaaagtggtttcttcatcaagaaagaaacgagtttctttgtgattttttcagtgatttttccggcgacaatgtcaatttcgacaaattttctggcatcggtagcaactctgacgacttttccggcaccgaccgctactccggtgattttttggcgccggcagcaaactccagtgagtttttcggcatcagtgaaaaataaaactacctaaacaaataaaaacattaaatatgagatttaaaaacctaactatactgtggtcggatgggtaaatcattttttttttgtgcttatagtattctggaatgtttgttatattttttataggttttaaaagtgttgagtttataatttttgagtcgttatgctgctaaaatttcgataaaaataatgcaataaaaaatgaaattaaaatgttataagacaacaaaattatattatttatcaaatagtaatgaatcacaagaattaataaattgttaaattatttaattaaatttaataattaataaaattaattaattaattttaaatgaatattatattattttaaattataaattttaacataggttattaatggtttaaatgtaataaaattaattattaattaataataattaatttatggataatgagataaaatcttgaaattataaacacaaataagaaatgagattaaaaattatatattttaatttaaataataagtaaaataaaattataaatgaattataatatgtaattgaaaatttaataagtgttattataaaatttaaaaaataagtaatttttaatttaaataataaattaaaaattaatatcaatatgtaatatgtaatttaaagggccgaatataaaataaagtagtgttcttaattatctccctacttcaaccaattcgacttagcacaagaaacccaatattttaagagttaaacttttgagagaaaaaaaattattaacttactataccaaaacaaaaaaaaacaaaaaaaaaaaaaaaaaaaaaaaaaaaaaaaa

SEQ ID NO: 62308 - DNA, 1553 bp, Cannabis sativa
atgcaagccagaattaatgaacaacaagaagagatcagatgcctgaggcagcagggtgctactgcaatgcatgttctaaagatgtaggtgtctcctaccccagctgtgcaggcagggtcgattgctgtaatgaaccggatggaaccactgtacgaaaggttctacaagcaagcacctccaatctttttgggaggtcccaatgtgatgaaagccgagaagtggctggcggttattacacgaatcctgaactttatgggtgtcaccagcaatgacagagtggcctgtcgacattctaattataggacgatgccctgttttggtggggatatggtggccctaactcgagacgttactaccattacctgggaagagttctaggaattgtttaatgcaaagtattataacgaggcagtcaaaagtgcaaagagaaaagaatttacccagctcacctgaaggaaaatatgtctgttactgaacataactcagtttgatcgattggctaggttggcctcaggaattgtgacagccgacttcagcaagaaagaaaagtacctatatggattgaatcccaaaattatacatgaccttatgattaccaccgatgataacaccacctatgccgatatggtgggaaaggcatgcgagctgagggcatagatgagtgcatccaggaacccgagggactcaagttattagtggagccactagtcctcctacctctggttatggtagggctggtagtgagtctaccactgaccagaagagaaagacaccatttgcacctggtggctcaaatcaaaaaaagaggtttcgaggaaaccaaggttgaggtaaccgtcagggtggtttcgaaacctaatacacttacccagaatgtcccagttgtaagaagcatcatctaggtgagtgtagagggtgagaatgtttccagtgtggtttgcctggacactataagaaagactgtttgcaacttaagaaagaagaatagagactccatcaaagcctgctccagcaagggtgtttgctcttactcaacctgatgcagaagccagcccctcagttgttacaagttatctctcggttaacaactcttacttctctgtattgtttgactctggggccactcattcctatgtggcggccaaattttttgataaattgggtagaccgtatgatagctatgataaagggtttggaaccctactacctggcagagaattagttatctctaaaaggtgggttaggtctatgacgatcataattgaggatagagagttgagtgcttatttagtagagttgggattactgaattttgacatcatacttggaatgaatttcttgtctaagtactcaactagtattgattgtaaacgaaagatggtgatcttccaacccaagggcaaggaaccatttgtatttgtgggatcagttcagcaatcccaaattccagtaattttggtattgaaagctagagatttgttacaagatggatgcttagggtttttggcagtgttattggataccacatgacctgattcagttcggcctaaaga

SEQ ID NO: 62309 - DNA, 943 bp, Cannabis sativa
gcaaaaacacggatgatagggtgaagcacaatatatgcactattcttggtatgtcagaggcaaacgaacaaagtacttacctggggttaccgaatacaatgggtagaaacaagaatgctattttgggttttttgaaagagaaaatgcaacggagaattgagggatgggatagcaaacttctttcacgagctgggaaggaggtgcttataaagactgttgcgcaatctcttcctaactatgcaataagtgtgttcttgttgaataaaggaatgtgtgaagagatggaaagcatgatgtgcagtttctggtggcgcacttcgaacaagagcactaagggcattcattggatgagttgggatcgtatgtgtgtcccaaaggatcgagggggtctaggatttcgaaaactgagagattttaacattgctcttttgggcaaacaaggctggcggttgatgtcaaatcctcaatcgttagtaggccacatctttaagtctcgttattttcctagaggatctttcttagatgctgaacttggttcgaatccaagcttcatatggcgaagtttgatggaggcacaaagcttggtaaaggagggttgtcgaattacattgggttcaggtatgggaactagtattatgaaggacccgtggctgttggatatgtcatatccctatataactactgttaatcaagcaattgttgatagaacagtggattctcttatggttatgggggaaaggagatgggatgttgatctggtacttgacatttttaacaagagagatgcagatttaattctaagcatgcctttgttttcttctgttggctatgacaaattgcaatggtgttttgaaaaggatggcgagtattcggtcagttctgcttacaatcatatacaagataaaaagtttctcaacgtagcagtgggcgaaattcagttttg

SEQ ID NO: 62310 - DNA, 1299 bp, Cannabis sativa
caggataaactcgtaagataaaaaaaaagggcggttgaaatgcttaagtacctctctgacaactacattaatgacggggttcgtcaaataggcaggaatcaaatcgttgcctatcaaaaacaaggcggaataaatagcccacgcccgcaggatatttgccacgtcactccttgagaccagagttaaaacacgtcggagtttataaagttttaaaataatacttgggggtaaatgttgccctactttttttccaatatacgtggcaactctatgactagacacatggcaattatatcttaagattcagaggtgctcaaggatatcttaaacaggtttacaatttaagtggacatagtcaaagagctcctcctagagctataacacgatccgaaaggatcaaccttctatccatctcaaggagctggacaaagcccagcttaaccgggcccagggtcccagagatgaactattcataagcattaaatgcagcatggaggaaacgttacagacgaatatgaaaagacatgtcagacgcattaaacccattctttggcgattacgcgttaatcaaggatgtaagtgacgactgcataatgagctatcacatcaatcaagaaaggataaagacttgtctcacctaaaccttatgtaacctactatgtagacgcacatagcctatttcgctaatttgggaacttgtgcaaagttaaggtggacgcttgagacagtagaggcatttttcttctcttaaaatagctataaataccctcaaccacatttagaatggggatcgaaaaaaatagagtaaaatattctctataaagaaacacctccattttaaatactagtgacttgtgcactaaggcttattaatgtcccaaccacgtaaaaatacttgcatttactcttttctaatcattttcactggtataattacttagttgccaaaaatctcagtcaacaatttgatttaaggacttttatctaatttcattcaaatttttctaatatggcgattgcccatattctaaattgtgttccaaactttgatatttacaaaattatgctctaattttaacatgtattgaattgtgccctataaattttcatctacgtcgaattttttttaataaaattggacaacaatacttaaatctaacaatcttaatagtttaaagagaatttttaattagcataaatattgagaacaaaaatctaaattagtcatttaagaataagcattaaaaaaaagagagttatatctatcatcttttcaagatttatcaactcctttcctat

SEQ ID NO: 62311 - DNA, 636 bp, Cannabis sativa
acttgctgttgtgcttcctggtttaatctaacaaaaccaaggagctttcattcaaggtaggtccatcgctcataatgtgatgattcttcaagactaaaaaactataagaggaaaacagtctccccgagatgcacaatcaaaatttaaataagtaaggcttatgacactataagttggcatttttttggaggagttgcttgttgcctataatcttcctcagaagtttatttaatggattatggtttgtttaagagcaacgtcttattcgatagtcatgaatggtagagtggaaggcaatttcaaaggagagaaagggttaagacgaggtgacccaatgtctcttctgttgtttgttctcatcatggagtatctcacgagaagacttcaattggaagcttctaattcatcctataggtttgatccaatgtgtaaagggctgaaataattaacttgtgcttcatagatgatttaattctgtttagcaagggttcaataccctcgattttggttctcaaataggtgcttgatgaatttagtatggtgtctggattgcacattaatgctaacaaatctcaagtctactttggaggcatgaacactaatgacaaacatactattttaagagatttttagttg

SEQ ID NO: 62312 - DNA, 836 bp, Cannabis sativa
aattcctgaggcccaatcctccgcccaatcggtcaatgcgttgtatactcagtaacactcatactttccttctcagtcaggtgagtaaattccttttctcttagcactcctaactgcttcattgtaatactttacattgaaaagttcttgaaacttttcccaggtcattgtcgtaacatcatgaatcatggacaccatgtcccaccagaccagtgtgtcttctcgaaactggaaggtggcaccgaccaccatatcattagcagtgacacccataaggttcaagattctagtaatcactgttagccattgttcgaatttcataactaacacccggccggacgacctcctcccccagaaaaactagaggtgcttgcttacggaacttttcatacgggggttccattcggttcactgcaactacatgttcggcctgtatagcaggggtaggagctactgatatttctggagcaggcactgcaagagttccctgctgtctcaaccgccgaatctcatcatcttgttcattaatcctggcttgcatcgctgcaaaccggttttcccaatcatgggcagcttcggcagcctgtggcgggttaacatcaccccgtcctcgtgccctacttctaaggcctctacttcggccacatcatttaggggaatacaaactccctgaccgccactgaatccgacagagttaccctgacttctggtgtttcgcccggcgtccattctactagaacagcccgcgtaaccaagagctagtctggtcagatcgcgatcaataataacttactaatgccgcttatttagaaatttaaaacatgcacctattcagc

SEQ ID NO: 62313 - DNA, 1675 bp, Cannabis sativa
  modified_base (1030)..(1033): a, c, t, g, unknown or other
gataactaactctccgccaagtaatagggttccaaaccctgactcaaaactatcatgcggtccatccaatttactaaaaattctggctgcgacataggaatgagtggcctcagagtcaaacagcacagagaaataagagttgttgaccgagagcggacttgttactactgaggggttggcttctgcatcagcctgagttatcgcgaacacctttgcttgagtgggtttcgctacagtctctggtgcttcagtcttgagttggggacaatcccttttataataccctggcataccgccctaaaaacatccatggcctctacactcccccaaatggagctttttacaactgaggcactctgggtaagtgtatcgggtctcagtgctaccctgccgattgccttgaccctggttccataggaacctcttgttttgacctgagccactggatgcggtaggtgcctttcttttctaatcagtggttaagccactacctcccctactacagcctgatgtaggaagggtaggagccccgccaacaaccggagtctctcgagattctaaggtgcactttactgcaccctcagctcgcaatcccttatccaccatatcaacataggtggtgttgtcatcggtggtaatcattaggtcatgtctgatttttgcatttaacccgtccaggtacttctctttcttattgaaatcggtcggcacaattctcgaagccaaccttgccaagcattcaaactgcgtcgtgtattcagtaacactcatgttctctttctgagtccacttggtgaattcctttcttttagcacttctgacgtcctcattatagtacttggcattaaacagctcctggaatttctcccaggtcattgtggtaacatcatgaatcatggacaccatgtcccacaaaaccagagcgtcttcttgaaattggaaagaggcacaggccaccctatcattaccagtgacgcccataaagttcaagatgttggtgatcacagttagccattgctcggctttcatnnnntcggacctcccaggaaaactggagatgcctacttacggaacctttcatacagggattccatctagttcactacaacaacggattcggcctgcacagcaacggcaggggctaatggtatttctggagcagggactacttcaggagcaccctgctgtctcaactgccgaatctcttcatcttgttcattaattataacttgcatttttgtaaaactattttcccattcttgggcagcttaggcagcgtgtggcgggttaacatcaccccaaccacgtgctctacccctgggacctctacctcggccaaggattttaaggggaatctgagctccctgactaccacttgatccaaccaaaattccctagctcctggtgttttgcctggcatccatactaatttgaacagcctgcgtaaccaagagatagtctgttcagattgtggtcaaagaaaacttactaatgccacttatttggaaattaaaaatatgcacctattctactattaggctactatcatacttcctaatagacttttcttaaatcataccatcaaaataaactacaaagcaataaaagcttactgaactgtggaacgagctgactactgatgataattgtacatgtcgtgacgatcttcggaaga

SEQ ID NO: 62314 - DNA, 1107 bp, Cannabis sativa
taaactaaataaaagcctctatggcctaaaacaatcatcgaggcagtggttttcaaaactaagctccactcttcttgccattggcttccaacagtcacccaatgatcattctctcttcattcgaactattggagaccaattcctagcactattagtttatgtcgatgacatacttattgctagcaataaccataacgatgcctctgctttcaaactttttcttcactcgaaattccatctcaaagatctaggttcccctcgattttttcttggattggaaattgctcgatctaaaactggcatagccatctctcaaaggccctttatacttcaactcttatctgaatcaggttctcttggcaccaaagctgtctctacaccaatggatgccaatatctcacttagcaaggataatggaccaccggttgctgatgccacttcctatagaagtttaattggcaaacttctatacataaccattacacgaccagatataacattcgctgtaaatcgacttagccaattcctccaggatccgatacaacctcacatgaaagctgccatgcgaattcttcaataccttaagggaacacctggtcaaggtttattgttcagctccagtattccacagcatcacaataaattccaactccacggcttcacagatgctgactggggcacctgccctgataccaggcgttccatcacagggtattgtatctatcttggcaattctctgatatcatggaaatcgaagaagcaggccaccgtatccaaatcatctgctgaagctgaatatcgttctctagctaacacgacttgcgaaatcctatggctcttcaacatcctcaaagactttggtatttcacatccaacacctgcaacaatatactgtgacaatcaagctgccctccacatctccgagaatgctgtttttcacgagcgcaccaaacacatcgacatagactgccatattgttcgagaccaagtaaccagcaatcgcatcaagctcatccacgttccttctcggcataatgttgcagacataatgaccaaagctttgtttcctactcaacacaagtttcttatgagcaagatgagcaccat

SEQ ID NO: 62315 - DNA, 1272 bp, Cannabis sativa
  modified_base (754)..(755): a, c, t, g, unknown or other
tagtgttgattatgtgcaggtcagtgctgaacagtgagttgtcgatggtattgttcttatctcacactcttgggctcatgtgttgtttgatactggtgcatcacattcctttatatcattgatgtttgttagtatgttgggtttgtattgggaaactttttgtcctgcgttgcatttgagtgtacctataggaggacacactgaggtatccaccatatgtaggtcaatttgtattgtgtttgagggacagaagttgtttggaaacttattagtgttgcctatggggcaattagatgtaattcttgatattgattggttgtctaaatacgaagccattatggattgttcacgcaaaagggtgactcttttaacccttagtggttatttcattatttatcgagctaacatgagtgttgtgagacaaaatcctatcttaagggcatgcttaggtgaaaagagaaacttagagtgttatgggaatctgtttgcgatcgaggatgagtctacagatttagcccagttcccttagatatcaatggttagtggttttctagatgtgtttccagaggatttaccaaggttaccacctgatagggagatcgaattttgcattgatttaattcctggagctcaaccggtttctattgcgccttaccgcatggcacttgcagagttggatgaattgaaaaaataattagggtggttaatggataagggttacatcagacgtagtacttctccatagggagctccnntcttgtttgccaagaaagctgatggaactttgcgactttgtgtcaactatagattgttgaatcagatgaaaattaaaaaacaaatgtcccctaccgaggattgatgaattatttgatcaacttggtggttcaaagttcttttcaaagattgacttaaggtcaggcttcaatcaattcaggattagggaagaagatatcactaggactgctttcaggacacattatggacaatttgagtttttagtaatgccatttaggttaacgaatgcacatactttatttatggatctcatgaatagagtctttagacttttcttggataagtttgtagtggtattcattgatgatatcttggtgtattctaagacatgtgaggatcatgttgaacacttgataatagtattacagacgttgagagatcattgatcatatgctaagaaagagaagtgtgacttctggatgactgaagtcaaattcttgggccatgtaatttctcaagatggtatcactgttgatc

SEQ ID NO: 62316 - DNA, 884 bp, Cannabis sativa
cttttaataattgtccactcttaaacaaacattagcattacatatatttgaacttaaacaaacgatattcgtaaatccaaaacgaatcaaatattaatcttcaaccacatacccaaaatggagttgtgaactaatttaaaaactaggttgtcttttttcttgagttaggtctgctagtcatctttaggtataggtgtggcttggtcggggttgtgttttgccattgtgatgcaatttttgctactgcagttagtcttgtctctgtgatatgattttgagtgttttagtcttatctatgtaacataattttatatgttttagtcttgcttgtgtgacatagttttattttgatttgtttcgttgttggttcttatttgttcttcgatggtttgccatcaaatcgttgttggtgtttgggaattctgttctctgcgactgaaggggttgttagtagtgtagttacacaccttgcataatagttgagtgttcaaattacgagattaaatgaacctgatgcaataatttttactgttgtgtctccgaacggtaaatgaaactgaatattggtattttaatgttaacggtggtgctgcaatctttttaatctgattatgcttttatttttttgtcaaatgatctgggaattaggtggttgattatttgactcgtttttctaattctaatcttaatcgtatctccaacaaagtagatgtctcaattcgaatgcaacctattattttaataacttattgttattaaaaaaaattgcataatttattaaaaaaaacaacttgaacaaacattaaattaaaattaaaagaattaaaactaaatttattatcacaaattttggagagaatattgtcttaaacctatgacttgtc

SEQ ID NO: 62317 - DNA, 1022 bp, Cannabis sativa
attatattatgagctagcagcctgtttttgacaaaagcaccctggttattactcacaagacaagggaggacttctgataaccttgcacaaatcattttcgagatgcatttgtacaaagtattgcaacaagcaattgggcgaaagtcactagcttccttgggatcaagagtcttcgggattagagtgatgacagcatctttcattgaaattggcatcacccccccttcctcaaaaaaaaaattaaggatcgctgtggacacctctttcccaatatctctccaaaggcttttgaaaaagcctgaaccaaacccatcatgacctgggcttttatttgaatgaatcccaaacaaagctttcctcacatctttctcattaaaaggtctaattagattagcctgttgttccaaagaaaggatcggcccccggactaatacatggttatcaagcctcctagtagcagagcttttccttcccataaaattcctgaaatggttcaggaaatgctccactacttgggtgtactcatctaccagacgcccattcaattcaacagttgtgattcgattctccaacttccttttcttcatagccgaatggaagtatctagtgttttcttctccattttgtagccatgttattttactctgttgacaaagaaagcagaaatactgctttaaggctgcagcataccccaaccctttgctcttctcatcctgatgcaggatgctgttgttggggtcttttgccaaattctcctgagccgagataaactccactttgctttgatgatagagatgcactatatccccaacttcctccctattaaacttctttagcacatgcttcagtctaagtaattttcttcccacatcagccacggttttagcaccattccctctgttccagcaattcaaaaccgtctcacggaaattacgatgaagagaccagtggttacaatacctgaagggtttaactcccacattacctattttattgctcttgacaatgcaataactatgatc

SEQ ID NO: 62318 - DNA, 579 bp, Cannabis sativa
  modified_base (30)..(47): a, c, t, g, unknown or other
actttgaaaacccaaaccgtaaatttgaannnnnnnnnnnnnnnnnnaaaaatagtatatagggtaattcctctaaaaataatcttttgctttaattttttaagtaacatataaaaaatttacgttagtttgtgtaaacgatgttatagccttagacacaaatagtcttattttttacttcacttagtttttgacgctaaattttttttacttcagttcataaccaaaacaaatagtaaagtaccgacgcaaattgattttttgtttcagttgtgagccgaagtaaaataataaaaacaatatatataaactttcgaaccaccacaacaaccaaatagcaacaatatataccactaccacagcaacccatcgtacgtaccacaaaaagcacatcaaccccaccatcccatcggaccaccacccttgcttgcttgtgaaaaaaaatcagagagagagagagagattgaaggagaaagagagagaccagagcagcaggagctgggcgctcgagacagggaacgagaaaaaaataatgaatctcacatttgaaaactctatttgagagagagagagagagag

SEQ ID NO: 62319 - DNA, 795 bp, Cannabis sativa
gttcaaaagataattgagttcttggtttagcctcaacaatgagcatgttgccgctgaaaaattagctaatgtcgactcgttagataggcaaaaaaaataatagatgaaagaaattgaataacagagacaccacaatttatagtagttcactccccatgtcgcgatggtaatggagctacatttttatttctcatgagaattacaagaaaattgattaaggaaagagctcaaatttttagagagagatgctctcaccgatggtgacttagcagaatgtaaaaaaatgagcttgtggagctctccttttataggcaaagagatctattaaaatattaataaataatacaaaaaatataaaaaaaatatttcaaggctaatcttgaccattggtcaagatctaatggttaaaatgactttgggttataattgtaaatttttggagctcgaattctgttggatcacttttcaagctttttgtagataaaaatcgcccttgacttggggatgaattttcgactttaaatctttagaattgagatatgaaagtgagacatgcatagaaagatcttgaacagatataaacacaacttaaattgtgtcaatcgaattaatattgagtgggttatggtcgttaattgaaggttgttcaacaatcaacacccaggttgacatcctaatgttaacctagacattgtatgagtgaaaaaacgtgtcaaacttgtattttttgttgtctaagtaatattttgacatcactagtcaattttttagttctggtaaagttgtttactagtt

SEQ ID NO: 62320 - DNA, 654 bp, Cannabis sativa
gtttaaccaagtagagatattacaaaagttcatatatatttatagatagatactcaacatgtatcatgcatcagagaatgtaacaaccttccttttcttttgctttgttttccggtgccttaataggttcagaaacctctgaagttgtactagctttagaaatcagtgactcaacctcatccgagtagctaattttctcagacgaggctttactgcgttcttcatcatcgccctggttcccggttttgacagcagcctgaaaggttgtgttgccagaatctgtggtatgctggtgaaaaatctgattcaagacgccttccattcttggttttcttgattgtatcctcttagaaagttctttcactagaaatttctccctgaagtagaaatagcccgacaaaggaaatacattacagaaaatgaaagcttaactagtactattctgattctctagtacaaactaatcagtaatcacaaacacaaatgtatgaatcaaaactaaccttgcgtccaatgcagcagaaagtcgcttcagttcatacaacatgtaacccatttcggtaggtaagatcttttcgacctggccaagaggtttcttaagaattctattcactgctgtaattaataggtgaatgtatttgtccaaatccacct

SEQ ID NO: 62321 - DNA, 1000 bp, Cannabis sativa
  modified_base (558)..(561): a, c, t, g, unknown or other
gtcatattaattttaaaataattgaaatattttaattaaaatttatataaaacaaactcataaataactttacataaaaactaaataataaaaaattagtaattcaaactaattagaatttttgtccttcaaattttgatttgagagaatggagttatatgttgttgggcctggggctgctccgtctggatagtttactccaataaggccattttccatttcatagattagagaccctgacgatgttgtcggggttggggttggggttggggttggagtcgagtcacctataatatacatggcaaaacattttcattaagtatttataaatcttgaaggaaggaaatacttcattcatgcacaactaataaataacttacaaaggaaattcattctccaaaaataagtgtatcaatgtattttttatttttattttttaagtttcaataattataattcatatttattttacatatataacaatgtaaatatatatatattaagtattggcaatatacaatacattacaattattattacttaattattaatttaaannnnaataataaaaaaaaattaaatctaatacaatttaataatattttataaatatataaaatttaatttagttttaaatttatttataaaaaatatatatctaactaattttattaaataataaaataaataaataagtttagatattttaaccaatataactaataaatttattattaagtattattaattaattaaattaacgtcttatttaaatttaaattaagatttatataactaattaaaaaataattatataataatctattgatactttttaataattatctaagtcatattttaataaataaattaaatttaaatatttaattttatttttttaaataaaaaatacttttttgatttatttcatggtactagttttaacgttaacttatttaaaggaaaaattttaaaaaaaaatgttaagccaaaatttttt

SEQ ID NO: 62322 - DNA, 1696 bp, Cannabis sativa
  modified_base (221)..(223): a, c, t, g, unknown or other
  modified_base (251)..(253): a, c, t, g, unknown or other
atcagagtgccttcctttccaacaggctgatcattgataatgttttggacatataatcatgattatattccattgtgctgacgacactataatcatgagcaaatatataattatatatgttccagacttaatagaatttatacattaagtataatcatgaaataaatcatgtgaaccatgcaatatacaatgatttttaatattttattaattagtaaatnnnatattttattaattagtaaatctgattnnnttgaaatgggttttatttaggacagacaacccaacatgtacaacctaaaaacccaaattcatctcgcataaacaccgatgctagggaaacgcgacctgggggtcatgctacacttagcatgatgcgaagggagtaggcaatcagcctggatcaggtcgaccatcgatacattcgcaaagaccaaaccaaaatgacaaagatagtgtgtatacctatttaagtaggggatgtgtgtcaaatctctttcaaagaaggaggccagtgcgagaggagcataaagaaatagggtcaagcactggtcctagtgggtccaaattaaaggctcatgatcagagcagatcgaccaggacccatgcacgcaagagacaaacacagagtgggtaagatacacgtcgccaccatcaagatgaacaagaaaacacgagtaattctcaaagttaccaatctaaaagttactctacaacaagatcgattagtaattgcgaccagaggaatgaaaggcgacgcgaccctgatttgcatgaacacttgaaccataggcagcttgacttacacaaatatctaaactgaaatgttctagacctctgagatcagttgagtcagaacacaggttgacagcagcaagtcaagcagtcagccatggatccaatttaattaagactgattcaattagaagacaagttcaggcgataccaagacagtgaatatgagaaattatcagggtatgattcaaatgaagaaattgaaacatttcattctgatagattaaattctcaattctctcagggattcaaaaacccacatgttgcacaacatgacattacaactgatcatgttgcacatttgaacaattttaacactataatgggagcaatcaatgtttctaacaacttgcattgcattctatttccaacatctctgtcgagagatgcaagcagctggtttgataaattcaccaaccatcccattacctcctgggaacaactatctaaagatttcaagaaacagtttcaggtcgtaagagacagaaggctagaggcacattcactaactaacatcaagcagcagctaggagagtctctaaaggcttacctgagtcgttttagcgcggtagcagccaaagtgaggaacttgaacattagtatttagttaacagccctccaggctagaataacaactgatatgtcaacagggagaggtgaattgttagggtcgtcaaaatgaatcagacacgataacacgactcgaaacccgcacgagagttagtgggttttgggttaccttaaatgggttcgggtcgtgttcgggttgactcgtctaaccaatttaataaatgggtcgtgtttgagttgacgcgactgacacgaaattggcctgttcatgacctatttaaagttatttttgttagcccaagatatgtttccaagaggggggtgaattgga

SEQ ID NO: 62323 - DNA, 553 bp, Cannabis sativa
taaaataatatcaaaataaagttaggttgttactttttttttattaggatcatatttgtaacataccaaaaatttcataagaatacatattattctcatggaatgggggcttacggggacttgcactaataggagcagagattttttgtctaattagggaatgtgttagggactggagttatttttattcccgaaaattaaacgggacaaagataggaatgacacttcccgctccgacaagaatccgtttaatatttttgttatctttttaacaacattatatatttataatatatgtttatgtatttagtataatagtatttgtttataaaattttaaattgtgtttgagatgaaaataaatatatttaataataaataatgtataatattttaatttttatacagtttaatatttttatacatttagatttttaatataaacttttttttaaaggatcctaccctattaggagaatcttgtcccatctctaacaaaaaaatatatagatagaatagaaaagcactctctgctaatattccaccccgtgtgc

SEQ ID NO: 62324 - DNA, 633 bp, Cannabis sativa
tatgagactaaactattactaattttgattaatgagtgttgggttccttgttctagtagttcacatcagtttgagagtattgtactataatgtagtttatttattagtacataatggtttggcttacgttgactttactcaagctccaatagatgctttaattataagagctaaaaagaaaagttttaggttaaaattttctctgtcaaatgctctaaattatttggtataatacctaattttaaatcccaaaaatattctgtgcagtttaaaagtgtcgtatcccaattacatataattctcaaaatttaatttaataattctcgtataagatatctttaactattttaattttgatgcgtacggccgtttgatctatttattattttatattttaattgttttttgtacgtgtctccatctctctaaattattatttgtttattatatatatttttattttttaactttaataatatatatttttttgaatgcataaaatagagaaagtgatgatgtatggtgtactataaatgtgaggtaaaataaaaaaagtaaaattttgattaaatattttaaatgaaagtaaaaaattgggaacttgggagtgtaggtagggtttaattttggtta

SEQ ID NO: 62325 - DNA, 786 bp, Cannabis sativa
acttaaaatagtgatggaaatggtttacactgtactctgtacttgttgagcaaattaagtcttttgcaagaatgagagattttcttttcaacgttctcagagagagtagttgttgtttgtgatcaaattgagggtcagtgttagtaataatcatgttacatggaaatttttatcttcattttttcagaaaataagagcaatattcacctagaatcattactttccttttggtatttgccttacctttgccccttccctactactattttttttaagcttattaggtcaccatttagattaactttgttttggcattttgcacaatgaaagaatctctctttaattcatgtgttaaataatagtatatcctaaaaaaaaaaaaaaaggaaaatcttaaaagtgaagttgattatgtagatttttggacatgaatattttttttatattataattaaatagtatatcatgcatttggattgtggtgcactactaattttttctttttttattattctcttcagctaatattaaatcttaactatacttttaggaacaaagcaaacaagatattgaaccttgatccaatatatatatatatataatatataatttctttttattgtttttttagggtaagagcgatctgtaatcaaatgatgagatgaatatcatacgtccgagcacagacactgcagcaagggctattacaatgatcagtttctgtttttgtttatactttatcctaactaattagtgacaatgtatataaattagtaaaaattaatt

SEQ ID NO: 62326 - DNA, 768 bp, Cannabis sativa
aaaaaccgtaaatatgtaaaaaaatattctttgaacgtaaaaatataaatatttcacaaaaaattgtgccttatgtaattattctataaaaaaaaagtatgcatgatgtgttaatgtaattttgacacaaatcaagaattcataaaatatttaccaaaaataaagtaaaaattcacaacaaataaaaaactcaattcaaaatggaagaaaaaattaatttttttttacgaaaattcacataacaaccagtcgaaaaatttaaatcgcaactaaaatctatattagaacaaccaaataacacaaatggtaaagttaaaaaaaaataaaaaaaatgatatatgattaattctccaagaaattaatcactaaccaaaaaaaaaaaatcctcactaaaaccctaacccctaattcttcctgtctaccgcgccatttttgaaacctaaaatgcaagaatctgaattccacaagctacaatctttctgatctttatacgtaaaattctttgttagcattggttgcttctgtattaaaaacacaattagctcgagttttttttcaacaatgtctcgaaaagtaggtgaagctcaacctgacgatggcgactctgtcccagtattgcagcctatcagaattcccaaacctgctgaagataacgataagaaggtatgttttatgttctgctcgattcctccaatacccagattttattttctttcttgagtataaatttctggtgttgaatatagggaattatgttctatcaaaata

SEQ ID NO: 62327 - DNA, 912 bp, Cannabis sativa
  modified_base (291)..(291): a, c, t, g, unknown or other
tttacagaaattaaacctattttttttatctaaactactcttttctttttttgttattttattaaaaactaattattttattagaagcagcagaaaaaaagttcagtttcatcaacatcatccttaaaaaaaataatacaaaaaattataatctaaataatacaaactttaaaaatcaatttcatcaacattgaaaaaaactaataatttcatttgaagaataaaaaaaatagtttcatcaaaaagataatgaaaaaaattataatctaaaaacgatactaactttaaaanccagtttcatcaatattaaaagaatctagttattttattaaaagaggcaaaaaatagtttcatcaataacataatgaaaaatacacaatgcttaataaccaaacttttataaacgatactaaatttaaaaaccagtttcgaacttataaattttataacaatacctaataaccaaacttttaacttcattttttattttggcatttatctttttatttagttcctctaaaaccagagttgatttaagcatacaatatgcaacaaatataacaaagaaagagagaaaaaaaaaattaaagacaaaatgcataaaaatcatgaaaaaaaaaaacagtagaatgtgagaaactagttaataaaataaccaaaataaaaataaacaagtaaaaactagttttctgaaataatcaaataaaaaaattaaaacttaaaactcaattatgaacaacaataaaaaaaaaaaatcagttatgaaaactcgttacttaaaataatcagctatgaaaataataaaataatatatgggtgaggaactgattatttaaaataaaacaaaaactgttgttcaaatatcatacaataataaaaatgattttatacaaattaaaaaatatacaataa

SEQ ID NO: 62328 - DNA, 1050 bp, Cannabis sativa
ggacaaggacacggaaactcatatcactttacaatcaaatatagatacatgaagagggaaaatgggaaaatgagagtaaggtttagggttttagaaagggggttaccatttggaagcggaataaaggcatcgatcactaagctgacgaatagcagttcgaagctcattcctgcagctctctgtcgaactcatctctctcactctcttactatgtctctcttactcactttctgagagaaggctcccgcatttgctgaaacttcaaaatcaagtgtgagcgcctttaattttatttttgaaaaaaacccattttttcacaaattccattcattcctatggtggttattagaaaataaagaaatatggacaagatttttttttttagggaaaaatatggacaagaattaaaggggaaagagtccattattctccaaacacacaaaagagtaaacacaagaaataactgtaatactcttttaatgaaccgcatattaacaattcaaaattgcaaaactcactgcaccgtgcggtttagaaaaagttcaaattgcgatcgcactgcaaaaaaatttaaaccgcatttttttgcttacggtgcgggcggttcgagcagtttgataaaaatcctactagttaggatgtcaacatgggtgctgggtgaaacctttggtgctcaggttgacttccaaggtgtaggttcatgtaatttcaactctcgggacctggatttagttgctccatgttttcatggtacaaaatactaaaatatagtgagttggaaacgagttatcaaagtcctaacttccatttcagagttctcgaagttaacttggacgcatggctaaggaccagtcccaggtcgactattatgactcggaactacttaactctgagatgtcatcttttttgccacgtgtcaaacattgatgtccatgctagtagggagagtttttgggttagcatttgcccctcaagtcaactttacacttgtgtagagttaacttgatgacgtgaaccgagcccgtttctcttgaaactaccagatgggca

SEQ ID NO: 62329 - DNA, 1032 bp, Cannabis sativa
agtgggtcacatgaagaggaattatccacagctgctaccaccaaagcaaaagaaggatgatacacctgctcctactcgggtttttaccctgactcaggtcgaggctgatgctggcccttccactgtgacaggtcagctttctattgctggtactttattgactattctgattgattctggtgcggcacattcttatatttcaagtagaataattgagaaattgaatgggcctagtgatgtacttgctagaggctttggaactttattggctactggagagttggttatctccggcaggtgggttcgatcccttccagtaattgtggaaggaagggagttatcagttgatctgataaaactaaacttggaggactttgacgttattttgggcattgattggcttgctaaatataacgccattattgatttcaaaaaaagatggtaacttttcagtctgaggacgcggacccctttgtatttgtgggtaagatgcagggatctcaggttcccttaatgtcagtgcttaaggcaagagatttgttgtgtgaggggcgcattggtttcttcgcaaatgttgtggatattactagggaaccactagcgcgaccgaagcatgttccagtggttcgtgaatttctggatgtttttccaaaagagttactggggttaccaccaaaacgtgaaattgattttgagattgatctaataccaggggcagagcctgtatcaagagctccctacatgatggcacctgttgagctgaaagagttaaaagtgcaattacaggggatagtggatttaaaatttacaagactaagtacctcaccttggggtgcaccaatttttttgtgaaaaagatggatggaactttacgaatgtgcattgactaccgggagttgaataagttaacagtgaagaacaagtatcctctgcaaaggattgatgacctattcaatcagctacaggggaagaccgtcttctccaagatcgatctatgatctggttattgccagtttagaatttgggaagagg

SEQ ID NO: 62330 - DNA, 974 bp, Cannabis sativa
taaatgatattaaatatatttccagaatatacctttcataattattaattaatctcatacataaaccttaattatttaataattcaaggtattaatcatatgcggtctttacagttacactgccacttttttaataggttcggttacagtgcaatagaggaaaaaaaccaaatttttttagtggatagatttaagtattgaaaatagaagattttaaaagaaaaatagggcaaaatggtgtagaaatgagggagatatagaattttttaggagtggttggtgagggtttcgtcgtgggttaggttctgctatggtggctggttggtttcgtgctgaaaaagaagaagacgaagcttcagggtttttctatataaccctatggcgtcggttattaggaaataaccgacggcatagggcacacgtgtcagtaaaggtatgcacctatatgatctgttatttcctaataaccgatgccatagggttaataaataagcctaaaaatttcccaacccacaactgactctatagggtatagttaattttatacctacgatttttactaaaaaaactgcctctaaatatcaattttgaactagtcgggtatgatcgcaccctttagcttccctttttataaaattggttgaaaaaacagcctctaaaggcctatattgtagtagtgccaatgccgcgataaatctagggaattaaataatttgaaacatataaatcacaattatttgaggaaattacattctatacccactttactttacgtgttttaatatacctctatttttatattttttaaaatatacacacttttataaataatgtccctattagactccttaagttaatgtaaattatatgctaaatttaagtagagagtgagagtttattagacaatccattcaaaaaagtgagtatattttaataaaatacaatatgagagtatttagatcggaagagcggtt

SEQ ID NO: 62331 - DNA, 624 bp, Cannabis sativa
aaacaacctcctattttttgtggtattttcttaaaaatatcattttttgttgttttcttgatatttagtgtattgttatgctatttattgataggtaaacttttagttttatgtttaagtctctgaaaagcgatttaacgtatcacttgtcatttttacataattgtgactgaggagcctgtaaatcgtccaacaatagttctactcaagttgatcggcacacctgaactcggaatcaaggtaagattagtgtaataatattatatgcgattacatatttagcgtgtatgtttatgaatgcctaatagataacatatcagttttgacaattttaatgtacgtagagttgcatgaataccgatgaatatatgtttggcatagtacgaattcgtgctatgacatcggtatgactagagtactgagtataggttgatattatggttaattgtattgtcatacacacgttctagactcaataagcatgggacacgagatagcattgtaattgggtgtatggactcctagttataatcaagtttatgtttatgctatgattatacttttcttactgagtctaccgactcacagatattgtttatctgtgtaggtaaaggcaaatctaag

SEQ ID NO: 62332 - DNA, 735 bp, Cannabis sativa
tttgaacaaaagagtgattggagagattttcaatactaattaattatttaagctctaacatgggtgattgatttcacatggacaatatatcaaacaaaatcaccattaaatcccatttcaaagttaagtaacctatttggattaatttgtttattaatcatcagaactaagaaaccagattaatacaatagaaaccatttagaaggaccacatttctaaacaaaaaaaaatgtatatatttgaagatattttgaatcaaaattttcaatggctagttgttgaagctcctcctcaaaagtccacaaaacaacaaaaatgatttactagactgaatattttgtcatccatcttaaaacaacccactaagctattaaaaaatggcttttttttttgtcttatcattatttttataccaatatgaaaagaaacattgatgaagatagccaggttcacatcagtggcaaataagaatatgataaaatatttcaaaatggaacagcaaaattcagcagaaaaaagctataaaaaaaaagtccaagaatatggcataattaaaaaatttgattacctatttgtgggaccttatagaagaaacaaactaagtttggtcactattgaaaggttagttcgatctcttattatagcaaagaaatatataactctatatttatctgtgcttcaatgatttttcaagtattatctaattggatatatttctagcatatcatatatata

SEQ ID NO: 62333 - DNA, 804 bp, Cannabis sativa
aattaatcacaaccatttaataataatccaacggcttaaaaaaatgtaaccatgatagttacaataaaaatgtaaccattgaaacctcttccgtagttatatatatctttcatagtatgaatgtataatactatttaaaattatttatttattttaaaaaatatatatactgtaattataatatatatttataataaaaaaaataatatttatatacattattattgcggattgaaaggaaaaagttttattgatattgaatgaatgaattaaaatacaatgaataaaggccttataaaggctgccaaaaagggaaaactaaatcccataaaatcagggattgtatcccatgaaaaccggactgtaacaactgtaacaacctacctaagctaaatacaaatacaaccagtaaaaggaaaagagcagaggagtgtgagctataaacagtattcttgttaattattaactttagtgtaattattaaattatatagaataaagattaaagttcaaattttactaatagtattctttttttttttcttttaaagtttatttttatctttatcttataaaaaaaaaaacttctcactttaaattccgaatctggccaggaactttatatgaccaaaaatcaaatgccttataatatatttattaatttatataaatgaaattaaccagtcaaagttagagtactactactacaacatatatatgtatatatatactagaagaaagttacgtgcaaggcacgtatacttagttttatgttaagtgttctataatttaattgagaaagatt

SEQ ID NO: 62334 - DNA, 3153 bp, Cannabis sativa
agattgttcaatatgtcaaacttgaactaacttgaacttgaaggaaggtgtgaaacttgtatatataactttgtttttctttttttaatcataattttgtcatattgtggtttttgtttaaaataattaattaaaaatcttaaagaaacaaccttgttattttaaaagattattaaatttagcatagagatctaaaaaaacataagctatgtatataattaaatatttaagaataagaaagggctttttcttttttatgcaaaataaaaaatattggaaatactttttagggtttgactttgacctaagaatttgaacaatattcaattagatcatagcttaataaaaattaaaaaaaaatcccattttttttttttaattaagcccacatcttaagcttacaatttacattttcattaaaaaaaattgtttatgtcttgttttgttctaccaatgtttgtacacgatggataaaaaattaattaatagtacctagtatttatataatgtaaggaatcattttcatatacaaagtaaattttatatatattatgacaactcacatttttcttcaataataaataaataatttgtgatttcttaattatatatattatgacaactcacatttttcttcaataataaataaataatttgtgatttcttaataagtaaaatagagtaaaaaatggggtagctcaaataatcacatggttaatttgttattcaagtatgaagcttcttaggtagagcaaaactctttaccatgggagagttttttgtttttggtatagaaatcatactttaattttttatattgtaattataaattttattaatttttaaaaaattctaaataaattattgcgtaaaaaataaaatttaaaataatcacatataaacttattaaaatatttatatatatgtaattcactattaatcatatttttaaagggaatcatcccatataatataatatgtcattaggaatggaaatgaggtaggtaatagacgaggggtgttaccctgtccccattcccttaactattttaatacccatcctcgcctcgattcatgcatattttctattggagtcggggcggagaatcccactaatattcattcatggggacccatatatttagtcacaaaaaaagttataaatagaaaaaataaattatttaaacttaaataaaaatatttaaaaatttactaacaaattacaaaaacatgtaaagatatatgtgtaataataagttttaaatagcttaagaccgattctaattttaaatgaggcgtgtaattactttatagaggttttatgtagtttcgttcatagttattggtatattttaatatcgagtctcatatattttgatttaatatagtgtcaagcaacaatagataagctatctgaaccatatggcataacgaaattgattgggaggtttctcaagcaaccgagcaataattttgtcgacctaccgaccaatctcactgtgctaatagatctgattaattctccggcaactcatctggatgtatagtattgttgatagaattatgttttcttattattttaaactaaatacaatgtgattaacatgttttattactagatacaatgtgattaaaatgttttattttaaataatataaagttactatatttcaaaataagtaagaaaagttgctaagtcataattagtcaatggttgttgttaatgagaaagtactagtcaatttggcaaatacaaaatgctaatcaatttgataatagaatacaaatactatacaatgggattgccaaaatatacaagttgggtagctaggttacctaaatacaatatttattgagaaaataaggacaagtcatatagattgatatagtataagatacgtctacaatacatttctaaaagaatattttgatatttagaaaaaaaaaattagtttaatttttttataatcgtgtatgttatagttatttaagactatctgtaattatttttttaaaaaaatcaaataatttataatatcgaaaataagatttagttaaacatatgttttttcttatatacatggtaggtatctatttaaattttattttcggtattataaactatttaaaatttaaaaaatttataagtaatcttaaataactacaacgtatgtaattataaaaataaatagaccaaaaaatatttctgaatgccaaaattgacaaaaaaaaaaaaatttactggaataatcatttaagaaatcttcaacataattttcattttcatgtagtataattttatattaaaaagatgtttgaagaggggcaagtggggttccaaagaaagaaaggtagcatagttaggtggtaatttcaagaaataacaaaggaatctaccattttgatgctattattaaatatactttaataatactataattttttaatagtgaagagtttattaaaatagccactcatgatagatgattagatgatgataaagaatgactttttgtgatgataaaaaaaatgaatgataagagagagtgtatatggcccacatggatccacgtcatcaagggttatccactaggatgcctagttgtaatttgtaaagcttactcaattctttcattcttgtgaactagaattagtctcatctcatatttatatttttcactagcaaactttctagataagaacaacacaattttttttctacttttctttgtagaaataaaccaaaaatattccttctaaagaatgacaaatttttacaataataagaaaattctgtgacaacatacattaaaaatgatttcttttatatgacgtttacatttagaaatttaatacgttcttaataggataaaatttcttacttaaatagagaatagagtgaagattggaattatattttatctttgaatattaaacggagtgcggatagggatagcatccccgccaccaggagacccgtttaatttttatttattttataaaattattttctaagataattactctacttaaattttaggctaatttagatttttactccctgaattttaacatttgaactttttgaattgttaaaaatccctcgagctattaaaattgttagatttaagaatttttgtctaattttactaa

SEQ ID NO: 62335 - DNA, 807 bp, Cannabis sativa
tcaacctccagctgggtaaattttgacctgtttcagccacgtgggtccaacgaacccaacccaaacctaaccgaaaaagctaattttgacgatcaaattgcgtgttttcaaatctgaaatgttctgaatccaataataaagagatccagatagattttatgtacgaaaacacgaaaaaaaaatataaacttaaatatcataaagttaagtcgggtctgaaaaggtttttactgaatttttttatctttgagtttttcaaatgattttcacatgcttagatcgatctataatactatacgaatatagtaatatatatagaattcgaaataaataccgaaaatgaaaaacagaaaaaaccaacaatcagaccgaaaaactccaatcatgtttatatatatatacatgtatatagcacataaagacattataaatgtatggaagaaaatattatatacatttttatgcaataaaatcatatattcaatgtataatatataaaaacacatatgaatgaaatatatacgtatacattaaaacatacacgtatatagcatatatataagtaaatatatatgtatatacgtagataaaaatatataatcgtatgaatatatatatgtatatataaatgaaactcaaataaaattaaggcagagactaaaccactctgataccaactgttagacttttatatgtatgaattatgaaaatatgtatgtgtatataaaaatgcggaataaacaaatatatacactatataacttaaggatccaaatacctccagccattgattctttgagcttcaat

SEQ ID NO: 62336 - DNA, 1040 bp, Cannabis sativa
aagggattgtgtgagaatccttcttgaatgagaagagcatcggacaatttcttgtaccattgccgggaagattggcaaaatccatatatcgacttgtgaagtttgcacaccaagttggaatttgtggaaatagaagaattaagtgttaaaccaggtggaaattgcatgtagacctcttcattgaggtctccattcaagaaggcattattaatgtctatttgcaacatgtgccattgttttatagtagaaacggcaagaagcaatttaaaagtgaccattttggccacaggggagaaagtatcaaaaaaagctaggccttcttgttgagtgtatccttgagcaacgagtctagctttgtttcttataacagatccatcactattgaatttgattttataaacccaacgacagtcaatggcttttttccctggcggaagaggaaccacaatccatgttttattatttttgaggccaattaattcagcattcatggcatcaagccattgctgaaattgaattgcttgcttgtaggtccgaggctcttttaatgaagtcactgcaaggataaaagccttgtatgagttagcaagtctagtataataaatatacttatcaaggtaatgtgaggtagaggagtgatcctgaattgttgaatagcattcgaaatctttgagataaccaagtttttttgagagtcgggtagatcttctaggtactgttggaggttcatttgaagtggctggtggagaaactgcaaactaatatatataatacataagcaccgactcaacctaaaggaaataacagctaactaaagttagttgattagcaagaatcaagactaacaatataacaaactctaacactaaccaaccgaaataccggttataactagcaacacagtaacagtaaagatacagtaggaaaacagagttataaacttattattgttagaatttggggataaaaagaatggggttctatctcaaaaccaattggtaatgggaggagtagcctattcatcttatatatcacaattt

SEQ ID NO: 62337 - DNA, 622 bp, Cannabis sativa
aggaagctcttatcatgatatggggcttcaaggaacaaacacatcacaacagaatcattccacactgcaaggagcccataataatcatagaaggaatcattaacggcaagtaaaggttcaaaatctggaaaatctatcacacaaaatacctcactactcatatcaaaactgaggatcttttcaattccaaatcgggtaatacacgagtaacaaacacctctaaaacatacaccacgttgtaattcacaacccacaatatcatccattaaatcttgagacatgttgatcactctccaagaatcagaacccaatgtgtatacctcaacttgacattgttttttgtaaccaagggaaatggaaacacatttgtatttgttgtttctagaatcgtgttcaaatcctatgtactgatgacgaggcgtaaatgtaacattctttggttttgggagaatcatagattctttcaaaactggattacataacaccatagttacagtcttcttgaaactataatttactagcaaaaggagtccatcacagtgatatattctatcccatcgattcatatccaaaagtagtatagtcagatccgctgtggcagttcttaaatgatccttcttac

SEQ ID NO: 62338 - DNA, 1193 bp, Cannabis sativa
tgaaaaatttgaaggtttaggactggacataagattacccaatttataagttacaaaattgatagaaattatggcagttttgattctgtgtataaatcaattaactaagtagttagttaaattggttatgacaattagtaattaagtcttgctttgttaattatgttattaaatctttagtaacttgtattgtactctgttcattataaataaagaggtacaaactaaccgaattggttaagcttttggagcattttgtctcttcttctatttgctttatgttcttggttctctggtttgtaccacttttttactggcattgtttaaaggtctacatataaaccaaattaactgattagttagttttatttggttatggcagttagtagttaagtgttgttttgttaattctgttattaaacctttagcaacttgtagtgcattctgttcaatataaataaaaaggtacaagctaaccaaattggttaagcttcttaggcattatgtctcttcttgtttgttctttatgttcttgtttgtcttcttctttggcattgtgattgacattgttctgtcgcatgttttacggtcctttatatttccaacaatagttaggggcaactgtttttcccccaacaattacttacatttagtgttacattgtgattcattgatttgcttacttaggctagtttgtagtagagtggttaatagatcctattccattcaccccttttgtttgtgcaaagttttgactctttggagtagttgaacaatgccttgtaagcaaagttttttgtgtgttaatcatcatatgtttttatttgttgtctatgttgtgtttcaagtctaaattcgtggaatgcttttgtttggtttaattttaaagttttggaattcatttaattgaaatgactttcacatcattttaatgtacttaaatgtgtaacaggtgagaagattaaaactaaaccgatgagttttgcactctctattaatctgtgattagagttgtcttgtttaaggattataatttgtttcaaaaagtactattgttgtaaatactatttgaattaagttgttttgagtgactttaggtgatgataatatacgattttaaatgtgtagtagaacttctattgctctattatttttctatagtttatttgctgaaatatgtaatcattaactgt

SEQ ID NO: 62339 - DNA, 1714 bp, Cannabis sativa
agaaccgttaagaaataagtgagaggtgttaaataagctatcaagaagctagacaactatgtttggccagccaaggggagtacataggccagccaggatgaacttatatggtcggccaggatttgagcacaagctggctgaccaaaggtgattatcagaccaagaaaaagctcgttctaccaaggaagccttgacctctgcaaagaaagtggtacaaaggccgtcaatcccccacaaaggtttgccatcacctacaaagtttggccatcacctacaaaggctggccaatacatgcaaaggcttgaaagcccttgatgtgcaaccaacataccttggcaggcacatggccgaccagaccatggtaggagcatggctggctagccttttcttggcaagcctttaatgcgtagccttcatctgtggatagcaagctaagtggcgagttcgaccttgacaacccacataaatagggacaaaatattagcaacttccttattttttaaggataattatcctatttattatttaattatgtaaataaggctttatcttcctattttcaagggatataagtggttaatattcatgtaagctttactatataaagagaattagtctaaccctagttgtctaagtctaaagtcctaagcctatagactctaagtctttagctctctaagctctaaactctaagtctaaaactcacttctctcttcacctctctctcacgtgcccaagaatccttctcactagagatttgcaacctttgatactcacattttaatcttaagagagccactccagatctcattgctattgtgatctgagtggtattatctctagtatcaatacaactaaaaggagagtaggtccttaccctctaactaaatggggtgaacctctataaaatctagtgtctattttactttattattcttattgtgtaacatgtgacaagcataagtattaaatacggctctactgtcaattagccaaatctgaggtcaacacatcctaatatgtaaaatcatcctcaacctctagactcactggtgctcagccttctcctttcctttacctacacatgtaaacatatttgtgagtcaaaaaactcagtaagaaaagcataaaacatataacatattactgacttgtatttaggcacatgtacacctatctacaaggctaaacaaatgattaagaatgtttttcacagaagtatgacctctataccacgtgcactaagtactcatcccgtactagtgttggttgagctaaatcgcaactcgagtacaactgagtgttgaatcacacacactctgtactcgtcctatactagtgttggtaatgttttgtcataccccttaacatcatatattgtaccaatgcactccgtaccgcaaccgcactagtggttgtagtatataaatcacataatacaacatgcacataacatacatacatatacacatatacatatcttatattaatcttaccttatttcctaattcaagtgcgtcgatcaacctgaatggaaattttcttgttgaacggaggccctaagtcacaaccacacaaaatgtgtaaacaaattgctaaaaccttttttaggacctaaattcaaaactagaagtttccctatctataaatagcatggcaatacctgaaatatcgaggaaacacaaaaacgagacttcaaaaaactacttgaaaa

SEQ ID NO: 62340 - DNA, 502 bp, Cannabis sativa
atatatagttctaaataattataatatttatacgatcataaaaagatagattaaaaaattctattaaataccaaaacatgagataaaaaaatttaccgaaataatcttttagaaggtgtgtagttagtatatagacatatttatgtatgtaaataatcacagcattatataaatggatcgaaagatgaaggaaggaacccctttgattaatattggttaaacaattaattaattagttgagaatgtttggctcaagcatcagtaccaaaccaaccaattatatatataaacaaataaattaactaatataattaatatatattaattgatattttgagtgatgtgtctctaaattattattactacatttttctagtacttattataattatctacgtcatattttttaagatattaacgtgattattacatattattataacatgatgaattatgctttaattaattaatcttaatcatatatgcaatatatatatatata

SEQ ID NO: 62341 - DNA, 3188 bp, Cannabis sativa
  modified_base (2807)..(2821): a, c, t, g, unknown or other
agtaattcttgaggtcaagtaagatattgttattattgttacattgatattttttagtattttaattttttttttctaaagtaacatcttaattagaatataatttatttattcttggatgaaagttttactttataattatataccattaagttaaaataccaaaaaaaaaaaaaaattgtgaaacatttctcgcatgcgcaaattatattcaactaaagacaaaccaaaactaatgaaggtggatttgattgatcagttggtggctgttaagggaaaaaaagtggtagaggcttatcctttcggcatctcctaaaatacgaacaagactagtttttgtttttacctccataggtctacatctacaatattccaaaccaatacaaattggccttctatcgatatccagacagattttgaggaaatatataaattggtcagatattattacattcaaaattatgtataaaataaaaaattaagagccaatttagcacaactctaatatggaaaaaataattatagttgtgtggtaagaaaaattaactttaagaaatttgtgaaaaaactttcactaattatttgttaaattataaattttaaaatgatgtaagttgttaagatattattataattacaataatattataatctaattcattatatataatcataaatatataaaaaaatatatgatataattttttttattattattacatatttttaattattttcttataatataaatttatatagatttgataaaaataatttataatatttttacattatatttttttatttaaaaaaatttaagttgaagtgatttgtttataataaaataaaaatatttaaaataaaatttaaatattatttattttaaatattttatttcttcaaaaaatctataataaataattaaatataattttaatataaaataatttattatagtcttttagcaaaaataagttttttctaactttaatttttaactatattttttctataaattgttcaataaattattttttaactacaattgtcaaacatttttctatcacaacaattatgcaaacgaatcctatgtgtagattaactactacaattttatgatctcttacacttgtttatgtgagatttgattggactacaacagtgctacaattcaacaataaaatagagttacatatctaccctcatatatatatatatatacataattatatattcgtagacctataaatatgtcgagttctaccccttttactccacactactcattccaatccaaattaaccaattaatatccatggctttcaacaagggttttctcgtgttgctactgttgccacttgtggctgcaacagcacatgctcgtgtagatcttatggggctttttgttaatgatcattctgatcccttttgtccaccacctggtcagtttctttctttttttttttcctccatcaacgaccaaaaggctttacttttgacacaatatcatcatcatatgatttttaacataaatattgctcacataataatatacaattgttcaaattacacaatggtagtaacttataaatcaaatgttatcatgatattaaagaataactaaaaagataggattatggcaatatagttgaaatcgtggtatttcataaaaacatgatattaaagaacaactaaaaaatatgattatgacaacataactgatactggtgtctcataaaaataagttatgatagtactagtcaaatattattgaattactactatatatatattttattaataaaaatgaaaatatgtttccaactgttaacagtagttttttttttttcttcacatattttgtaattaatatattcctttacaggaccgacaatatgtgtaagttgtgaatgtaaggtagaagctggggagttggtgtgtgttcgtagtgattcgagaaagggaaagtgtccatcaaactgcagtgaaagttgcgcctgtgacaggtctcgttgccctcgttgttggtgcaactataaggttgtgggatgcccaaaaatctgccccccacctagtatcaccaccgcccaagttgcatttgagaatcttctcactttcaagacaggctaagtaattaacagtgcagatgttgtgctttgtcttataaattaatcatcttattacctatggatctactctatgtttgctaagctttgcatcaaccactactattgttgatgcttgtctctattcaaaatctgtaagattgtctactaaataaaatgcaaactgttggtatttactttgaacttttaacctttaaaaatcatgttataagttgccacaaaagattgttacgaaatgttatgatcaaatatttggggcaaaggatgattatcaaatggataaatctatatctataacatatgtataatgatgaagtttcattctaaaatttgtcttcttctagaatctttctattttgtgtttttgtgtctattctataccatttatataggtaaacttccttttaaattttggttcatgtaatgtatttttaatttagtgtggttgctttattttatagtagacaactaatccgtccagtttgtaatttttttaggttgttaaatctttaaattgaatgagtgagatatgatgatataaaatataaaatatagcaaagaattctgaactaacatatttatcatatataaaatgtggaagaatttttggtttaacgattccttttggatttttacgttaacaagttttctattaattaacagaatattttttattaattnnnnnnnnnnnnnnnatatatttaaaaataaaaattagataagtaaaccaaataattttatttattccctttttaattctctaatttttctttttttttttaaattaatattaataattaattaaacaccaaagccaacttaagaatttagtctaatctcatcaaataattgtttaatatttatcacctcacaaattatatgcatgttgtcaaatctaatggccaaaatttgtctgaactagctacgcaaataacatgtatatataaatataaggaggatgttttaatagttacatttttattgtaaccattatggttatattttttgtagtcattggatcactattaaatggttgtgatttatttaaaaattaaataaaaa

SEQ ID NO: 62342 - DNA, 503 bp, Cannabis sativa
caaagcaaattcgggtaattgcttgtagttggggatctttgaggcttttgcaaaacttgagtttttttttttttaattcttgtttttttagctatggcgttactagattcaatattaagttggtgacttttgtaattgtagtcggttaaaaatttaaatgacttaatgtcaaggaataattaatcaagtcgtatactgttgaaaatagattcgagttagatataattattttcattgttgcttaatatggatgattgatgtgtaagtgtatttcttctggacgatagctgcctctcaaaaggcacgatagggcacatgatcaatattcataatcattgcatgttgaaagaaaaaagttatgctattgcatatgagtttttttttttatgcacataaaataaattattttaaatataatttatgtattgtaaattaataaaataaccacaattaaaaaaacacgacgaggacttttatgggtgcaccatagaaaacactcgtta

SEQ ID NO: 62343 - DNA, 745 bp, Cannabis sativa
gagagaaacctctcttttgctggttgatatatagtgggccgaaccactttagtgagaagatcatttttgacttgtgttgactctttcttgttgggctctttgtgtttgggcctaaaacaaatattgcatttgttattttgaataataccaattattttgtagatgcataaaataataattttagaaaaataccaatttgcatatagtattaatttgtttctttaagtgtgttggtcaaaacaaaaatttcaacactaatattttttaaattaatatttatagttaaattgtttagtaaccatgaatgggtaatacccatttagaagtattccatttatatatatatatttattctcatatgctcttacataagtttttaattttttggttttgtattttgtgcatgtaacatagaattatgctttatacatgcagttaattagtagtttagggtatataggattatttattatgtgtgttctatcatattagaggtcattaatttgtgagtgtatatatttttttaccatgaatacttttgacttttgtagtcacttgtggtttgtgcatgtcaagttctagttactcttggcaaagttgaaatatgcaagagtgattggaggtaatgaaatggaatgaaaagaaaaggaaacaattttcattctattcgtttatttagttgcatattaaagtattggaatgtcattctaatggagtgatcacctttctactattttggtggaat

SEQ ID NO: 62344 - DNA, 687 bp, Cannabis sativa
ttgtttggggaaacctagtgcaaaccgattaactagtttgccaggtcctgtaaaactggtaagccggtttcgggataggtttctcgaaaaatccatttcttcgattcgtgtctatttcagagccttggttgggtgattccttgttggaggtttgggtttccctgattagggcttttgcatgttatttacctgattatgttatgtgattagggcatccatccagcacaaggttttccattcagctcggccaactcacttgaattcaaaaatgaggtaagaatagcgtagaacatatgatatttttatatatatgcgaatgtatgtatgtgtgaaatatatatatatatgcatgcttgttatgcttagtagactaccaaaacttgtacgaaagtggtacagagtgtcttggtatagtgtacaatatttaagagcacgttacagtgttaccagcacaagtacggaaaagtacagggtgtgtgtggcatagcacttagtggtactctaggtacaaaataaatcctacaccaacactcgaacaatgtcggtacgtagtgtatgtggtacagtggttgtaccctagtaaagattgttcttgctcatttgttaagccttctaaataggtgtatgggcacctgttgctaatatttataatcactacgcaagtatacgcaatcaagtagtaaactc

SEQ ID NO: 62345 - DNA, 1139 bp, Cannabis sativa
  modified_base (684)..(685): a, c, t, g, unknown or other
  modified_base (1043)..(1045): a, c, t, g, unknown or other
aaaaattaagcataaaaactcaatttttttaatattacccattcatgggtaatacccattaagagtgcacctatatataggcggcaaattttgtacccaaaattagaaaacacggaatgtaatccgttgtacggtaggtgggtctcacggtatctaaaaatgtgtttgaatttatttatttatttgacaaccgattgttgtagttttgtttgtcggttgtcaatttaattttttaattaaaaaataaaagggacaatcaatttactatttgtggtaggtaaggtacgaaaaagtacaacgaagttactgtttggagtagttaatagtacaaacgtattgcagatagtgggtccatgttgttggagtgaggttattttcatcttttcattccttcatatcttctgcatgtttgtgcgatggtagttaagtatattatatcatgcaccgtgtacatttattgtttctacatgatgttgagtaaaacttgtgtacaaaatatcacgtactgagtacgttcatttatgttttgtagtacattggtaagaaaaatttcttataactcatgaaattatgtgttgttatatattaatttttacattggtgtatttattttattttaattattttttatattaaaaattaccataaaaatatttttttttcaccttataagattgatttttnnacctaaaataatttagttgttcatcaataataatttagagatttgttgaagatgagataattaccttaaacacccaagcataacatgaagtaaataaaattaggatttttgaagcaatgattagtgtcataaaagttaaaacatcaattggaaaaatagctagtaatatgaatcactatagtatgactcttgtgtggaggcaggcgagtccgggaaatacgcgttggagtggtcatcgaatgagtcacatcttgctcgattgtttgcagattgttgcccctgagatccattattctgttgacggtttgggcaccaacgataatcatggtttgatgagcgacaaatgcgacaatgtctnnngtttcttgggatctactccccgtttggtccttctcttggatttcttgtaccctttgttctcacaacttcggggtctttaataatattggggttg

SEQ ID NO: 62346 - DNA, 2350 bp, Cannabis sativa
gaataaccattaaaaatacacctatttctattgagccacatgttgtaaatcactactgccaaaatggtgatattgagctgataaatccgagtatgacctgtcataataacccaatcataccagtcagtataagcaatcgccaaacccccgtatcccatccaagcaaaaatcaaatccagaacttttcaagataacacacagttaaaaaatagatgctcatgggattcctccacctcatcgggcatttgatcgagctaagaacaatgtgaaaccgagacatcttgtccctgataaggagatgagcattcatcacttgccataagataaatctatgttttggcacagataaagaacaccaaccaaccttgtaataattgatcgggctttgaaccaatctattatgtacaaccaattggttttaaactgacctgaagcaccagctttcactatctcattttgctcaaatttcttccttagatgacacaatttatgccagtactagctcgaatctggttttagattataagaccaaaagctaatagatttcaagtagatattatctacccacttaacccacaacaggtcttgttttgtggaaatcgcccaaatatatttagcaaggatagcctggttctatttgacaccatctttaaatccaaggccaccatatgccttcggaaggcaaactttatcccaggaggcaatgtgaatcttactcatatgtccattcattccccaaagaaatcttctacatagtttttcaccctccttagtaatactatggggaagaacaaaaatgctcatccaataatttcgaaggcctagtaacacagaatgaatcaattgcactttaccaacaaatgaaagatgcctgctcgaccaggtatgtagtctttgttttatcttttttatgatggtgctacagccgtcagctttccattttgttggcctaagaggaactcctaagtatttgagggagaatgtgccttcaactaactgaaaatctctaagaatagtttgtttgtcattggtgttcatgcctttaaagtagacttgagattggttagcattaatgtgcaatccagacaccttactaaattcattaagcacccatttaagaatcataactgaggggattgaacccttgctaaacagaattaagtcatcagcaaaacataggttaattattttcagccccttacacataggatggaacctataagaagagttagaagctgccaattgaagtcttctcgtgagatactccataatgagaacaaacagtagaggagagattgggtcaccttgtcttaaccctttctctcccttgaatttgccttgcactctaccattcataacaatcgaataagatgttgttcttaaacacaccataatccattgaataaacttctgaggaaggttataggcagctgacaaatcctccgaaaaatctcaactgacagtgtcatatgccttgcttatatcaattttgattgtgcatctcgaggagactaattttctcttatagttttttaggaggtccttaagaatcatcacattatgagtgatagacctgccttgaatgaaagctccttgattttgattgatcaaaccaaggagcataacagccagtctagagcataatagtttagatatatacttatagatcgtagagaaacacgcgataggtctaaagtctacaactttagtagggttctcattcttaggaataagagaaattagagttgaatggaattcaagaggaattttacctgtgttaaagaagtccttaacagtcgagcacaatttaaatccaatgttaggccatagcttcttgaaaaaactagatccgtacccttcagctcctggagatttaatatttggaatgctagaaaaaatagccttgatttccttggtcgagaattgtgtgagaagatcaaactgctagttcaaatcaagcctagctccgtggtcaaagcaggcaacaacaagcttactggagacctgacttctgctccccatgataccccgaaaatgagacataaagtgatcaacaactgtggggaaaattatcaataacttcaccttgatcattagtgaaagttgtgatgttgttctcaagctttctttttttaaacaagcatgaaaaaaggagctattttcatcccctttatgaagccaagttaccttgtttctcagccttaaaaagttgtgatacatcttttcttggttaagaaaattaacagcaacctccttctccaattcaagaaaaccagcttcctttggatgagcttgggcttgcatcctagcttcaaggtatttggtatttgaatcttgaaaagacttgcca

SEQ ID NO: 62347 - DNA, 2535 bp, Cannabis sativa
tgatgtatagtagaaaaagattactagaacaatgaaaaaagatgaatttagggaggaagatggtggttactgaaagttgatcaagaagacaaaagaaaaaaaatcacaataaaataactgcctcagagcatttagtggacagacgctcatatattgttttaatgtggatttataacaacaaagtaaaaacaattggtaaatgatttatttattaataagtcaaagtttcatagcaatattgcaatgagttgagaaaatggtataattcgatacaataatatatatttcaaactaaataatagtctattaatttataattagggatgcacacgggacagaaaatttgcaaggagtgctcccctgtcctcatccacgttaagaattttaatcctcattcttgcttattccccatcgaggatgggacgggaaatccccctaataggggcggagacggaacggaaaatctcctaataaaaaataaaatttataataaaaattttaatatataaaaattaaaatattacacattaattattatttaataaattaattattatccaaaacacaacttaaaaattcataaaaaaaatattaatatacgaaaaaaaatgcaaacataaattataatatattactaaaatataagataaaatactaaacgggtctccatcggtacggggagtgtgatctccgtctctgccttgtttaacattcgaggacaaaaagtaatctccgtccccacctcgtttcccatttagacatagaattcccactccattaaaagcgggtccccgcagggctatccccttaagaaaaatatgcatccctatttataattgagcactattatatttggattatattacttttttctgcagcaaaatctaaatataatttagcaaaacataatatgatccacaggaattaatataaagtatatatttttgtcgactaaaattataaacaaaaaaaaaaaacagatgggtaaaatattcatcttaattttgatttaaaaatgtacaaaatacaagtacatacattacatacgtacacatatgtataaactacagtatacatacaaaaaaaaaagagagaattaattaagattatgaaaatctaattatgatgatcagtctcttaatcatatatatatatatgattcttacagaaaatcattaccagaataaacttctttcattctgaacctctgttgacgagcaataaaagattcaactttgagtttaaactcttcactactcatcttatcttcaggatacaataaccctaatttaccattttcatcatcattcttcttcatcttcttcccaaaattctctgtctcagatctcttcagctcactattattagtcttctttggtgatcggatcacaatctctgaattactcctctcttcttattattattattatttttagtgactgacgtgttgatcgacgcaaaaagactattttcgggtactgaagattttattggtaaagtactactgactaataagttctgatgaacaatcttctgatgatcactactttttttaacgaattcgtcgtaaagatcgtactccggcgagatctttttcctgccggaatcttcaccggaatacttgccggacttgacgaaaagagtgatcacgataacatttccgacgacgaaaacgaagcgaggactcgagaggatgccggataattcccggagatatccgccggagtttttcacggctaccggaacgtggtggaaccaaatccgggagatcaggacgaggacgacgacgatctcgactaatctgaacaagttcgctagcttttttagctgattgtatcttagtatggcgttggctttctctgctttgatgttgtagaaattgatggaatccatttttgtccccaaaaaaaaaaataacaagcttcaatacttcttctgattcgggtcgggtttggaagtgaaccgggtcgggtttcggttactcactcgggtttgaggtaatattagcaaagaacatttataattgtaaaggagagaagagtgaagctactatgaaaatagtgggtttagtgaagattttagtgattggaagcatagaaaatatgatggaaaacaaaagaaaataatataatagagagaaaatgattgaactttctctttctctatagattttcttttgtgttttgtttgattttgttatgtgttttttttgggattagattgtgaaattgggtttttggagtgtctctgcttgtttgtgtatttatagtgttgttgtgatcaatttaagttttgggtgcatagaagggtaaattaggaatattaagtttggattctttggaatatattattgagcttttcttttttcctttcttttcttttttgaaaatattttatttattaatttgattaaaggaaagctttttgttttgaattatattccatgtgtcatctttatttgaagtttggtaatggctgtttgggtattattcgagtttctattatgctgttttgaaagctatgttctttctaaac

SEQ ID NO: 62348 - DNA, 1073 bp, Cannabis sativa
  modified_base (44)..(53): a, c, t, g, unknown or other
aatagttcagggggcattttcaatggccttaaaagttcaggggnnnnnnnnnngtacatgtcaaagttcagggggtaaaaatcctaattagtcaataaattatatacttcactaatttgccgcctatattaatctatcttcataaatcttaaagctttatctaagttaaataaattacatgcttcgtgaatttactacataggcaaaacagttaattatttagcgcttcgccttgattacatgtaatagatagattgagataattgattgcttcagctttatttacgagattaaaagtttgattgggaattgaaattacattcattaatagaaattaagaacgattattgagtgtgacgaataatctttaactagtttctcatatcgtaatctcacttttaatttgtttttattttatttatgctattttcttctaaacataaaaaccccttgttctaacttttgtcactaatttttaagtaattaattaaatataatcctcataaaatcgattcttacttacaattatactaaaataattagaggtattaaaaataaatatttacaaatttattgtagcttacaacaaacatcacaaaataatatataaattatatgatgttaaaaaccccaaccaaaaaaaaaaaaaaaaaaaaagaaaagaaaacgaccaacaacactctcaatcttcctaggtaataaattacatatttattctttgattcaaagataaacaatttacacttgaaaatagttactaatatattgtttagttagaggtaatgaaatggaacaaaaaagaaataatttttattttattcttttatttagttacattttaaagtattgaaatgtcattctaatagaatggtctttctaccatttaatggaatgattattccattttaaaatgaaaagaaagaccattcaaatacaagatttaaaaaaattaataatttttttttatcaatttttttaggacattttacaatgctgtatacattattttaattaattacaaaatatgtgcaaaaaaacttattgttgacttcgcttttagccaacgacaatga

SEQ ID NO: 62349 - DNA, 2196 bp, Cannabis sativa
ggaagttgcatacgttgttgtattcagtgaaatagatttaaactattcttcatttattataatttaatcttaatatttaatttgaaacagttgtataactgattgagttctatgtatctaaaaaaaaaaacttgctttgtatataaaggagtgatccaacatgaataaactaagacagaaattttttgtaatagtggactaagcagatcgtgatctgactaaaccactatacatccttgtcttcattgtttttcctaattttctattgtttgggcagtctcgttcgaatactcgctattttagattgagtactcgctacttttttcgttaaatattaatttttttattttctatttggtattgtctaaattcctccgacaacatttggcgccgtctgtgagaactttttcttttgattttggaggaaaatcaacatggttgcgaaccagacaaacagaaacaacaacacctgatctttcaatgtcggaacgatgaatgtcccacttagtgatggaactaatcttattgacacaatcaacgacgtgtgggacggaccaatgtcaagtgacccctctcaatttgttcccagaaaatgctggtcacgtgggggagacatcgacaccggcaaccattgtcggccacttcccgcctatcacaccaaccgtagcctctaaaggaattatctagctgatgataacacaatacacgaccatacaggaacaaatacgagcattgcaggctgaagttgatggaagagtgaggactcgacgtccaccccgagtcctgaacacgagtttaggaaatcctcaggtaaccaccacaactagacgatgaaatgagcgtcctaaaaataattgtattcccagggaatgtgtgaatgaacaagaatgtctcgatataaattagcccacacataactccacgcaaaatagggagccagtcgcacctgatgctagtcgtggaaatattggaagagaaaacagatcacaggagatggaccttgaaaggcaaaacccgtagagtcgcgcctaaccgcgagtagaggtaaatcatgaagaatcccattcatcttctactaacagccgctcccctagcatttatactaggccggggtccgttgagactcaacatggaggtaggaatcatgttcatagaggcgatctttacgatcatctcaatgagatttttaaggaacaatcccaaacactaaggaatcgcgatgatgacgagccccgtgatccccacgttggcgatcaaggcacacataacatgaacaactggactaatctagtcaacccatcgattgcaccagctgtgaccatagaagtaccaatccctgccaatatagccgtaatttctactataccagtggtaacacagaccaatcctgtcttaccggaaggtattgaccaagaaagcctcttgcgagcactacagatgattgagtagtagacaaagcccatctacaagctccatgggacatcaccatttatagaagaagtgagacatgtaatgttcccaaaaggttttaagttatctgaatcgctcaaatacaaaggtactactaacccaatcaattatttagataaatttaatacgattatagaggtagactaggtaccacaattggcgaaatgccgaatacttattagaaccttagaagataatgctcatgatttgtttagccaattacccgaggcctcgatatcaacatgggagacttttgtagacctattcttaacgcacttccaagccacggtgacgtgcaaactgtcgtacacaatgctggaaaatattaaatatgaagtcagtgagtctttacaggattactttaaagttttaaggttgagataaccaaggtcaagaaggctcccgagtcttcgctagtttgtatgttgattataggtgtttggccaagaattaacttttggatggagctacgagcgcagagacccaattcgttggttgaattctttgcaatggtcgaaccgcataaaataattgagaattctttggccgagttggaaagaggaaaggagaaacgcgagtctctagaggtcaaagcccaagaagacgtagtctatcaaggtggcagagtccaaagctcgccaaatccccttctaaaaaagagacatcatcgaagaggaaagggggtccacgttttgtcaattccactgagttgtctgctcctcgcga

SEQ ID NO: 62350 - DNA, 677 bp, Cannabis sativa
taacccaacacacattttatatattcaattgtgactccaataaatttctaacaatctcccactgagccacatatgtatacatataaatgtgttaaccttattgagctcataactttatcatcataatcgtaggcatgtgtaatctcgtccattaattatatcaacataggatcgaaacggttttcattgtaagaatcacaactaaactcatcaatagtcacatatatcagtacatatagttaaatgatatggatcaatcataataatatggtatgtgttgcccttaatttcgccaaaaatacgtggaccaatatgacaatgacacgtgggtctgagaagcacaaccattagataaatcgactaagtctgtcggcatcaggagtgtcaacgagaatatgccctaccggaggagaggtgaaggctccacgtactcccggagaccaggggaacgccaagggatctccgggaggaacaagaccttatttgtacagccacctctcatttaatgccgcatgggagaaaacgtattggaactgccataagcaataagtctgacggcgtaacccctcttttacagctattatgccatgattaataaggctagtgacgactactttatgagggatcacatcaatcaagaagggataaaagactatatccacctaacccctaagata

SEQ ID NO: 62351 - DNA, 823 bp, Cannabis sativa
atttgggcttcccattaaattatcaaagggcaaaccgataccagaaaaggattttgggtagaaaaattgtttttatattaatttccataaagggtttaattctttttgtccaaatttttcaaaatatagcattaattttagactgcaattgtgatctgcctagtacaattcgaaatcctattgtgcagcaactctgtttgacagtaaatgctacagatgtgatagttaccaaatctgttcataactatcccaaaatttctttcctatataagtgcagaacatccctgtggttttgcatatacatccctatcattactaagttttattctctgcaaaagctttccaataatagctactgctatttatatatatacttcagccactataatagccaattagttccccccaggtctcttcgctgcacacagccgagtccagttctgcacactgtcttcacaaactctctctctgatatctcaaggcttctgttatggtattgtactagtctcaagtccactcagtcgttgcaatattcaggtcaatattctcccatagttcgtaggccattagcttgtagtcaccctgttttcagcttttcgaatattactgtccaactacaatccggttcgcccttgtccctgattcactatattctgctcagtgtaatttttcaggctttctatagttgttcttttaccttacccacacggtcccactacattaatatcatttcatttgatctcagtcactacttattcacttgcatcatggatgagctaaccaaatcactatctgttgctctcaacctcacagagaccgaatg

SEQ ID NO: 62352 - DNA, 762 bp, Cannabis sativa
ataaaagtaaatccaatactaaaaattaaatattcaaaaaaattagttttgttttaataatttatagtggttttttttttttgaaataagcgtatagttatatataaaatagatgttagatctcgtggtcgttacacaaattaaatgttctctggtaaagaggggatcggaatagatccgtacatctggtgggtgaaagcccacttagccacattatgggcagcaaagttacaagtcctactaatattcgaaaagttacaaaatatgaaataaggagaagacttagtacaaaaagagacatagttctctagagcctaatgggacgccttctcattgagagcgttgatagctagcctcgagtcactctccacaataacatacttatactctagctccattgcaacagacaccgccaagcaacaggccgcaacttcactcatcactttgaagttctcgtggtatgagtacttagtaattaattacaatttatattaaaaaaaaaagtagttttcttttttattttaaaaaatttaggaaaattattatggtgcatcaaggtgtttgtaattatgaagtggtgccttataagtggtagtgagacccgatattaaattgtactaatagcaatattgcacctcataaagatgcgctaggcactatgggtaccttttagtatttctcaaaaatttatatttcattctcatggatatgagtatgacttagaagaagtgtgtgagctaggtggcatggtcatggttaggg

SEQ ID NO: 62353 - DNA, 2465 bp, Cannabis sativa
tgaatctgatgccatcttcactattcatctagtttttctcaagagaaatgatcaacgaagtataatcaaccaaattaacaacttcaattttggctcatccagaagcaggatgtttcgactcttctgtttccgcaaaataacaacatctctgagaacaagtgaccagcttcacaacatataaaaggactaaggggtgttaaaccatcacttaggaatctcaaaggactccccttggatattttcacacttataccacgtcctatttgacgttagatgtcaactcgggcccttgaacttgaaccgccttcaataaaacaaccataactcagtcaattttttttttctaattgatgcaattcaaactgagttatgaagctatttaagccctctatcatgtcatatctcccacactaggagaaattatgaagttatcatcatcaaagataacccccaagggagttacaaaaataagctctgcgtatctcgcattgggacccaccaaacaccaaaattaaatatcttttccaaaagctattattcaccgttagatcatcatcgatggtggaaaatacttttttttttaatttatctcctattttattgcgctcttctttcacaccccaataaaaggagagctcccttagttcatctttcacattcaaaaaactactcataaggtcagagcttatctctctagactttctctctcaagagcttgaagtttctaattcttaaatagttgctataatcaccatctcatgaaaataaaaactcgaagtagatgtagccccattactatcgtgacatagggagtgaaatactataaattgttgtgtctctccttaattactttgcaacttttcatatgctcgccaatctagcaagcaggtgtggcttagaagtctagtccagatttttgagttagtattttggtgctttcattgagagccacagctcaagaaagtgtcaagatggttgcaacatcttttaagagtgttgacagatagactccaacaactagccaataaacttggggcatgccagttgatggacctgttccatggactacccttgtgccacaggcaacaggagggggcctcggaaccagctcctcaactcaccctccaaggccacaatcaacagctcctaggactggcagcaacaaccaaatcctacttgggaagccatgtgtggagatagaagaccatgaggatatcgatccttaggtagcttagtttagccaaactgtggctaacttgtaacaacaactgcgagactcttttgataagcaacacgaacgacttcaacactggttcgtggaaaattggaagaacattgaaagcaaatgcattgagcaggaacaacaaagagctaacttgttgtaccgacggattagagaagcttatcgctcttattgtagaactacttcctaaagttgtatttttgagttggtgagagagacaccccgtcgaccagctggtcacatgggaactagtgtccaaggcgaaaccctgaaaactccaaacaccaccactacacctagtaactgagcagaaactaggcaaagaaaaaaggcctcgagaccctacaaggggagagggacctactcctcaacctaaaggaagtattaagagaggctatttcgaaactggaggttacaaagtctggctagtaaggaccaatgagccacttcatactcaaaagtactctctagatgaaaaaggggagttgttccgttactttgcccatggccccgatcgacaacaacacgagtacttctcttgagttcatggagaggaattgaacttgagtgaccaattaaattttcattgaacttgtgatcttgatgatgactactttgagggacgtagccagtacaatgcttcgaatgaacactctcgcagccggtcatcccgagacaatcctaggttcattctagaggcctcacatgagttgccttcacaacgtcatggttagaagaaaactataagacccagatcgataggagctcatgatcaacttaaaagacaaagacacatgcatgacctcttgaataaaagaagaataatggacgtgggaacttctagatacgaccccatacaggtgagaaaagctccatttaggacacacgccactattcatggggtcaatcgggcagagttagaaaccttaactattttagaaaaggggatcacgacatctaagttgtctgaatttgagatcgacagagaacaatgctcaccactctctaaaagaatcaaagcccttctcactcctccaaagttcaagaatccttcccggcatctaaacaacgagaaggaagatccactgtctctcatgcactactttcgagtgcaaagtgatctacaaggtgtgagagacaacatcaggtgtagaatcttccctactacactaacaggcatagagcaatgctagtacctgaagctccccccaggatcgatcga

SEQ ID NO: 62354 - DNA, 2023 bp, Cannabis sativa
  modified_base (1968)..(1971): a, c, t, g, unknown or other
ccccctaaatcatgaggtacttcttcgtcgagcgaccctctaagtagcttgattcttcactatcaatatcaaggctggttacaaggttatggatattccttgccacaaaactagcaagtaatctctatatctctctcatctcttttctttcgatatctattttttctctttatagactctctctaactcttctttatttttccctctcttatttttttttatttttctctatgcagaaatgagttgctgcctatctcaagggctgactcgaagctctctcacaaatggataggttgacccccttttttataatgttgttgctctatgtgttatgttgtgttgtgctgagaaaagatagttggaaaagttaataaaaaactgttacaccttttggtttgtgttgtgacaagttgttggagtcttgaatgttgtaatttaagtttcttgtgttgtaaagagctatagccgagagccataaaattttagcctatgaaacagaaccgactactccaagagttataatgatctgttgaggcttgtaaaaaattttgcattatattccttgtaacttattgaatgcattttattatgagacagttagtatggagatttatccaacaggtagttattttgtatattttaaaggataaaattgtcatcataaatttattattaaaaataaaataaaaataaataaaagtcattatcctgaatgacattccttaaaaaattgttggaggaactatgacttttcttttatcctttatttaatcaagttctttattctttaattctaataaaacattttttttttgaaaaagttaattttaaagtaagtaaacaaatataagagaatgactaccctattattgattctcattacatattagtaaatactatatctgatattgacttgtactaataggttgtgtaaaattataaatttttcataataaactcgaccccaacatagatcacgacttgcacttggattcggacgcgaacccggaacatgctcggaccccaacccaaatcctaaactcgaattgggacttggacttggacctcagactcaaacttggactcggagccaaacctaaacccagacccaggtcccgaacctaaaactcagactcgaacccgaggtctcgggtcagggtcccggttcaagtccaggtttagggtttaggtccaggtcctggtttaggtctagcgttcaggtccaagatctgggtcgcagtttgagttcagggtccaggtccaggtctagggccagggatcggggattggtcctagggttggggtctaggtccagtccggcatccgaggtcagggtcagggttttgggtcggtatcaggtctggagattgggtttgggtctgggttcaagtccatagtcagggcaaggccgacccaagcatatgacaacttgggtcattgcacaaggtcccctactttaaaaggtctcttttttatcatctctttagataatatataatataataaatattttcttataatgtatcgtatacataataaatacataacaataaatatgtattttagaaaaataaaactgataaaatcttgtggtaccaatacacatgattgtaaaattcttatctattttagaatttatgaagtaatttttttttttatttaaattgtgaagcattgattgatatatatattttttttaataaaagacctaattttattttttcatccaaggccgtcaaactgtttgggcaaatcctgagttagggtataggtcttggtccgatgttcgatgtccgaggttggaattgtagtgggggtcatgattgactccagaccttttgtatatattataatacaaactaatatggatcatttattatgaattaaataatacgaatcacattgaattaattatggtcataataattaatgttggattttgtgtcctaaataaaactcattacaatnnnnttagttatcaatttaagaaatttgaagtgatttatgttaacatgtattttac

SEQ ID NO: 62355 - DNA, 1117 bp, Cannabis sativa
  modified_base (437)..(441): a, c, t, g, unknown or other
  modified_base (1018)..(1033): a, c, t, g, unknown or other
gattgaacctaatcatatcaggattaatatctatagatcaaagatcaactagtgatatggacgtataaagatataatagtaagtttctgatatcttatccaagtttcatatcggtccaatctaatgtatactccaaacatcctatactggcatactttcctaatgtcttggaaaggacataacacttatctaaggtgtaagtatatcttatatcgttgattatcatgttagtctaaattcatgtactgacaaatcacgagacttaaatttttgaacatataatcatgattatattctactatgttgacaacagtataatcataaatggatatatgttctggacttaatagaatttacacattaaacatataatcacgaaatgaatcatgtgaaccatgtaacataaaatgatttctgatcttttattaattagtaannnnnattatattgaaatagattttattttgggcacaaaaccctacacgaacttccatcctggagttctcgaactcaacctggccttaggactagggacccctcttaggtcaacttgctacgattcgggactactcaacttctagatatcatctttcttgccacgtgtcaaatattgatgttcacgtcatcaagactacttagtgtaaacaacatttataaaagagagagattaaaaaaaattggcatttataaaaaaaaacataaaatgagattaaaaacaaatataattaagttttaaaaaattgagatttataaaaaaaaaaaaatatatatgaaaaagtgagattaagaaaaggaaagatttcagatttaaaaaaaaaatgcaaaaaattaagatttataaagaaaaagaaagaaaaacaaaattatattaaaaaaattgagataaaaagataaacattgatatttataaaaagaaaaaaagaaaaagaaaaaagattttttttttttaaaaaaaagacaaagataaatcgttgttattcattcttctaaatgtttggaaaatttacatggtatactnnnnnnnnnnnnnnnnttacaaaaatactgttaggcggtattttttacttttttactgtgtttgtttataagttttatactgcagtatactgtgttaagt

SEQ ID NO: 62356 - DNA, 584 bp, Cannabis sativa
  modified_base (125)..(138): a, c, t, g, unknown or other
ataaatattattttactatagtattaatgtaaattttttttggattctacttgagttggattgtttgggaactccatttaatttttttgagatcttcctttcattgatctaaaaattgaagtcannnnnnnnnnnnnntgcaaattaaactggatttccggttgaattttagtttcgtagtaatttttttatactttttttttcatgaattcgaaacaatccctgttttgattgattctggtcgtcttctcagataaagtcgtcgaaattaatagtggttctctttctggttgaatttttgtttcggttgtattgagttgctgcgtagtcgcgcgatggttgcgcgataaagtagtaatatattatagcatttattttctttctggtctgatatattattagcagttttagtgtctaataaaataaaatcattgtcagctgcattagttatatataattattattttctttcctttcttgaaaatatttaagcgtgtagatatttattttgtagaaagaactttaatgatacaataattatatacggttgaacattttttttctttctatagatgtagtctttt

SEQ ID NO: 62357 - DNA, 896 bp, Cannabis sativa
agacactcaaaaggtgttttatttttaagcaaaggtgtaggagttctgttgattaagaaggtagcagccatgacacattcactccagaatttaatgggaaactttgcttgaaagtacaatgctcgagccacattgagcaaatgctgatgctttctttcagcaacagcattttgctcaggtgtctcgacacatgtaaagtcatgcaagatcccatattttgcaaataactccttgaactctaactcaggtgcgttatcagacctgaaattcttaaaaatgcagtgaaattgagtttgaacataggatagaaactgaggaattatggtattgacatcagatttgtgctgcattaaatagagccaagtaaatcgtgaatggtcatcaacaagagtaaggaaatacttgtgattagtgtgtgaagctatgtgataaggtccccatacatcacagtatattagatcgaaaatgtgatttgccatattatttttattctgaaaagggagtcttttctgttttgcaatagggcaaatatagcaaggtttattatgtaaagcagtagtgttacaatgcagaatttctttaagagtatctaatcttttatttgacaaatgtcccaaccgagagtgccaagttgcagcagagatggagaagacttgtgtggaatctggtgtgtcatcaaggatgtaaagtccattgatgttgctaccttttccaatcatcttctggttggttttgtcctgaatacaaaagaagtcagattcgaaaatcacagatatagcagcatgttctgtcatatagctggtagagataatgttatacttaaaattaggcgcaaaaagaacatcagtgagaacaatattgttatttgaaataacagtaccactttgatgaacatg

SEQ ID NO: 62358 - DNA, 565 bp, Cannabis sativa
atggcataaataaataataccataggattatgaattttttattttatttttatatttatatagacttttttatgccatatttttataaaaaatatgaaaatcccatattttaagttttcccaaaatacatgtcgtattgtgtctaattttttatttttcataatatactttcaatgtttttgtgttatatcttcataataaataattaatcgtaatagtttattataaaatagtcttgatagttatcacaactttaatattgtttaatttattaaaaataaaatatttaacataaacttttttttaataaaattagtatctttattaactaatcaaatcgttaataataatataacgtgtttcaaaagaacaatcttccaacggaagcacacgacttggagagaagcaaaagtctctggctaagcagtgagcgagcttgtttgcagatcgtttgacagaacacgatttaacattgtctaaagataaaagcaacgcacgaacatcatggactaaaagaccaaaagaagatgacatagagatttcactttgaatagcttgtatgcat

SEQ ID NO: 62359 - DNA, 1082 bp, Cannabis sativa
cataaaacccaacagtgctaggggtagttagttgggattcaattccaagtttaattaaatgatctttgaactacatatccatatattctccacagtccacgagtcaatcttgttagacttctgatacagttctaggaccttttctcttatgaatttttttgtcctctttttagtgtaacatgcctctatttataattacatattcaggcagttaattacatagcttattgatctctttacaacaattatcccctgaaatcatggggtttgattacatttcacgtcaaataaatgtggttaatatttaaaaattacacagctgtgataggtccgcttttactgggttaagataatcgtgtattaagcatgttgtaaaccgtaatgttctaagatgcctatataggaacacgctatcaatatccttgatagcgagctagagcttttcccacatcttctaagaggttaataatgttagccttgtcgcttctgcgagcttggcgacaaggtgaacttcaacagccaacgtcatttgaatgttaacttctattcaagataactgactcgttgatactagttatctcattgaaagatatctgaagctgattagtgaaagtatcagaagcgtgccttcctatagcgagatggacgtctcgctatccatcacttaggttcttctagttattgtacttagttagtataatgtgtattatacgctaagtgtattaacaatcattatatctcgccttcgtctcttcatacgtaatgaggttgatgtctcgccttacacatccaatggcatatgacttctcgttaacgtatgagacaacagtctgtacatctttatctcgcgtaagacattatagtcagcaagttataaatctactctattatttccatattcatgagttatttcattttcaaatgtaatggttaccattacactcattgatatatattttcccaacttgacacatgtcttcctttgaaatgatagttgaatttcggggataacataggtttttaggcctaaaagagtattttttttgccaaacattatgatttttcaacatttttcgattctg

SEQ ID NO: 62360 - DNA, 1036 bp, Cannabis sativa
gtttaatatttattataaaatttttaatttgacatgttttttgagaaaaatctttgattagcaaggatagcactgtaattgaaaaagcactataacgtgtcttagcatttgggtgttacgtggtataatcgatgatccttagatccagatcgggcttttctacatgtgatatctcctcgattctgaaaacttattgtcgaggaggcggtgctttcagtaaatatatcacatttaccaacttcttcttttctacgagctttagtgccatattataacactctcttgaatctgattagactccttcatctatctacacctgcgggggtagagaatttcatcgtgagatgaaagatagaggtcattatcttcatctccttcaaaatggggcgtcccatcactatgttgtatgctgaatactgataaatgactgtgaagttggcatcaatttggcagtgataggagcggttcctaggttgattggcagctttatcatcccttttagtgcaatcgtatctctagtaaacccgtagatacttgagactataggttgtaaatccttctcctgtaactccatttgtttaaaagctttgacgtttagaaggttgattgaactcccattttcctctaagattcggtgaacattatctcctccaatattagcgacgattacgagtgcgtctacgtgtgggtgatgaacccacctggcgtcactctccatgaaagttatgtcgttattctttcttgaaatccttttaggtccctcacttagatagttcacgttggtgagcggtttctctttttcttccttggtgtatcgttcttgcaacttcttggaatctccaccgatattgcgaggggttcgtgaaccactcgcattggttgtattgtcgttatcatccgcttggggatgactttcaccatgtttcttgtacttgccgaattttccccgtctactcaattcctcgatctcatcatgtaggaaccaacattcaagggtagtatggtcgatgttcttgtgatacttgcagaacttctt

SEQ ID NO: 62361 - DNA, 694 bp, Cannabis sativa
aattatttgaggctttattaattaatttaattctctggacgtggcctcgtggactaggagtgtttgaaagaatactgatacgacatataattctcttgtttcaatttattttaaactctgcatttatttatttttgtttttggtttgattctacaagtctatgttctgcagtgacaaaattgtaatatgttattgtagattgttacagttgtatttttactgtaattttgtaatattattggcttttacaaaaacgcaattttttcaaatcttgttaaaaaatacaaattattcattaaattaattttgaataaactacaaaacataaaaaagaatatactacttttattaatcaagtaaaagatagaaaaatataggaggagtgcctataatttttttgtaagaaagagaaagagtgttaaaaaaatgagatataaaaatgtacccttattatacaaatatatacaaagataagaaaaattagtttgagaaaaaaaaataaaaaaataataaagaattggaaaaaaaataaaaaagagaaatagagagagaagagaaagaaagaaaaaagtcagaaactcacttaaaaaaagagtcttttttcatgtatatactaaaatgataaaaatattacacaaatacattgggcagactctataaacatttatacagcccagcaacaaaaatttacaaa

SEQ ID NO: 62362 - DNA, 630 bp, Cannabis sativa
taatgccccaatagctcacaaacaagtagcacatttgagagaatactccactacatcaccttatggcactcaagaattttattattccacagtttagtttagtctttttttttttattttttatttaaacaatgacaaaaaatttaagtgatatttataaaagaaagtaaaaaactaaactacacctaaaaaaattgtttaattaagtaactcatttttgttttaattttttttataggatcatactaattatagttttcatcaaattatcaactctatgatggagttaaggttttaaatctactaaggacataataaaaacatacgaacatgaatgagaataaaaataagaatagaatggaattaaatttaaaatgtataaaaagttattaaattttttctcacattacattaaaatgatctttctttttttttttacaaaatataatagtcattccactaaaatgatgaagaagtcattctgttagagtgacattataatactttaatgacatgtatacaaacaagcaattagaatcaatggtaaggtatgttggaattatttatcactcataaaatatgcaataacaagatttgattctataaataaacatatgtagttattataag

SEQ ID NO: 62363 - DNA, 1591 bp, Cannabis sativa
aaatgactggtaacaatcaacacaacggtaatcgtcctgaggaaacaacccattgtcttggcaaggaacctatgggatctcaaagaaccaacacatctaaccgcattcagggaggaatgatggtaatttcaatgttgctagggatcaaatcccagaaagaaggagtgagcacgcctatgatcctaccagatacgtgccactggtagaattagaaaataggcaacttcgacaatgcctggctgaataaaaccaatgaaatgctgagttggagcgagaagtagcagcggccagggcaacacaaggaacgattcctcaaaaccagcctgatccaacagtaaggagaccacgaggaagacctcgggttccaggactaggatacaagagaataaccaagggaatcccccaaatacccaagaggagcaacctggggatacaagggatgtccgaatggataatcaacctaacccaaatagtataaggaatcaagaacatcgacgagatgttccacgaacttcccatagatttgcgaaccaagggaatgaacgaactgacatgccagaatcatctcgcatgaatgaagaggcgaggcaaccttgaccaggggaccatggatttcctcgtgataatgagagaaaccttggaaaccaacttaggtccagtgatctccctccgaaacatccacaacagccatctcgcgcgaataaggaaaacatgcacactttcttgagtagaggacgtgtgtctaatctcttccaaagaagaagaccaacgtgagatgaagcaagctcaagtatagggggattgcgatcccacgggcatagtaggtcgagtagacaaatgagagatggaagtagatctcgacataattatgcagaccaggagagtataagtaactcacgaagttatttgtcggagagctactcagagactaggtctgtaagcaactatgaacaaaggcatcacgaacctgatttgtgcgagagattaaactgaaggcaaccagaccttcgcgagcacttaaatcgaaatacgcttgatttgcataatcaacttaaccaaaatgcaaatcagcaacttgtggatcccatccaattacgagcaattcaattagaggacaaatttagataatatcaagatggggaatatggcaagttgccaggatacgattcagacgaagaaactgagccattccatcctgatatcttaaattcaaagtttcctcagggatttaagaacccacatgtatcgcaatacgatggaaccacaaatatggtcattcatttaaacaattttaatactattatgcgagcaagtaatgtttcaaataacttgcattgcattttattcccaacctccttaataggagtcgcgagtagtttgtttgataaattcaccaatcattccataacatcctaggaacaattatcgagggactttaaaaagtagtttcaggctgcaagagaccgtcgacccaaagcgtcatctttgaccaacataaaacaacaacttgggaaatctcttaaagcgtacttgagtcgcttcaatacggccactgcaaaagtcagaaacctgaatgatagtattcaactaa

SEQ ID NO: 62364 - DNA, 723 bp, Cannabis sativa
atttatcacaatgtatgaatattttacttttatgttattttattataattatatttagttataagtattaaataataaactttttacaatattattattattttatattttctataaatattatagaagtcttaatgaaatattaaattttgtgtaaaattttgaattatgtgtgaaagcattttcaaatttcttacacatattataaaattttatttttatgtcaaatataacacaattttttatgggatctaagttgaagaaagagattacttattagtgattatttgtcaattttacatgaactatatttaattattacttgctttttgtataggtatataaataactactcatcaatatatatcgtccactttaaaaatgaaaaaaaaaattactcaatattcaaattataatgggtaaatactactttggaccatgtgtggtaaaaattattaattggaccctctattttgttaaatgacaaaattgaccctgtattttctaaaatagtacaaataggaccgtgaattgaaatgtcaaaataaaatttaattattatccgatctaaaagcgctatgacaaaaatgtttacttttttttttttgaaatatgtttacattttatgtatttgtgtgtattaggaattgtcttcaagttggttatatttaaaaaaaaatttgtaaaaaattaaactcagaatcctatttttataattctgaa

SEQ ID NO: 62365 - DNA, 1629 bp, Cannabis sativa
atttagattcgatccttctagctagtaattaaatatctttcgtacgtgtatatttctgttttaaaaaaattattttacatatatagccaaataaattcaaacttttaattatcagcctataaaacagatatttgttgatatatatgtatttttacgtaggaatattaaaactaaaacctaatactgcattcaataaaaaactacttttaatagtacgattccaaattatttttcccttagtggatatggaatgaaataatagaattttggttcattgagagcatcgacacgaaattgatagataatagttcttttcgagacaagacaaatctctaaaatgcattcttcgagtgttaaacttcaaatgaatcaaaattctataatctcatcccatatccactaatgactagctatccaattacatatttataagctttacatatcaattacaaatcactaataagccgatgcattattaattacacaccattcattttgattgagcatgtaatcatcgatacaaagggaatctaaaaaaaccaactaaatagattgtcaacaaaatgcatttgctaattgctataatatagttctaaaaacaagttgagaacacttattccattataactacattctattcattaacatttttatagaagaaattaagaacactgaagacagtcagtcaaactatttaaaaaaggcttcctttttggctttattatttttggctgtttgagagaaacagtttgtgaaatgacaaaaaactcaacttccacaataagagtatccttcacaatataaccatttgaagattggtgaagatcttcaagtaacataaagttctgaaaatcccggccttttctaaaccaattctcagctgaaaagtaacataattacacgagaattaatacaaataattagatgaaaggcctctctttaaaagttactctattaaacaaaaatgatgaatgattgatcacctgaaagtttcttgtgtttagaattgatttgatcaattactcgaaaacagaattcgacataaattgttgagttatttggagctctactgtctactaactttaaaaactttgagaatgatttgccatctcttctttgatcaccttttggatagatatacaaattcctgaaaccatccaaaaaaaataaaatattttccaaatgagcataccaatctgttcctccagaatggaattgtttcgattcgtaacataatttatccatcttagaaaactctttgatctcccaacgaaaaataggattagcaagctttccgcgttgaaagaaagaaagagtttcagagttaagagtagtgtgatttatgacaaagacttcagcaccaaatgcacaagagtcattaaagatgtatccattagattcatccttgaaagattcaagtgaacatattttttcaaaaccccattcttttttcatctcatgaaaacgtctggtagctacataaaaaaaataactatgtaaaaagtatatttatcaatgaaatatacataatgtgttagacatttatttgtatagactaaaacatacatgattatgaataaagtgcggaattaataaatcatatatgcactataatttaaggatcgaaat

SEQ ID NO: 62366 - DNA, 749 bp, Cannabis sativa
gaaacttactcgccaatgacatctttattgtgacttctcttgtctcattcggaggattgatcattgcttctttcacaaaaaggttgtattcaatgcacgagtgcattgcaaaaatattaaatgccgtattatataattttcaataacaagatccgcacatggtggttgggagacatagcatcaacatcctcagtaatgtatatatatgtatatatattatagtttatataaaaatcacaatcatgtcagccttactgtacatgtgtgtgatgaggatgagattccttctgtttcccttatgactttttgcttatataaatagagggtagatgccaaaggaaactcaatcaaaatttagatcatcattaaacattcaaaagctaccaatcccttctgcatctttttacaggaaaattaaaatggcagcttaccacgttcgatcaaacagtttcccctcaaagcaacatcctcttatttccgagtttggcatactgaggtcttctgcagaagcctcatcttcaacatcaataacctcaaagctaaacagtcttcaagatctccatgattgtgttgacaagttgcttttgctacctcttaatcagcaagcactgtctaaagagcataatgagaaaagtctcaacgagattttggatggatccctaagactcttggatatttgcaacacagccaaggatgccttgttgctaacaaaggaatcaacacaagaacttcaatcaattttgcgtaga

SEQ ID NO: 62367 - DNA, 1691 bp, Cannabis sativa
tcaaaggaataaattgtatgattaatgtttgttatttatgagtagatgttagatttagggtcaaaaatggccagatttgagttttgggcaaaaaactagtttttttgtcaggtccaatggtagtctgatggtggttcgatgccttcctgttgttaaaatgagtaaaggttgaagacaaaggtccgatggtggtctgatggtagcccgataatatggtctgatggtagtccgatagtaatcagatgccttcttgacgagcttaatgaatagagcttaacatctataaatgtagaatataatccgatggtggtccaatagtcggttgatggtacttttttatgtacaaaaatataaaaaaaaaaaaaaaaataggtagtatttactatcagactaccatcagactctcatcgtactatcacattatagatgagaatgggaagtatagatagtaaagttagaaaaaaaagaagtatctttgctataaatataaactgtgtttatttttttaattttaataaacttatatttaaaaatttaatatcctcacatataaattcaaatttcccttctctaattttaattctcactcaagaatccgagattgttcattcattgaaagtttagtcaacattatacatgagaattcatacagtggggtccgctctgtcttcaatgtgtgcctttgttttgagtggtgtgagttggatatcagtaaaagatatctatcatgataaaccaaagaaatctcaaaagattaagaaaaaatgttataattaattttattcattacacagtgaatggaaaacaaagaatcaattcatataggttcgatttccattgatggataattaattgcttgtcctttaatttataatatgggatgaaactagtactacttacaattaaatatgagagagtattaactcctctcaatttcagaaaactaaacaaaccaaaagtaaaattataatagatcaacatactcaatcacacaattattaataaaaagaaaaaaggagaacattatcacaagtggaaacgacatgtttttgatgagcagatcaacaatttctattgcgggaatctctacaataattttgtctggtgccagtgttaggcccagcgcatggagtataacgttgattaccgttagttcggccacaaccggcagcacccttatcaagagtttttttaaccacgctggctttaagagctaggattctccgattgatttcggaatccatctgaaactccacatctagatcttgatcgccgatgatattggtggcgttgctattgaacagctgatctgacgttgcagtggcttcacactcataatcagttgagattagtagaatcagtatcatcatcatcatcatagcaactgcaagttgttgcaggacacctttgttcagagttgctcccatggctatgagtacttctaataataatttattctgatgaatgccatatgcaattcactaattttgcccccttatagtactacttgctactaaagtagataagtgtgccacgcgtcatcttcttatttcttaaacttggaatcattttattttagtaagctatgttttttgagggtgaagtggtactgcctataaaattatgaatatagggacgcgctaacagcacactagaaaactaatgatacttaaaaaaaaaaaaataaaaaa

SEQ ID NO: 62368 - DNA, 1024 bp, Cannabis sativa
gggggggggagttgtacacattgtgttaaaatttttatgctaaaaatagattaatagtactatgtattgatatctttattcctttgcattaagtagtataacaaaggagttgttgttttctttgcagtatttggtttggtatacggctcaagtattttttcttcgagtacctaccaatgtgtctgccacgtgacataataatatcttataggtttactatatataggtacttacgtacataaataattatatgtagatactatatatagttttctctcttcttaatatttacatgaaattatgattagcaaacagtgaagagtgtccttaatttattaattattatgtgagtgtgtctcatttaaaatatcatagtattccatttcaaagtaataagtgcatatgttatgttattgtgtttcgtattttgaaaacaaatattatattaaaagaagggaacatagtaacttattactacattatgtatgctctatcgatccaaagacttatcaataaatcacagttttgctgtgcttcaataattgtggtcgaattaatggcaccataaattaattagaaactatgttcaagacatctaataatgtacattaattacaaattgtcaattaaagcttactagattgtcgttaatagtgaatataatattatttgtgtaatatatacctgtatccatgtatgttttaaataacaaaaaaaaaagtgtcaacttaacaattaaagagtagtaatgctagatacgaattacatacctcaaattgcataatttccctcacaattgtgaagagcctatttctcttttactgaactcccttggattggttcaattcatccattattaattttgatacttggtagtagctctgttacaaatcaatgaccataccttagaaagtgttccaaacctctttgaacaaactcagagttttataacaaatcctatttctttctcttctgatctactactccctctctctctagctttttactttctcaatcttggtct

SEQ ID NO: 62369 - DNA, 936 bp, Cannabis sativa
ctaagtgtgctctactgtcacaaaattgtaattctcaatcttttattcaacactttcatcagtgttcatgtaatttaacagatatgaataaagattcaatttcttctcattcacctctcagtgtgttattgtttacaattctattctttctaataatatcaatttgtggcactgtaagcttggtcacaaatccaacttggatgatgtaaataatgaactatctattaactagaaaactgccatctgacgaaaacgagataagaaaactcatgtacaagattccacaatatacaatcgtagaaggaaaaatttaccaaagaggatattcaatgcctttgctgcgtttattttttctaattacaattaaatattacaatttaaattagaatgctataaaatattttatgaatctttttaaataaaaattttaatttaaaacatactaaggatattttctaaaactttttagctatgcacactataatattacaaaaaaaaaaaaaaaaaatcaaaatgtacatagcttatattttcaaaaacataaacaatacctaactttatcaaaataaaattctaatacttagcatatttaattaaactaacaaatatacctctattcaaaacaagatattcacaaatataaactttaaatttaaaagaaaaaaaatacttatgcatttttacctcaatctaacacttttcctctaatatttatgcatttttagtgaaatttatcctaattctattaaaactttgatagcataacaactgtaattgaacgttcttgaaaattttaaacatgcaaaaaataagaaacaaaacgcatgtacaaaatatacaaaataacattaacaatacaaaaattatccacttattcgaccgcagtacatgtattcgtagaacttacttcaatacagataaaaatttaagatattc

SEQ ID NO: 62370 - DNA, 1778 bp, Cannabis sativa
cagcaatagaattaaatgtgtttataaacaagctactaatatattaaatataaaaaaacggtaatataataccgtaatatcaccaattttaaaattcacgttaatattggtattaaattaagaaaaacgtattgagatgtaaattttccaaaatagtatttaccctttttattactttaattaatataaaattatttaaattgatggtttcttctcatctttgggaggagggggttgggatattgatctcattattgatttgtttgataaaagagataggcatctaatcctcagtatccttgacaaatttctcatgtgaatgatgattacatttggactaagagaatttctggtacttatgtaatgaagagtgtatataatcttctcgaaagctcctaaagtagatggcataagaatgataaagagctggctagtttttggcaaaagaggtggaaattaatagttccttcaaaagttgaaaatctggtgcggaaggctggtatgaacagtttcccaaagatgatccaattacgtaccaagtatgtagaggggagtccaatgtgtcttgtttgccatgttactaaagagtacatccttcatgggttggtgacttgtcctgaggcatatttatgttagaatagagttggtattggtataaatataatgtcaggtgctacttttcttgattggtgcaaagcttcttttaaggcattggatacagggtatcgatgtgttttggtcaatgtttgttgggccattcggggagctccgaatgacttagtttggaataaaaatgtagtgagggttggtgacattattgtgtttgcaaaaaggtaacttgatcaattcagacatgctaaaacctctaagatagagtcgtcatagcctcgtgtgtacaggtggtaatggagttgagcattggattttaccacagactaatagtatcaaggtcaatgtaactttgtttaaggagaggcataactttctgtacaggaatgtgggttgcgatgccaatggtcttttacttgaagggcgtacctctcttttacaaggaattgtcgaactagaataggttgaactatggaagttcatgaaggtattagctggattaaagatcatcaatggaaaaataatgtaatttttattaaatgtgatgtatggtgtaatgttaaagtatatttggatgatattcttgaaagataagagtagagaattatgtttggagcggttcctatagtgcatagcaaaattggttgtactgatataggtacaacaattttcttttcccatataaatccaatatgtgtgaatccattaatatgtgatatgttaatcaaaatcatatgtatatacagatataaacgtgcatatatgcacacaaaaatatcaaagaattaccttctggaaccctatcaagtattattgaatcttttcgtataatcaacaatcttacaattcaaaatcgtgaagaaatcacaccaatatcttccaaagcattctctatgtcgaggccaatctctgattgttttcatccaattgaaatggatccaaaagagaaacgatctacattatttcaagagcctatacccgtaaagaaatggcttaacccaccatcaggacgcctcaaatgtagaatggatgaagcaattgtgttatcaatttaagtaatcggtatttacaatatttgagagaaactctatgagagatatggtggatattacatgttcaaggctattctcaactacaagaaattaatgctctcacattcttttatttct

SEQ ID NO: 62371 - DNA, 1400 bp, Cannabis sativa
  modified_base (1055)..(1057): a, c, t, g, unknown or other
tattcttcttattatgcaaacaaaattttatatattcttcttattatgcaaacaaagccgattgcctcatttggaaaggagatccttctggtctccttacagtcaaattcgcctatcattttgtcaatacttcttctttacctccctcatcttctaatactagcttctataatagttggtgaaaatttttctggcatcaaagtattcctcctaaagttaaaaactttggttggcgaactttccatcacatcttacctacagcctttaacctgtataggaagaaagttgttccctctccttcttgctcttcttgtggttgttctctagaaactgtaacacatgcacttttagactgttccagggtgagacaggtttggaaactttctcctttataccatttttatctcttgcatagaaatactgatattaaagattttatgttatctgcatacactgatctgaaagctaatgacttctctttgctaatgtgtactctttggtctatttgggaatttagaattaaaaagcttttcaggaatgctaatccagatgcaggtgatttggtccaatagattactacttatttatctcaatacagggaagcacaggtcaagagcatagatgttgaaccagccagctaattgcgtgcctatgttttggtctcccaagcaaaagaaggatcttaccagttgtacacagatgcagctattcatgataggaacagtaagattgggcttggtgcagtagttaaagactggaatgggcaggttgtagctggagtctctgtgcctctttcagctaagattacacctgctatggatgaagctatggcccttaggttgggtttaaactggtgctgcaatgtaaggattccgctctctactattttcacagattgcaagcaactggtcagcaaagtttatagtcgcaagagggagctttctgctctggcggatgtcatttcggacatccagagttccttgtcacatttccctaatgctgctgtttgtcacactccaagggacaacaacatccatgcacatcatatggcaaannnagctttagggcttgatgaggaattagtttggaaagataattatccaaactgactctttgtaacttgagcttattgtgtatcttctaagttacgaacgtcaaaaaaaaaaaaattatgtatgttagctctatctccatatatttttttttatatataataaatcatttatttttataaaatttgtagtttatattaattacataaaaaattgataataaaatttgtaagtaattttatatttttaaataaataccaatataaaaataattcaaattaattttagaaaataataataataattaaaattaaaaaattaataattttttaattattaatataattt

SEQ ID NO: 62372 - DNA, 1119 bp, Cannabis sativa
aagattgtggagtgcaaatggatcctcaaggtgaaagagggaatcaatgagaatgaaccagtgaggttcaaagccaggttagtggctaagggttttactaaggtggaatgtatagactacactgaaatcttctcacctgtggtaaagtagaagacgataaggttgatgttatccttggcaacatatctggagtttgaagttgaacagcttaatgttaagactgcttttttaaatgggttcttagatgaagagatctatatgaagcaaccacctagatttcaggtggaagggaaaagagttgaattagtttacaagcttaatagatctttgtatggtttgaaatagtcctaagacaatagattaaaagatttgatacgtatatacatcaaattgggttcaaacgatcatcatacaatcattgcctttactttaagaatctggagcaatctcaatacgtgttcttattgcactatgtggacgatatgctcatcatgagaaaagacaaatcaataatcaaaagtattaaagccaagctcaaaagagaatttaagatgaaagagtttgggccagttcaaaagatacatggtaccaaagtctctcgaaactgagaggaaaggactattagtttcaagcagtctgagtacatcaagaagattatttagaagtttaacatggaagatgcaaagagtacatccgttcctttagaagtcagtttattctatcaaaggaacaatgccctaacaatacgaaagaaaaagaagagatgaaggatgcaccctatgttgtggttctcggatgcttaatgtatgtgatggtgagcacaagaccagacattgctcacgctttaagaatcctaagcatgttaatgtccaatctgggcatggaacattggaaagcccttaaatggttactgatatatttgaagggcacatgggattatgatctgacctatgagaaaggaaaagaataattagagttgaaagggttcgtagacgtggactatgcctcgaatagagataccagaaaatcaaccactttttttgttttcttgaaaaaccaaaattgtatatgcttgaaggctcagttacagttcgtggttgcactttccaccacggaagt

SEQ ID NO: 62373 - DNA, 700 bp, Cannabis sativa
aaaactaacaatcagatgattgatgatgacaccacaaatcaaatctggaaagctcttcatgagtattatactacttttaatgctgctaatgttagcctgtacaagtctcaactaagaaataccaagatgctaggctctttaaataacaatctactgaagatcaaaggtattgtggacctccttgatacttttggtcacaaacagacaacttaagatcacatcaaagccattttcaatggccttcctcctgaatatgatgtgtttgtcacatctgctacctccaaaaaagatgcatactctgttgccgagatcaaggccttactcatggcttaatttgcaaggatcgacaagaacgctaaaagtcttgatatcaacaaaggagaggtaagagcttaactaatcacaaggtcataaacaaaacacttgaaatttgatatgttccctccagtgatcaaatagttttatggcctaaccaagagcttaggtaatcacaagtttaatttcttagtagacaaacatggtgtagttgagacaccataaagtttgaaaattaccctcatgcttctagaagtgagatgctgtcataaaaaactttggtatcctataagtaacaaacaatgattgtacaattgaaatatcaatatatatacaggaaggtttaaaacattatatgtgacatctcatatgagttttttttttt

SEQ ID NO: 62374 - DNA, 902 bp, Cannabis sativa
catactgaaaacggcaatcggattctatgcaatgataaagaactttcaaatcagaacgaagaggtccgaaccgagggaatacatggttacatgtgttgacaaaaattgcaattggtttctgcgcgcttcaaagttgaaacaaacacaaaccttcaagattagaaaatatgtcaaaaaccacacctgctcgttggatgtcataatggaagatcacaggcaagcaacttacaatactattgctcaaatagtaaagaagaagtacgactcaataaacaggaagcatgcaccgaatgacatcatgaggacatgctagatgagtttggggtctcgatgggatatcaaaaggcttggagaacaagagagaaggctctagaattgtcaagaggaaagtgtgaagactcataccaacaactcccaatgtaccttcatatgctaaaaaaagcaaatccaggcaccgtaaccgaattgataacagacaagaagaatcggttcaagtacatgttcctagcactgtcaaactcaattagaggatggattcattgtagatcggtgattgtggtagatggcagattcttgaaaacaacatacggagggacattgtttacaacatcaacaatggatgctaataaccacatattcatattggcattcggaataggagactcggagaatgattcatcatgagagtggttcttccacaagctaagagaaacattcggagaaagagaaggtaagaaattagttcaagtagaaatatacattaaatacaatatctttattaaaatagtttttctattgtttgttagatatacttaacataaataaccggtttcaaaaaaaaaagaaacaaaaaaaaaacggttaaaacagacatacactgacattcgatatactttgactcg

SEQ ID NO: 62375 - DNA, 691 bp, Cannabis sativa
atcctttgaattattacattgtcatgaaggatactctaattctccaacttgaattctttcattttcacacattaaagcttttttgacatcttccaaatctacaaagattataaattgagtatacgagaaggccacccactcaataacttaattggttttaaattttctgtttatttatttattattattaggttttaaatatatatatgataacatttcaatatttagttaattattaattattattgttaatattatgatgtatttgggattaaaattgtgttttgaaaaatgtgagttattattctttcaagaaaaaggaaaatattaattgttattaattaacacaagatatatggagttcaattaatattcatcacaactaatatatttgaatattatttttatcacattaacctatttaaaatttttaaaaaattacaaataatactaaatatgtataacgtgtgaaatcattaaaaacaatatatatatatatatatacttttaatagttagtgttctaattatttattgtttgggcttattgggccttaactgggcttttcaactttaattgggcttgactttgggcttgtaacctttccatttatcgttttattttctttatctacaaaaatatgcttatatcacaaaattaagcaaatttaactaaaaacaaagacatccat

SEQ ID NO: 62376 - DNA, 666 bp, Cannabis sativa
ttttatgtttgtttttaattataagaaaaaaaaactaaattatccacacttttggtataattatatagtatataaagaagaattttataaaaaaatacacatgtggcgtccctgttggacagggcgttacactaattattccccgacaattatatattgttgggtatacttactattcccaacagtttaaaatcgatgagattcactatttttttttaaaaaaatatatatttattattgacaacggttatccaccgttggcaatagttgtccccacaatttttttaattcagagctacccataaaaaaaacttccacgtaccttttccaatgattttcatagttgaccctcttctaaatccttgagaataacccatgttgtggtagtgcacttaggaaagaaaaatagaaatagctttatgaatttatatatcaagcctaatgtgtttctagcgagatgctctcttgatagaaaatattgtctaccaaaatgaaccctaaagacatctatttatagtgttttgagaactttatttgaaactcacattccaatggatgttaccagctagtttaagagaatagtgagttactattttcattaatagcatttaactaacctgacaaccatatactttgacccgtgttgaacgctggaccattcgttga

SEQ ID NO: 62377 - DNA, 1523 bp, Cannabis sativa
  modified_base (1476)..(1493): a, c, t, g, unknown or other
attctcattattattactctaaaataatatacaaaataatcaaatagtaaattacaattgaacattaaaacatattaaaaataaatatgcattcggaacccagtttcaaaataagagattcatgagaaatcattaccaaaaactgaacaaaaaataaaacattaaaaccagtttcaatagtaacatagtacatactttatttcgacctgctccatttttcgtatcttaattttcgtagcagtatcagcgaaaccagtttcgaccctatgaaaaatcataacaaaacatatgataaacaataaagttaaatgaaaccagtttcatcaataaccaaatgagaaaaaaaatacacacataaatacaaaaaataaaaataaatgatcacaaatataatcaaagtaacacacaagacaaaacaataaatcaaaaaaataaatataagtgtgaaaattaccaatctcaaacctagaatcagaataataaattgaaacttaaaataaaaaaatatacaataacatcatataatggaacaacccattacaaaattctcaaaacatgtgaaacaaccaatgtcaaacttgttaatcctgtgaaaccagttttgactctataaaaaatcataacaaaacctgtgaaactataaaaaaaaaaaacttgtgaactcatacaatataacaaacttaaaataaaaaaaatatgacaaaatactacaaaatatatatattttttcctcatataaaaataaataaaatatgacaaacttaaaataaatataaatatatattataaaaaaaacattaagacataccatacaaaaattcttaagaagtaacttataaaattaaacgattgaaacaaaaaatcagttatatcaaacaaccaattaaaataataacaaaaatcagtaaacctataaaaccaatttcgaccctataaaaattataacaaaacataaatgataatctgtaaaaatagctgaaaccagtttcattagtgaaacaaataaaaaaaaacacacacataacaaaatgctcataaatataataaaaacaatacacaatgtataaaaaccagtttcaatttttgtctatataaatgaaaactaagtatacaaataaaaattaatttcacttaagtataaaataaatattaaaaaaccagttttattaagcactcccaagctcaccaaagctccatgcagaggtcaaacacgagatctgaaagatctctctgaagaaagcatagttttcaaattcattttacaccacgagtcttagacgagactagatcggagtcaagaaatttagctccaacatgccctaaatggaaaacgaacggcgagggaagcttcaaaaatcttggggctcggggtttcaaacttattggcgaccaccgttgggctaaacaatgatcggaggaagcccgtcgggcttggcgtggtcactgtgaagatatatatatatgttggaaattatnnnnnnnnnnnnnnnnnnctactcacaagtatgttgattatcacccta

SEQ ID NO: 62378 - DNA, 1343 bp, Cannabis sativa
tcttaagtcaatacaaataacgaggattaggctattacagaactcctcgggctgaacctctataaaattcttgtgtctttatttgctttattatactatagtcgtattaaactatttgtcacttacaaatcaaactcgttgtcattggctaaaagcgaggttaacaaagagaataaatagagtgttgatggataatggaagttcagtaaatatcctatacaaagatacgttgaagaaaattgaactacaaaatgcaaagttaaaaccttgcatggtgagcctatgcggatttatcggagatagtgtcgccactcaaggcatcattggactcctattaactatatgagagccaccattatctacaacattaatgcaagatttcttagttggtgatctaccatcagtttataacatattgatgggtcgcccgcattgattagactatgggcaatcagttcaattaaacacctatctttaaaattctaaacaccagtaggagtaggtgtagtgcgaggtgaccagttgttggctcgcaaatgctatcgtgtagagcttcaaaataatagagccaaccatcaaatgatggtggccataatagaagaaggcaagagataagaagaggatctagaccctagagtccaagatgagaaaaactagttaaaaccaattgaagaactggaagaagttgttttagatccagacaatcccactaaatgtgtgtttattgggaaaaatcgagataaaaaactaaaatagcagttaacaaattgtctgaaggcaaaccaagatcaatttgcctggagccattcagatatgatagggattgaccctaaagtgattttccatcatttgaatatcgatccaaattaccctaaaaaagacaaaaaagatgacccttagattctgagagacaaggggcaattaaggaagaagtggatgagttattaaccaatgatttcatacgcgaggccttcaactcatggatttcaaatcctattcttgtctcgaagccaaacagtacttagtgcggattgaatgcactatgagcatgcagattaggttggatgaacaccgctacatacgtctgatacaaaaggtggttgtgttgataaagaattcatccttgaattctttcttattgggtaacctcacaatgatcctttgatcttagtatgggtcccgagataataaaaactacctactactggcttccttgtaggacaggccttcatagaataaaagtataaaatttcaagtggggtcgggccctcccacttcagaaggtgatataaagactttaaattggccaaaattccgtatgaatttgatgcctagataattgt

SEQ ID NO: 62379 - DNA, 830 bp, Cannabis sativa
ggtagttattaagttaaatttatttttacataatatttcttatttattgtcaatttattattattttttttaaatattattatttatttatttttagttattagaattttttagtaattgattattagaataataaaattattgaattattgaagttatagagttattggaatgtaaattttcgaattttggcgatttcaaatgatatgcttgctttactaaagaataatgatattttttagcagataagttttttatgtatttttttattatattgtatatatatggtacttttagttttattagaaatggattgtagtaatttttattagttgctaatttttttttatgcagtttggtacatttggaggaagtagaacaagtgactgttaactttttttttttttggagaaaatgtctctatgattataaatcaacagtcatttacaacaatagaggaaataggatataaaatttctcctagccaacaaacgtcttgatccaaccctaaagcatgcttagctaaaccatgtgcagcatggttagcgtttctcttaacatgagaaatacgtgcgtcagggaaaaaggataaaagaaaacgaacatccaatattagatcagagaaactagacagatcagtggatgtggtagttagagcataaaaaactctaagagcatcggtctctatactggtgatatgaagttgttactgcaacacccaattaaggctatgaaatagcgcttttgcttccatttcgtcagaacgaaaataaccttgtcttggcttagaaagtgcagctatgacatgtccataatggtcccgaacaatg

SEQ ID NO: 62380 - DNA, 2305 bp, Cannabis sativa
  modified_base (1087)..(1093): a, c, t, g, unknown or other
ttagagatattcatatttagaaagagatattcatatttagaatgtttatcaacatacttgttgtttatcaacatacttgttagtttatcaacatacttgttagtaaatctagatcttggtaaaatattcccaacatgacattcatagaaataagcttatagcaggcatagtggcatgcttcgggaaaacaacctcaacaacatgtttaatgctttgatgcctatctaatataaacactaagttttcaacctccccaatcacttcccttaacattgccaagaaatactacttccttctaagaaagagtcatgattctcactatcaataatagcaaagacaatcagaaacaattggctattttcatcgtacgctacacaactaacattgtgcccccataccttgtcttcaagaatgcattgtcgatactaatcacaggacagaaaaacttaaatcgcctcctacaagcatctagtgaccagaaacattacttgaacctgttgtcctctatgacagtgtctataatagtactcaaattcttttattctagcatgtacaagtaaccaggtaactggctataagcttctaatggcgtacccctcgcatacataagtgccttctctctacacctccatgccttctcgtaactcatcttgatgccacaatcctcaaacatatccctctatatgtcttttgccttctacttagctccatctgatctgtacttgttcttaataaggtggctaacaacccacgatgttgcttgatggttatcagcatgtctagaatccaagttacatgtgtgtttgttgtggaacacagtgacctctaacatgtcacaacgtgccttcttactcccccactctccatttacaattttaatccttgcaagttgcgtaaaataaattattggtgctagacttcctcacgataaactcaaaattcattttcaatgcaaaccttctcactacatttgtcaattcagtcttatttgtatacaacttaccaacgtgtatttcccttgaaggtgtaccactagagaagttgtataaatattaatttcctctatgtcttctcttgtccacacaannnnnnnaattttgtacaaactttaaaatcaaatggtacagtactacaaggaggacctggttggctgctactagtgcctggtgtttggtgattttcactacgaggggttcttttttcttgctctgtcctttggttccttggaggtaattgaggtagttctgacctcaaagcatgtacctctacagcctcatcaacttacaagtccacatcaccatccccattcaaatctaccacatgatcattgttgtagaagggagcatcaaactcattaaactagtcaaatgcattgtcaaccatgtcctcatctatattagtagggttctgctcatttaaacttactgctagatctgtttttgggacaaaactcctaacaaaacttcttggggaggggggcagttggcgaagtaggccccaacatcgcatgcctcttaaccttagtcacaaacaatgacagcaagttcttcacactcatttttgccttcattcttaagaataatcttacttgactatctttcactaaaatctctggcggtatcatattacctttcatgtacatgtaacacacctctactttcaattcatacacaagagggtctatatccaactcttcatccaaaatttcatgtatcttttgtaaagtagtgtcaacctcaaacattaacatcttactctttaggttattgaatatccagttgaaaccttcaactgtgcaagtcccatcatataatacaaccacaaataaagttgataaagttgaatccgcaaaaaaaaaagaaaaaaagaaaaaaatattagttaataaaaactatgtcgagaaatatcgcaagatatgtctcaagtgatcgcaaattatgtcgataagcaagttgcataacatcgctacatgtcgacaatataacccctttcctactaaaccaacacagtactctaaactatcgacccatgtcgcaaacaatgtcgacagaaattgcgaaaaatgtccatggtaagcataaattggcacaagtcgtaaacttaatcgctacatgccgtagaatgtcgttaaaagtcatctctaagcttcaacatgctcttatgtcacgatatatcgttagatattgcaaattatcgctaaaatatgaaaaaaatcaaaaaatgcagaattcaagcatctcgagtttcagaaacatgacaaccaaagtaaatgaatgatatgtgtacatctattcattttaaactt

SEQ ID NO: 62381 - DNA, 741 bp, Cannabis sativa
taccttgttatcattcccaggggtgaatgcaagaatcttctgactacatgatccaatacttctttaacctttatttagcacgttttttagacatggagccactaaaccttaaactattccaccctagcccgatgaggattttgacgttcaagttagctttgatcgcgtaattgattgagtacacaactcttaggaagatttccacaataatcttttatttttcagtcatataccatgtaagtatccggacgcttgttgaatcctgctattttgtatctaggatagaaaggcttacttcaagctaggtttaggatataagacatgtgtaaatggtaaaatgatgcccatatagttacatttctaggatagattatgttgaaattttctcgccaagggagtgctgataccatctggacagttagggtatggaaaatttaaccttataaacttttgcatgtacgtaggattctaaaattagggtttgaactagtaggaataactttcgagtgagtgttaagtccgtccatattctatacgtctatttggagttgttaagacttcaaatggacttgatttctagaatttgcttaaaacttgttctagtaattttcccatgggttcccaatttgtcactttgagtctcctggcagggacaggcttctaggagtgatgtctccggtggggacctctccaagaaattttaggggaggctttcatcgatgcccatattgtcatttggat

SEQ ID NO: 62382 - DNA, 961 bp, Cannabis sativa
  modified_base (371)..(373): a, c, t, g, unknown or other
aaccacgtaaaaatctctctcattaattctttatagctttcttaaatactattattatattggttgtcgaaaacctcggtcaacagatattatagataatttagtaagaaatatgcaaatcggtttattcggggttatttgggtgggttagaataatattcaacccgttcaatatattcattgaacggtttgaatttttcgtaaaattattcgggttatattttttttcggtttattcggtttaaattggacagtttattcgggttggacggtttgtaatttttttactattaatcattttttaagggattatttcacaaatacacaaaagtaacaaaaaaattataaaaatacggtttcatagaattttnnnatttttacgattttttaattttatttgtaaaaaatacggtatttgtatgttgtacttttattaattttttgttatttgtatgctatttttggtagttattttaatattatttagatattattttcatattatttttatatagttttcttgttattttttatagaaaactgtaaaaatataaaaaaaaaaattatttaaacgttaaaaatgtaattttcttgcaaaaaaaaaaaaaaaaaaaagtgcatggtgcaattatcccgtttttaaatcgaagttaccattttgagtctgtttggtattttcgttgggctttaggcttttatcaacatttgggttttaagtcgatcgataaggcccatattaactcatcatcaatgtttacttgtttagtagttagtaacgtggcttcctattcttctaacacgacatcgttttactactttcgtccctaacttcccttcctctcctaactaactatcattctctctaggttttctttctgcaaaaatggcgaaaactctgaaccgcatcttttcatcaatctcgaatctatcgaccccaaaattgatttcccccttcgccaga

SEQ ID NO: 62383 - DNA, 915 bp, Cannabis sativa
tgcaaccaatgtaaggtttttaaattttatatgtgtttaaattccatttttttaaaaattcatagttaggatgttaaacaacatacatgatagtaaatttagattctggtaaaaccataatccaacagatggtaccgttgagcaagaaagtcgttattagtttagtcttattctactctttaatcttctaatgaaactgattttgtatttaagcttaaatggatggtctggatgacttaaattagctatgtactagttagaaatgatgaataatggatgctaggtattattttggtattttattgacttattatcaaatctatctattcagtgactacataactgaggggatattattgttcttatatattgatgagtggtcctaattttattactaatatgtttttattaatataggagttaatccattacttttaaattagtattttatgatataaataaaaggatcatttataagcttcatcttcttacaagggtcaacgtgtggcctttgaccacccaagttatggatattacatatctgtcacggcctagggctcgggtcgtgacactcttggtctctggtcacattaaattttcagaatgttctacactacgatataatcgtttaagttgcggaatcaaatgcatgtgccacatcacttttagtggataactttcctattctccttactcttgtttattttatgacggaataaaccacaagtcaggaaataatccatgtctgcatattccttatgatataaattaaatcattcgaacatgcatggatcttttcatacttcaatcctatggaatttaaagtctttttcacttcaaatatagattccgaaaagtatttgtcaaatggaaagatatctttaaaagcagctaaaaattgagtaaaatatttat

SEQ ID NO: 62384 - DNA, 1873 bp, Cannabis sativa
aaaaaaaaaaaagaaagacaaattcaatggtctgggaatgccatcagtcgagaattaaatgtgatattttgaattggggaaatctaaatgatgatattcttcttgagactcgcattgaagtaattaactgtcatttcatcaacttcacttcacgcaccttctcggtaataattatctccatggattagtaaagggataccacatgttgcttcattttgaaaaaggaaagttgttagccactaacacaactattttagaatgcctaaaggtgttacctttagcctccacctatccatccacatagtatggtgcaatcatccacaacccttagagttctgaaggcttagggggtaaatgttttccatgtttccagataaggacacgtaaaagttctataatgaatacaacttaaatattccaggcctaaataaaacaactaggttggatccgtaaatgaccagtctttccgggtgaagaacgagtgacccgtccaggcaggatcccatgcaacatgatgtaaatctagaagacattaaaccatctatctagaggaagtaattagcaaatatctagctacacacagaagtttcccatttattaccagaactcacaagatcaggaattgcctcccagagatcttgaacataagatcatatttcgctaagtatgaaaagatagtaattggcaaacaagaatttaatgtgtatttattctccatgaacataggatacaattttgacaactattatcgtgatgtggcatccacatgagcatacacaaggcacttcatgggttgggctttaccagataagcccaaagttaacatatatttttgtaaatatcccatcaatggaaaaaagggtaatgattatgatatctcaatactataaatatacaaagaaccctacatgaaaagggttagaatttcattactcacttgctcatgcaaaaagagagagttcatctgttcttgtaaatcctaaggcttttctagccttacaataataatatttacttgttgactagggctcgttaacgccctaactatgtaaaaatcctacttattattgtcctctttttctttgaattactattctttagttcttataaatataaataatcattttcttaaaatcttggtaagcagcaagtttctctaactgcagaaacatgttgactagagccttctctcccaaatacttccattctgagcctaggaattgaatccaaataggagttgatcttacattctcctttttgaaaaccatatttacatcccaagccttcataatgataggcttcttgtaaaaaaaaataataattaatcctcccttcaaaacttgattatgagcctcttcatcatgaaaactaatactgaaaattacatgtgcaattaaaccaaccttatacacctattccttccacattcatttgaaaaaactatcaaatacatcaattggtggattagctcctaacacatagcaaactagtgttgacttccaatacttgatttcatcagaaatgtcatccatattaactttaactcctaatgtcatcccggagcccaaaacgttataattctcaaaattttcacttaaattatgaatcaaattaccaaatctaagattaggagaaacgaagccttaccaactattgattgttggtcacaccacttagtagcttcaagaaactaagagaaatcatgtcgaatctcctgttctctttacaatcgatgcattgtcaattttggtgagagataaataccttcccttatcgagttcaagtcatccatctccacaacatctaaagatgttgaccttcttttcatcttcacttttaccttctcatgatttcctctcatgctatttacttt

SEQ ID NO: 62385 - DNA, 879 bp, Cannabis sativa
tttttaattggtatcaaagcgggacactaaactcttcgtgtgatcctttaatattttattctgttttctatagaacattcattttttgcagaatggggttccatttcttgtccactgcttcttaatgattctaattatccttattggaaggttagaatgagagctttcatcaagtctcaagatgagaaagcatagagaataattcttttacgatgctaatcaacaggtttgttaaaaattgtgatttattaaaactttacttaattacccttaaattgaaagtaaataactttttacataaaccgggatcccatatttaaaatatttataatcgtaatgaaaaaatatatgatacaaaagttgtcgcctagtgaccattcaaactatagcttgttgtcccagagattgtatgctccaggcctaactgcctccatatatacaatcttcatccgctcgcactcactactgttcagccttagctttgcccttacctacatttgcaaacagtaactgtaagtcgacagactctgtaagaaaagcataatcataacataaatataacccaaattaaaattaggcgcccatacacccaatcataaccctatcctcgcgtcccacgcgatactgagtctagaacgttcgtacgatagtattattaactataatatcagcctatactcagtactttactcgtactgatgtgatagtgtcaatcagtacttaagccaaacatacatttatcgctatccattatctctatatatactgatttgctatttaaatataatctaacaggaaatcataaatatgcatactgaacatgtattcacatatgcatatcattatactagtcttaccttgattttgaattgaggtgtg

SEQ ID NO: 62386 - DNA, 1098 bp, Cannabis sativa
acacttgcgtgtgcaaattatcgcaacatgatgtattctcaagttcaaatgctcaagaagtctggtggaatctgttttggggcataactcttccttccaaggtgaaattttttggataaagagttattcaatctgcccttccagttgtcaaatctttgtttcataaaaaaatcataacctctgctacttgttcactatgttcaatggcatgggaatctatgggacatgctcttttctcttgttgtcatgccaaagcagtctggcaaaatactaattttgatctcaataaagcggattgtatgaaagatggtgactatatgatgtatttatccacaattctaaccaagtctgaattggaaagagtaatctgcataatgtggtttacttggtcagatagaaacaacttcattcatggaaaataactgaaaaaaccggtccaaatattgtcacaagttgatgcatacttggacaattttcaaaattttaacaatgctgtcaaaccagtagctgttagtgcagcagctccagtagactgcattttgtggcaacctcctccagagaccaaattaaaaatgaatgttgatgcggctattgattcttcgaggagtaaaattagtattggtgtgattattaaggattcaaatggtttgtgttgtggctgcaatgtccaaaccagtagtcggaaattacaagtcgcaggagatgaaaagccaaggccatgttctgtggtcttcaataggttgaacaattgcaactacaacttcactatatggaaacagattgcttaatgcttgtcaatgtgttaaatggaaaatcgtgacaatgttctgttttttatgattcggttaaagatgtttcatatcatttatcctctttctctaatacttgcctatctcatactagacgggatgctgatcaagccgcacatggcctggctaaataagcattacagttggatagtgattatatatatatggatagaagaaattccttctactattttctttattactgtaaatagctgtatttaatttataataacttttttcaaaaaaaaaaaaaaaaaaactataattttttgagaaaaaaaaaaaaaaa

SEQ ID NO: 62387 - DNA, 1254 bp, Cannabis sativa
  modified_base (1155)..(1165): a, c, t, g, unknown or other
ttttagaaattcatattaggatgtgaatgaaacatacttgttagtaaatctagatcttcgtaaaatatttccaacattaagatataatgagaaggttttgtaaaaaccaaaaaccctcccgctgcgatgaggagctgtgatcttctgaataggaacattagtggttgttttctcctttgtatcaacttgcattggttcaacaaagggagtgggatcatcctctattttagtagaagacgatggaacattagttggagttatttctgaaagcatttcctccaatgctactttgtttttccccttgaagtttttaatctagccatcttcaaggaaagtggtgcttgtagaaaatactttatcatccttgtgacaataaaatagtccacccctagtctctttagaattcctaacaaacatgcaaactttagttcacttttctagcttgcgatctttctttcttaagaaatgaccagggcacctccagactctgtaatgacgtaaacagggtatacgaccatatcataattctaaaggtgtcttagggactaatttagatggaacaaaatttaaaatgtcagtttccatttaaatagcatatccccgcaaggatattgatagagttgaatagcatatcatagacctaacaatttctaaaagtgtgtaatttcttctctctgcaacttccttttgttgtggagtgctaggggaagtcagttgggattaaattccaagttcaattaaaagatctttgaactggatatccatatattctccacccctatcagttcacaagatatttaagattttacccaattagttttgagccaatgatagaaattctcaaaacttctcaaaagtttctgaaatcttatgcctaaggcaaatatgactatatctagagtaatcatcaatgaaagtgaaaaagtacttacaaccacctctggctttgatatttagtggtccaaaatgatctacatgcactattccttgtggttcttggcacgctctccatttgcagagaaagaacgttttgtcattttgccttttaagcaagattcacaaacttgtaatttacctaaggcgatattattcaatggaccaccttgttggaatatctttcaccaggacctagatgaaaataaacacataaaaggnnnnnnnnnnnttacattggttgcagcgaaattaaatgactcattccactcaaatctctaacgcttgtatcctttctgtcatagagtatcaccaagatct

SEQ ID NO: 62388 - DNA, 902 bp, Cannabis sativa
  modified_base (563)..(566): a, c, t, g, unknown or other
tcttcaacatcctgaagaaatgccgaaaattcgaatggtccgacgagtgcgaggaggcattcaaaaaactaaaagaacacatggctaaacctccgatcctatctaaacctgtcctcgaagaagacttgttcctatacttggctgtctccaagaaagcggttagcgcggccttagtacgggaagaggaaaacactcagcaccccgtgtactatgttagcaaacacatgatagggatggaggcacgatacccggtgatcgaaaaactagttttttttgcctcctaatagcctcaagaaagttaagaccctactttcaggctcacccaatcaagttattaaccaaccatccgctccgacaaatgggctatggaattaagctagtttgatctacattacataccacgcacttccataaaaggacaagcgctagcagacttcataacggagtgtcatgaggcagaagctagcgcaagcatgcccacaccgcaaatccccgcatggaaagtatttgtggacggtgcctccaacaaaagtggattcggagcgggggtagcaatgatatcnnnnaacggacttcgactccaggcagccctacgtttcgaattcacagcttctaacaatgaggccgaatacgaagccttgattgcagggctgagattagcaaaggctgtgggggccacaagagtagaagtcttcagtgattcgcaactggtagtaaaccaagtatcgggagaatatcaaacgcgtggagaaaaaatggccgtatatgtagcaatcgtccgagaattgctctaggagttcatcgactacaaagtggaaagaatccccagagaaaagaacgctcacgcagactgtttggctaagttagcatcagatagcaaaattgagaaactaggggtggtg

SEQ ID NO: 62389 - DNA, 1103 bp, Cannabis sativa
taaaaagatgtcgtggtactgctgacacagccacatcctctcagtcacgggatgctggtgttcaggttcaagtttcaacaagtcttgattctcggacctcatttgactcctcagcggaggttgctatgcaaccccgcctttcgccatgaaaattttaagctggaatgcacggggtttggggaacccgagtgcgtttcgacatctacgactgttagttcaacaacagtctccccaagttttgtttctcatggaaacaaaactaagtggcaactctatcgatcgtgtacgtacagctctacgtttttctaatggccttgagtctcctcgggttggtttaagtggaggtttaatgcttctttggactgatgaagttgaggtgactttgttacattttggaaaggtcttttttgattgttatatggcaccaactggaggaccatctttccactttacagccttttatggtgaacctgccagtaacatgagagaagcttcttggactctttttaagcgctttgcggatattgctccgctcctaccttggctagcaatcggtgacttcaatgagatactctctaatgctgataaatcaaggggttgtctacgaaatgaatctcaaatggaagcttttcgcagcactcttgaccgttgctgcctatctgaaactcaggtagagggtgatgtttttacttgggccaaggatcgtcttgctcctcattcccttcgtgaacgtcttgattggtgttttataaatcacatttggagcccaactttttctcagccacatgttcaacatttggatttctttggctccgaccaccgtgctatctcagctactttttctactgccacatcattacaacaacctgaaagaagaaggagtcgctttcgctttgaaaaactgtggttgtcggaccctgaaagtgcagaaattatcaaacaacattggtcctgtcataatggtgttgaacaaatcgatatgatactacacaatttagagatatgtgcggctaatctacaatcatggcaccaaaccaaatttggtcatatgaaaaaaagaattgcttcaacacaagctgctgtcaacgatctcaataactctg

SEQ ID NO: 62390 - DNA, 1794 bp, Cannabis sativa
ggaccggtaccagaagtacctcttcaggagggaataggagctggcttacatcaaggcccaggctgcagccgggaggacccttcgtctagaagctcctccggagaggaggccccctggcctaagcctgtgctcccagttcccaacactggtgctccagatgccagtacttcaggttctagtaagtctcctttagtaattcatcatgtcctttttgtccgagagtatacccaacatagacctatagggttcgatgagcgcctctgtaagtttagaatgccttccacccggtgggggaatcacgccaaagaatattattttcccacttgggtcatttcttgggtcggtcccggatgggctctggaccttcggtgcctattcccctagaccattcagcccatttgtcctccagctggtttctcccctcagacagctttcttggggatgatgaagccagcattgtagttcaagactttgctagggctgaattagagggtcagggtaggattagttttattgctttcttgttgggcgcgcgcctttctcatggtcattctaacactttgtttatttctttgttgcagcagccaggccaatagaggatcttctggctacccttgccgaggcctataaccctgacgcttctttgccttcggccccatcccaactggtgacccccgggaggtcctcgtccagtgccccttcaggcatgattgtcttgatagacgaggagggggaagtcgaggaggatgagggcgaggctgcagccgcccttgagcgcaagcggaagggaaaaatggttgagactgagccttccaagcggccccaaaagaaggacactccagctgtgagcaatgactccgagattccttctgaagcggaggagtatactgtgctgcacgacatcgtgctcaccccagtccccgccgacgaggaaaggcaaatgctccgcattgccaaacataactatgccctggacgagttcagtcggggacatgctgaggtggaggccctaaagaagatcctgcgagaggagcagcagaacactttgcgcgaggacgctttctggaatccttgggacctgaacatggaccctttgacggattggttcaaccactttgtcgggcctacccttgctcccttcgcctcagagatgaccagccagtttgtctcccacctaactcagttcccacctaagagatccgctgcttgtgcctccgtgaactccgtttaccaagttcaggacatcagtgctgctctggccgcggtgagtacttgtgattttatttccttcttttagattttttcttaaggcatctgatttcattcttgtatctcttttcagattactgccgagatcggccgtctttccaagaccctgattgaccatgggttcgtcatgtccaaatttgggggtatggacgaggccgtgagaattttgcgggacttgtctgccgaaaggagggcattccgggaagaggcccagcaaagggaggcccttgcggaggcgaagtaccaggaggaggcccatagagggaggctcaggcagaggtaaggcactgggaggagctgaaggcagagggtgaggctacagtaagggccaagcgcgagctgcgggaaaccaaggaggctatggatgaaatggctgctaagttaaagtccttggaggagctgcatcaggcagacttgcagtcgacggccaacctgactatggaggtgaaagaactaagggattttaaagatcaggccttgaaaaaggccaaaagagatgaactcctgacccccgtcgtctgcaag

SEQ ID NO: 62391 - DNA, 1682 bp, Cannabis sativa
  modified_base (1515)..(1518): a, c, t, g, unknown or other
ttgttacaatataataatatacaatacttaaaaaattatataacttaatttaattattatattttttaaaagaaataatatatagtaagtgtatttttataattttttattagctaatttattatatttggcaatttttttaatttttttttttaaaaaaataaacatttactagcttagtttctaaatttatagtcattttgcatctcagctcaaaatacaactacacaattacattacttaaatatccaaatcaagtaaacatcaatgaatattgttgaaaataaccttaaagaaacgtcaatacaatacacaaaaaaaatttaaagcatgtacctttaaaaggctaaacatatttttatttttcaactatttgtacaactaaataactacaaataaataattatgtaataactctattttaatatacaaattaaataggtatcaatacattggaacatctaaaaaaactttaaaataactataaaacacttacacactaaatcaaaattatatgcacctgtgaaaagttaaacatatataatttttctcttgctgaacaattaaagaacaacaataaaaaactgaataacaactccaagttaatatcaaaattagttagcatcaaaatattggttttttacttaaattgaataacataagatatagcttttttgctacttaaacataaattcaatacaaatttgaggacacattaattttgagcattaatcttaatatattttgccacttttatttatttatttatttatgaaatagatccaatgacactttgatgatttgacatgaccatatggtttttacgcaattttttttcatttttgttttctaaaatactcatttaattaatattatttttacttatctatttttatttttttaaaaaaaaaatctatcaaacctgaaacgtgccatttggcacgtcctcccactaccaacaaacaaggttcacatacatcagtctttccctttaaaaaatctcataccgtataaaagtaaataaaaagtataaagatttaaaaaagaaacaaaatgtgtgttccaataaaaatataatattttaagcattttagtcatttaatataaatttttctaattttttctttttacttattaaagcttctaaaattacgtttttttttttcctcttccttatttttttagtcagtaaaaactatttttttttttaagttagttgttgatttttctttctttctcttttctctctctctctctttattttttattttgagttttttcgcagccaaaccctcccaactatcattttacttacacttaaccctccaagcttaaattttagcggaaaaatcttctgaactattgaatagttagtaaatttaaggtgttatccagttagctgccgccatgagctacttatatgtacactcttgtacacgtgacatgtttatattggtgtactcaatattattattattttaaaattaaatatttaaaaaataaaaaatattatannnnttgaaataattttttataatttttaaataataatattaggtgtacctatataaacatgtcacgtgtacacataagcagtacatgttggcaaccaactctgaaaatagatgacaccttaaatttgctaacagctgtattttactactaaaatttgagcttggggg

SEQ ID NO: 62392 - DNA, 813 bp, Cannabis sativa
agtagctgaaaagcatgccccaacaattgtaactgtggagatgctcatgttggtaggattgtacccttctgagcataactcaattaccgcaagtacgatcgatggacctaatgctcttgttgtccccattgatcgacggaatccttctcatgggaactttactacagctgactcttctacacatatgtcgttacaacccaccacttcgaggagggatattggagtgattattggtgtcgatagaaattctgagaatactacagtgctgaacgattgagtctgaaggttcctttctcttctttttttttatatatacttattcacttttttgaacatattcatatgataatattatgatgttgtgtgtgttgcaatattaacgttttttctctttttcttacaaattcaggtatgttccaccaactgctcgcaagttatgatgagactgaggatgtgagtgagtctggagaagaggaaagttttcaaacccttcctttagtccctcgagcctgttcccaactgaggaaaccttgtcccgtagttgtaggaggtgaggagaattctcaagcttctccttctgtcccaaagaccagtggatacatgagaagaccttgcatcgagtttcccaaaattcatcccgataatgctacaatttggatgctaaagtctgtgcatgacaacattgacctccttgttcgaaaaactgcagctgttgaggtggtgtgtaacatgtccaattatgaaggtgatactgtcactaggggagtccaagatatccttcgggtaagtgatggactattcatcaaaatgtat

SEQ ID NO: 62393 - DNA, 1153 bp, Cannabis sativa
ttttttttttttttttgtggttgaggcgactagattttcgtttggactttataggggtttgttagggttttcttgtgggctgaagcccatttagaagttcacaacccctttagaggcggttatttggaaataactccctttaaagggtaacccgctttaccctttacatgggttccaagatattttttttcccttttagctatagcaacacttatttttagtgtgattttttttgtagtagtagtagggaaattttctcaacgaaaatgaaaagaagaagggaagaaagataatgggagagggggtcaaggatgttggtagcttctttaagtaaatgaactttaagagcgacatatgttgcccctaaaaattgcctttgaaaaggaatcttgttgtaagacagtcttttagtacacatgtttttatctgtaactataaacaaagtatatcaaaattaatatacctacctactatataataaattaaattaaaattaattatttgaaaaatttacataatagaacaaaaatttgaaaaaaaattataaataaaaatacttcaactcggatttttttttatttttactcttaaaatttttatttacaaaaatacttctttaataaaaataatgaaatattttttggttgttttatagtttttttatagttgtcatgtggttgtttttctggttatctttaattattttataattatcgtgaggttgatttttcattgttgtttagttgtttttttactttttgttgagcaaaatgtatttttataattttaaaactttccaagtatatttttgtaattaaaaattttaggcagcaaaattataaataaaagcataacaaaagggtatatatttgaaaatttcccattaagaaactaattacttatttgtcgtacaaagtttattaatatacccaaattttcataataaataacataaataataaatatttatgattcattctctacctaattatactcatgttattttaattggaatatactttcttttttataaaattaatataataaatattttcttctttattattagataaagaaagtgtgtaaaaaatttatttattgaacgtaaataattactagtaattaatttgattactaattgatatttaatatt

SEQ ID NO: 62394 - DNA, 970 bp, Cannabis sativa
taagtaagtgtaaaggatggagctgaaatttttcaattttgtaagatgaactttctcatgagataataatattgattccatatacactattattgtatcaattaattcatataaacagtagcattaacttctgctcaaaaaaaaaaaagaaaaatatatattttttatttttcaatccttatcactcctttaaaaaaaaaaaaatcaaaaaatcaaaatcacttgattgaagcaaggaccatagatattgaataatatataaatgcagttggtagttgcaacgaaatagaataggtcctcattaaatcatattaaatgacaaaaacaaaaacaaattagcccatttataatgtgctgctcatttcttggtgtgtatagacgtgtttcaaaaaaataaataagaaagtattatgactgaaataacaagaaaagtagtaattgtgggaatttgatagttgcaacgaaatagaataggtcctcattaaatcataataacctttcccaccacgactaaagtaaatactaatttccacaactgtgtatgcattttcacattatatcacatatatctatttcttttatcaccttctttctttttctgtttattaatggtaacactattaggatatatatatatatataggaatataattttgtcttgtgatgtactttcatggaatgtattccgtctcacgtacattaaatgaatgtcagagtacatttctactttttaaccctaattacccataaatcaatctcaaccgtcagatcaaataactttcttatctgacggctatccgtgaaagtacaataacaggaaaaaattatatccctatactatatatatacgataactatttaaaatttgtcatttttattgcaattttttaatttattatttatttttatttttgaaccgttcgcttatgtgcagcttacaagccattagcatagtgagggtagatgagtt

SEQ ID NO: 62395 - DNA, 884 bp, Cannabis sativa
tgtaaacataaatgacttctaatctttcattgataacaaaccagattagattgaaatgtgttttatttagggcataaaaaatcccaacacttatgccggtaataataaacattgggtttatgccgcttataaacttaaaactttgactacttatgccaatatttgcccaggaaaatattttctatttttgggaattaatattttccagtatactgtggattcctacaagtcttcccctacattttcaactatttccttctctagtgatcctcttcttagattgatggaagcttcagagggtcttcttgcagaagattctctaaggcttaagtgagaaataaagattctagcttagagagagaaagcacaagaagaataaagcttgaatttagaaagagattccgatccctttctttactctttcgcactctttatagtagagttctgctgatggtgaaaaatcttttagccaacttaatgtagccaatgcaacgattatctgaattttgggtctcagaattttcgcttacattctattttttttttgataaggaaccaactttattgaaaacaaaaagaaactacaacaaactcaaagctaccgaaggggcaacgactttgagcagacccgaagggcaggacttggcacatctcgcccagcccgcaaccgcatcagccacaccgttcaaagaccgagggcaatgtacaaaaacaacaagatcaaaacacttacaaacacatagacaagattcaaaaacaggataggtgccccaagcataaggcaaatagccattgttcaaagccataattgccaccttggaatccgataggattttgatcttccttacaccccgctcacgagccactttcaacgctagaagaat

SEQ ID NO: 62396 - DNA, 759 bp, Cannabis sativa
agtggcacaagtatttaaaatttttgagtttataaccagcaaaatctcaatttatttttagccgcataagtactaatatttgtaaaactataatttttatctagttttatgagtacagacttcattataaagcccacattttaaatcatttataggtctgaataaaaacatgtagtataaattatttttaaatattcttttaatgaattcaaatgaaaaaaaaaaaaaattaccgttttcactagcattgagtatttatgctgctaaaaaaaatcattaagtttatgccgtttacatactcaaaactttaagtagttatgacgcaattaacccttaatatgaaatataataagaacataattcagccattcattaagcgaaaacgagtttgacacaaatgcttgtcatacctgcaattgaggccaaatcaagagcattggggacgttagcctcagcttcaacagcagcttttgaagctgcaatgccgactgccaagctttgtatcacatccaaaccagcacaaatagaagaaagagtcccaccaaccaagcaatcaccagccccggtaagcctcacaactgatgcaggaagagccggaagatggatagcaaatagaagagtctctgattttgcacagtcagagaaaagtttacgaggacaggctgaagcgacggtcttatataactttcttctagtaacatcttgtttgtacccttcatgatcaacgctcgtaaatcttggctctccattagagcataa

SEQ ID NO: 62397 - DNA, 1156 bp, Cannabis sativa
aaaaacttattatttattataaataccgcgcaaagcgcaaataatctatagtgtacacgttcatattaaaaaaaatattgactaaaatattttcatgtctaaataccaaaacgaatataaaatttattgaaatactaattaaagcagtgtactatagtcttactttatattaatatagtataagaatatataatatctctagatccaattattaagaaataaagttggttcacaaatttttatatctactctttttttttatggattcagtagttataatatactattagtaaaaaataaaattaaataatgtataaatttctttctcaaattaatatatataaatattttacaaaaatattaaagctaaatatataaatttattatataacaaaaccgcgcaaagcgcggtaatattacctagttaatctattaattcaaagacaaagttagttgtatttcaaagttcaaaaacagcacatacaaatcaattacgcatgctaaaaaaatacaaaggaagaaaagaaaaagttacttcaaattaaacgtacatttcccacattaatttcttttaaaatgaaaatgaagctataaataatttttgtgtactagaaacttattacgacctcttgttcttgctccctaaaaacaaagtgaagtagaaaaggattctaaagaaaaaaacccaagcaattgtgatccacaagcagttccatttactaatatcagtaatcctatgctgcttgagtatatccgttctggtggtcacgcaagtggagccagtaatattcattcccagagtcttactcatggtcttcaaaagctcccctttcatcaacgtcggcactgcaccgagtagagactgatcagaaatctgaattcctttcacaaaatacttaattggatcatcaaactcgttctgtaaaactgcttcataggggtacttaaccagcgagatatagtggaaccacaaccagtaacgtgggattcgatcacgactaatgaagaagccactgaagagaagaaagtaagctaaaatggccaccacgacagtgtatcccaacatgacatgggttactactgtaacgcccgaactttttcataaattactaatttagttacaagcgttaaaatgcggaaaaactataatgtcgct

SEQ ID NO: 62398 - DNA, 1345 bp, Cannabis sativa
atgtaagagtttggtagtcaacctgggcactgggtactaactctcgagatcttgtttttgatactttgaaggcttttgaacttgaggacaaggtctccaaccctgtttttgaccattctgaatcaatggtcacatcaaatttggcatttgagtaattaaaggcagtgtcctaagttgattgtcaacctaggcgatgggcccagcaccaggtcaacctaggcactaggccccttttctaaaggctcgattttacagttttcttctcgagcttgcttgaatcttcattattttatatgacggaaaaaatgcatgaaatactttttgatgaactggatcgaaaatagccaggttgacaatatgttaacctaggcagtgggcccagccccaactgtcaacctaaacgctgggtcccaatttcgccccttcataaattctattcggtcccttgaaatagttgaatctcaatattttttgaaaattgagaagatgctcgaaagaattcttgaaaaactccatttaaaatggcccaagttgacaaaatgtcaacctaagcgctgggccctattatttacacccgtgaagtgttgtttcttcttcaaaatgacatattcccccatttttcataaaaatgaagaagattaaaaagtcagatcttcgatttgatacttggaaggcgcccagattggcagattgtcaacttgggcgttgggtgctcggggccctaagcgctcaaaaatgaacttgctctgattttaattcgaatgcctcaatatgtcggtggtatgtctaattgatattacaatgtaagttttaacccttttgcactaagacggtcctaaaaaactgaaactaggttggcttctggttgcagattcgtataatttcaactctcgggtcttgtattaggttgctcaatgtcttcatggtttagaatactgaaagatagtgagttagatccatgttattgaagtctaaactttcatcccagagatcccgacgtcaacctaggcgtagggctagggtcccttcccaggttaacttctatgactcgagtctactcaactttgtggtgtcatccttcatggcacgtctcaaacattgatgttcacgtcactagggaaaattttcgagttaacaagccatttatatttttaggtaggacatatcactttttaattttaggattgaggttaattacacatcattgtgtatatataaagtatgtataatttgagtgtttcccaatcatttttcttaaggataagataacatcaccagtggaggtgctaaaaacatttctaattatccaacctgagtaaactgcactaaccaaactgaataactc

SEQ ID NO: 62399 - DNA, 787 bp, Cannabis sativa
aataatttcttcagcatacttttttaggggcaaaaatagaccgctagcatgttgagtgactacgattccccccaaaaaagaactcagtggaccccaagtctttcatagcaaattcggagctgagaagtagcatgatagatttgcaaagagcaacagaagaagcagtgaggatgaaatcatccacataaagtagaatataagccatctcatacctttcttgtatatgaaaagagagttgtcatacttgctctgagagaacccaatagaagaagcatagttggaaaattatttgaaccaagctctaggagcttgcttgagcccatataacaattttcacagaagacacacatgattaggatgatctggatccttaaaaccgaagggctgatgcatgtacactgtttcttttagttcaccatgtaagaatgcatttttaacatccaactaatgaatgggccaagccttagagagagcaagactaagcaccgttcgaaggtttaactaccgggctaaaagtttctccacaatccatgccaaattgttatcctgcaccatcacatacaagtcgggctttatgccgctcaaaagaaacgtcaaatttttctttatgtctgaaaatccacatagatcgaataacattagcatcaggtggatggggcactaaatcccacgtattattcttaataagagcaatatgttcatcatccatagccattttccacttcgggtctcggagtgcagacacggggttacgagggagaggagactttgtgacattagcatttaa

SEQ ID NO: 62400 - DNA, 1079 bp, Cannabis sativa
  modified_base (488)..(501): a, c, t, g, unknown or other
tttggtacatgtcgggacaaaaatcctaattagcataaaaaaaaatgatctcaaaataaaatgtgtagtggagatctcttacaaatcacataaatggaagatgattctcaagatgatcatgactttgactataatatgttaagcttcaactactattgtattaattcttttttaattgtaaatactttagattcgattaataattaacaaaccatgtgaatcgggcttttaactaaatataatatcttattcatgatatactcaataaagtttttttttttataacagatatactctattaagttattgtttcataaacacgaacatgatcatatgtacgttagctaggcacaattgactattaattattttatttataaacatatctatactacaaaaagagggtcttcttacaaaaccaaaattatgaacattgagtggtcattgctataatttagtgatttcgcattattattattattattatnnnnnnnnnnnnnnttattattattattaggctaattatgatttttgtcttttgaattttgacatgtaacaattcatctttctgaacttttcaggtcgttaaaaataccctgaactattgagattgttgaatttaaaaatatttgtctaatttcattcaattttactgattgtttatgtacgaaatcatgatcccctgattttgatatcaactaaattatatccctcaaactttgacatgtactaaattatgacccatgaactttctccatgttagactattttactaaaattaaaaaataaatctttaaatctaacaatctcaatagttcagagagtacttttaaaaaccttaagaattcaaaaacatgatttgatacatatcaaaattcagatgacaaaaatatcatatttttattagaaattattgtagctagtacttattattaatttaaaacatatttgcagtgccaacatattgggatgggcaatgatggtggctattgggatgaatgcagcaataaggtaatatattatatagtaactccttaaaaaattaaaatattaattaattaattaattgttaagatcat

SEQ ID NO: 62401 - DNA, 1061 bp, Cannabis sativa
aacactaatggggaaaaatattccaagatgggtttgggccacatttcactaatgagtaccaactatcagaaaagtggtgaaatttcattatttcgattaaaatgattgttagtacttgataactatattttctctcaacgtgaccaatagaaaagtaatgcataatagtctttgcttcctcctcataatatttcatgattttttaagatgtgcatgcatggttagattttaagagaacactaacaaatgttagagtaataaaaaagttgttaaaatttaccttaaaaagaagaacatttttaatttttcaattaggatgtcaatttaaccaaacttaccgtgaaacctatatacatattcacttcttaattagtagtacgaatttattgtgactagtacgaaaaaatatcctaatgtgggttcatgtaacattcacaaaggagtatcactatgagaaatgtgagatatttactattttgataaaaaataatttttagtgcttgaaaactaaattttctctcaatgtgtccaatagaaaagtcatggacagtggttttggcttccttgctgtgaaatttcatgatttttcaagatgtgtagggtgagattttaaaagaacactaacaagtgtaagagtaaggaaaaaacttgttaaaatttatcctgaaaagaagaatatttttaatttttaaattagggggctattttaaccaactttaacgtaaaacctatatacttatacacgtgttagtagtacgaatttattgtgactagtgaagaaaatattctaaaatgagtttgggccacatttcacaaaaaggtaccattatcagaaatgtgagatttttactatttcgatacaaatgattattagtgatggaaattaggtttctttcaacgtgtcaaatagaaaagtgatgggcaacaacttggcttccttgctgtgaaattttacgaattttcgagatgtgttataaggtgagatattattagagaacactaatgagtctaagagtaatataaaaattgttaaaattaatttacactggaaagaagaacat

SEQ ID NO: 62402 - DNA, 1250 bp, Cannabis sativa
cacattgatgagtttaacaagttaattctcgatcgtgaaaacattggtgtcaccattgaagacgaagatcaagcctttttgttgtttagttctttaccgaagtcctttgtgtactttaaagatacaatgttgtatggaagagaatcgatcacactcgatgatgtgtaatcagccttgaatttgaaagagctaaatcagaggactgagtcaatgaattatagaagcggtgattgattgtatacaaggggcagaagtgagaaaaaagaaagccacaaagttttaaaagtaaaatcaagatctaaatcatagtttgataattagaagaatctcatatgatggatttgtaagaaaatagagcatctcaaatggtcatgtccagagaggcataaaacggggtgactcaagatgtgaaggagatgcagcagtgagtagtgatagttatgagcttgtgctttgttggtaacctctaagaattcagattttgaatggatcttggattctgggtgttcattccatatgacaccgaataaatcttgggtcaaaaaattttcatttggaacttatgggactgtgtatcttggcgataaccagtcttgtaagatggtgggaattggaaccgtaagattgaaacttcatgatggtgttgaaaggatgttgaaggacgtccgattagtacctgatctcaaaggaaatttcatgtttgttagtactttagatgataaagggtttcttgttaaaattgagaaatgagtcatgaaagtttgtagaggttcgatggtggtgatgagaagaagaaaatcaaatgggatttatcctctggaaggtaccacagtgaaaatcacgaaggcgtgtgtttcaagcaagcatgtaaataaaactgaagtatggcacaagagacttagccatgttagtgaaagagggttggatgaactgtataagcagggattacttggaaaagtaaaacttgagcagttagatttttgtgagtattttgttcttgataaggcttgtagagtcaagtttgggattggaaaaaagaataccatgggaacactagattatgtacatagtgacttatggggaccctcgagaatatcatcacactccaggagtaggtattttctttttatagttgatgattattcaagaaagttatgggtgtttattttgaagaacaagatagaagatcttgaaagatttaagcacgggaagataatgattgagattcaaactagaaggaaagtgaaacg

SEQ ID NO: 62403 - DNA, 1220 bp, Cannabis sativa
ttgagattaagtgtgtgttgcgataataatggaaggttgaaacttgtgtgttgtagtgaagtaggttctgagaaatttgtgtgctgcggagatataaggtaaaacttactatatgatatttgttatttgtagatataatatatgaaagtagaaaatgttatagaaacagagcaaattctgcctaattttcaattatattttttgtgtgttgtttatcgtgttttttatttgttgatgtaggtacttataaaattggaaagtataatagaaacaatggaaactctatctaatttttaattatgtttattttgtgttgtttatcgtgtttgttatttattgatatacgtacttataaaattagaaaatgttatagaaacagaggaaactctgcccaatttttaataacattgaagatttataaatactaaaataatttaacttgtttaaaaattgctttgaaataatttttaacttgtaataccattaaattattttaggtaattatagattaatatggatagagattggatgaaaaagaatagatcgtcaaaaaggtatgaagatggagttaactatttcatgaattttgccatgcaaaataaagaggatcctactatgatatcttgcccatatatgaagtgtggaaatttaaaaggaacttctgtccaatgatgtgtactttgaatgtcaggggtgagaattgattttaacttcaaaataaacctaacccctcaaaattacaatttatttgcattcttttttcacctttgatatatatgaacatcggatgacatcttagctattttattgttgttagattgtcattctattctaatatgaagttaataatcttaggtaataataactgttcatcaagccttaacaacatgttgtgtaaaagttaaaatatacacgtgttaaatgattagcttcctaaatagcactggaaaaaaaaaacttgttagtccatccttgttgtaaagcatatcattgttcttcattatattagttaacaaaacagtgatatttactattattttgcttaattgcaacataattttttgagtttacaatattatttttgtgttcagcatatcaatatatgttgctttaatgattttctttcatgcaggttgttgatactcttgaaaatattacacttaaggggataagccactactgcaaaatgaggattaggaataaaaaatagttggttgtta

SEQ ID NO: 62404 - DNA, 1274 bp, Cannabis sativa
gatcaagctctggttgtgggttcgggtccaggtccaggtctgcgtccgagtcccaagttccattctcgatttgagttgggttcagttctgggtctaagttctgggttccgatcctagtctgagtttgagttcaggtccgggtctaggtctaggtttggggttgattctaggtctgtgtctgagttcaggtcccgagtaagggtccaattttgggttttggtctgggttcgggtttgaacctggttcgtgtccaggttcctatcctcttgcgtccgaggtaggtttcgggtctgggttagggtctgactacagattctcgaacccaggtcaagtcctagtttgggttcgagtcccgaattccgatttgggtctgggttccggggcctaagtcccttgtttaggtcccccatctatgtccggttcctaggtcttggtccaggttcaggtttgggtcccgagtcttggttcgagttcgggtcccaattcgggttcgggtccaagtttcgttccaagtcttggtccgggttcgggtcccagtcccagtgtcggtctattttttaggtcccatgtctaagtctgtttgttagttcctgggtgtggtcccagttttttggtcttgatctaggtcagggtcgggacccggtttgggtccacgtccaggtcttggcttaggtcccaagtcacaggtcccggtccgggtcgaagtcccagtattggttctggtcgtaatttgggtttaggtccgagccatgatctagggttgggtcccgtgtctcgagtctagggttcagtttttgatctcggtcccagttctgggtcccaattttttgtcaaaatcccctatctaggtcccgatccttggtccagatcttggtcaaggttcaagtttggggcccaagtcccctatctagatgtggatcccacgtcctggcctaggtccaagttcaggttcgagtttggatcccaagtttgagtctaagtctagttcccagtacgtgtttaggtttgagtttgagcccaggtcccgatctgagtccaagtccctgttcgggtcaggctcggggtcccgatttgtgtccctgtcaaggtctaggtgccggacaacgttggggtctaggtttcggtccgggttcaagtcctgagtttgtgtctaggttcaggacgagatttgggtatgggtctgggttttgggttccgatctcggtatgggtatttagggttttagggttttgtgtttagggatttagggtttaaggtttagggcttagggttta

SEQ ID NO: 62405 - DNA, 1306 bp, Cannabis sativa
aattaatcaatgttgttctccccatataagacaagttcctagaactccacatccgaatccttcctgtcattttttcaagaagctcctgacattctcctccagatagtcttttagagcaaatagggattcccaaatatctaaaaggcagtgtgcttctagagaagtttgatgcttctaagatccgattcacctccaattctggaatccctgaacaatacactgaagtcttctgaacattaggctccaacccagaagtggaagagaaaagcttcaaaccttggagcatgagcatagctgaaataaaatcaccattacagaataccaataaatcatctgcaaaacaaagatgattcagtttgagggctgtacacctgtcatggaacttgaatcctggccattctccaatcttcttaaaaattcgagacaagtactccatgccaaggacaaaaagaagaggggacatgggatctccttgtctgagccctctctttgcttcaaaaaatccacacatagagccattgaggagaagagaaaactttggtgtcctaatacaattcataattagttgaatgaactgaattaggaaaccaaaagcaactaacatctcctccaagaaatcccaatccactgtatcatatgccttccttaaatcgatcttgatcatacaactaggcttacaatttttccttccatagagtcttacaaggtcctggcataccaaaatattatgtgctatatacctcccatgaacaaagccaccttggttttctgcaataaggtcaggaagaattttcctaagtctattggagatcaccttagtagctatcttaaacaatacattacaacaggagataggtctaaaatcagctacacttttaggacaaaccgatttaggaatgagtgtaatggtagtggcatttatctccttaaggattttcccagaattcaagaatgatagcatagtctcctcagtgtctttaccaacaatttgccaacaatcttgatagaaggcactaccaaagccatcaggtcctggagccttgttcccagggatagaaaacgcagcatctttaacttcttcagcagtataaggagcagagagaatctcatgatgaacttgagtaagtttaggccccaagttaacagtagactggtgaacatgtcttctgttaggcaaggacttccctaacaatcccatataatagtctaaaaaatccttttgaaccccctcgggattatctctccaaatcccagtttcatcttcaatggaaaattttttatcttgtattcttctagctttcaatga

SEQ ID NO: 62406 - DNA, 1190 bp, Cannabis sativa
tatgcatatccccaactttatgaaggccaaggtgctagagttgaatgaagcttttctagtggcatatgtgaaacttgggcgaactgatgggatttattacatttcagcacatagttgagtgaatcggctctcatgattggccaatagtaaccggtagaaagcgccctatttcatagacttcttgaacctgattggttgccacactctccttcatgtaacttggtaagaacatagtgatcctctatttgatttctctcattaccacgagggatttcttgttccctagtacggggttgccttcttttatcgtttctacgagaagactttggtaagtcattgttttcattcccctaggttgtgaatccccatggtctccgaggcatttcttgacgaggtgcctaattatttggttgttcatcttctggaatatcccaagtttccccaggtttctcctcctgagtgttatgggggttttcctaagcagtctcctgcctcctggttcttgaacctcgaggtctacctcgtggccttctcactccaagatcagattggttttgtgtgttgttttcatgagtcgcactagctgcggttgcctccctctctaactcagcgtttcgttggtttgcctcggtcaaacgttgccggagttggcgattttctaactcaaccaacggtacgtatctagtggggtcgtaagcgccctcactcataggcatagaaccaccagcattaatgttggtttcctcattcccagtttctaggtttggatcattatcacgttggcttcttcttgaacgtgttgatcgtgttgaacacgttatttgtgaattgggtggcctccatgagcccattggctcttttttgggacgacgattagtctcttcaggacgactattgtcgtttcccagttatcagccatggagaaaaatttccttcttctttagttaggagggatttttctgagcttttatcacgtaggctctcaatgaaagcaccaaactgttaacgtagattttcgttaacgataattaacctattttcgttataaatttggcacataaattgtaagaaatttgggaaaactaatagaaacaaagataacaccagattttttacgtggttttgcagttaactctgcatagtctatgagactatcttattcagattttttctcttaagattttttgtcc

SEQ ID NO: 62407 - DNA, 996 bp, Cannabis sativa
  modified_base (297)..(297): a, c, t, g, unknown or other
ttgacagtatcacatcggtacgggtagagtatgactagcttaccgagtataggctgatattatggtcaatagtattgtcgtacgaacgttctagactcagaaccgtaaagaacacggggatagggttatgattgggggtatgggcgtctgatcataatctgggttattgttatgttattatttatgcttttcttactgagtctgttgactcacaattactatttccatgtgtaggtaagggcaaggttaaggctgagcagccgtgagagcgggcagatggagattgtacatgtcggngcggttaggcctggagcgtacggtatttgggacataagggcttattttgtatagtcgctaggcgataaacttttgtatatgcacagtgaaacttttgtacatgctttgtaaacaggatccctgacttatataagtatattattttaatgtttgtaattaattaagcaaaattttaattaatcacgatttttaataaactcgttgattagcaacgagctggacagttagttaaaaatcacgttaacatccctaaaatagttagggtgttacaatatagattaagggattagatttcaggttcctttttcactttacttaatgccctttatatagtttaaggcttataaaagataaatattcaagtaagtaaatatcctttaaaaataagaaagtaactcttttatcatatatttatgttacacaaataactaagtaatatctctaagagatagtttaaggttgaattcctatcttcatgggttgttggagttgtctcgtaactgaaactaagttgtgaatccctcagagagatagtcgtggacctcattattcaatcagactcctcattgatggtctttgtttgtgttaattggccttgcctttgctgagacctggccgacacataggcttcattggccagccagggtatggtctggctagacctccttgactggcgatttccttctgttgggttttagg

SEQ ID NO: 62408 - DNA, 761 bp, Cannabis sativa
agaaaagttatgcagatctgaaacacaaacatatagaatttcaagtagaagatcatgtcttcctacgggtatctccaatgaaaggggttaagtgtttgggaaaaatggtcaagctatgccctagctttacagggccttttgagattctggaaaaggttggattggtagcttaccgtctagccttaccactatctttgtcagcaaacgtatttcatgtttccatgttaaggaaatatgtctcggatccaacacatattctgagttatgaaaccctagagctccaacaaaatatgtcataagcaaccagtacagatccttgatcggaaggataaagttcttcgaaataagactatagcattgattaaattactctggagaaatagtaaagtggaggaagccacctgggatttagattccgatatgagggctcagtatctggagttatttaggttagatttcgaggacaaaatccttttaacggaggataattgtaatgaccacataattttattatgggaattagcagataattaggacttactcttagaaataggatttttatggagatatatttgagttctaggtgtattatgtatgttatatgtgaaatattatgcttttcatattttatgcctggcaacagtggaatgtgacaatttggccaatttgagtcacatagatacggtagagtatctaagaattagcggggcaagatagttagacatttagaatatcgagtttatttggggatatggttttgg

SEQ ID NO: 62409 - DNA, 1566 bp, Cannabis sativa
  modified_base (564)..(571): a, c, t, g, unknown or other
  modified_base (769)..(786): a, c, t, g, unknown or other
aaatgatttggatgggccctatcatgtttttaggtttacacagatgaaagaaattgtaaaatttacccgttacaaattatttaaaaggtctattgacaattggattatgattaaaatcaaatcatcagatctgtcaacaagataatcatagcaatttagataaaataaataatagatttataaaaaaaatttgaataaataaataaacaaacataacaaacatgtaaccgatatctggaaagtaggtttagatatttctatttaaaatatatcttaactagaatttaaaatttaggttgttggagaatattaataaaaaatatttataatctaacaaatctcctaaatatctaaaattctaactgaaatttaaatatctagttaatttttaaattttcagtttatttaaataatttaaattaactaaatatctaataagataatataatataatatcttcattttaaatttagatatttctaatattatatttctaatcttataatttaatgaattaaatataacaaaaaataaacaaattgaaaaataagatatttgatggtnnnnnnnntatcaattttatttaataattaaataaaacaaaatatcctaagtttgaaaattttatggttaaccaaaccctaaaatttctattcaaaccaaaattaacaaacttttcaaaatttcatgttatttgacaaaaataaaattttaattaaaatatatatctaatatgataaaatgttaaaactaacatttttctaatctnnnnnnnnnnnnnnnnnnaatatatttcaaaaataataaattctaaaaatctggtatggttagcaaatttgaaactttaactagattatttgtaatttttttaatattttaatatcaaaataagatcatttcaattttaatgacaaaataagtaatatcttatcatataattaaaataaataaaatatacaaaaataatcaaagtttcaaaattaaccataagcctagtttgtggaaaaatcaaaattttaaattcaaaggctactaattttaattaattaaaaaattaataaactcaaaggctactaatttctaaaactaattttaattaattaaaaaattaataaaaattagttttattctaataattagatttttatttaaaaaattagattctacacaaaattataccaaaatttgaattttgtttcaatgaaaaataatttttgaatcaaaagttatcacaaaaataagattgcacaagggagtatgcaatgcatactatgcatactccccgcgcgcgcataagggagcaaagtgcgtgaaaaaaggctgcattgcagcctacttgagggggatagctcagtcaacaggggcttaggacagctcttgttcgagaaaatcggtcgtgggctgtctaaagccgtgtgaatgccgagtgaggccctcgtccgcacgcgtgtgtgcatctcgttgaaatatttttattcaaacttcaaaaaatcataactaattcataaaaaatctaaattaagttttgtaaaagcctaaatttattaatttttcatctaatttcca

SEQ ID NO: 62410 - DNA, 586 bp, Cannabis sativa
aacaaacaagcaagaggggtcaaatcagatttattcgaaagtagatcatgtttttgtgaatgaggactggagtgatcttttcccaaacacttcagccttgtttaactaggaattaatttcgaaccattgctcctgcatcatcactgctgctgctacctgtgagatatgctttaaaccgttcaagtattacaatttctgggccgatcatcatgattttaaggaagttgtcatccaaaggtggaattaacctttgtctgcaaaaggtttgaggggtgtttatctgaagttaatgagacttaagcacctgtcaaagaaatttaatcatgacaaggtgggggatattggcaaacattaccatgaagctcagtcaaggtatgtaaaagctcggcatcttgctcaatctcatcctaatgacctacactaccaacaatctgaagcttgctgtcatatttcatgactatgagaagtgctattttagctttctcaaacagagaagtaaagtcatcacttggctaaggaagggggatgctaatacctcttactttcatgcttgtctcaaaaaaaggaaaaatgaaaacaggattgt

SEQ ID NO: 62411 - DNA, 1211 bp, Cannabis sativa
cctagttctttcaaaaagaagaaccttttctcctacatttgtctggagtaggagaacaaatatgactgctccttccacgactttggcaacctctaccatagatcctccgacagtttcgacagtaaattcgatgttgccgattggaaatgtctagacgagatacaagcattcaccgaagctaatagcagttgggtgagaatctattggtcgctggagctatcttcaactaccgaagctaacaataatcggagcaaaaatcggccaccggagaaagagaagaaagagagaggcagcagctaagagataaacaattttgaaagaattagggtttgacttagaaaaaatacaaaagcattaaatatgatattcaaaactaataataacataaatatggcatagtatataccatatataagtctgaaaataaaaaaatgctatacaaaatggtcaaatttaaaattaccatatttatataaaaatattttaaaataccatattaggtttaattttcacttttgaaaaaagcaaaagctatcatgaaaatgactttgcaatttggtttatggacaaatatcaattattttgtagaaaagaactctttattactcaattactttttggcaatataagaactcttaattatttaataaattagtgggaatataaagaattgaataaaaatattttaaatctaacactttacataatttagagaaatttgggagaaaattttctaattaatttttattataaaatatccataagcaaaatacaaacattccaagcttatacttagtctatcacaaacataaagccaactctaactaacataactatacacatgatctctttatttttcctaggataaaatttcccaaccatttaaacaattttataacaagaaaaatcgtatgaagcactgcaataacaagcataactccaccccaaattgaaaagaagaagtcaagcaaaccctcaacaatgcccgtttctttgcttggagcagcaacccatatggcaactacatatgtaagtgtcacagccgttatagtcaaccacaaaatcactgtaagaatccacatccaaaatcttcgaccaaaaggcaagcctgtgacgagtagcaaaattatactcaatgatccaacaaatcccaccgtgttacaaaataagtaaatacggtacataatttttttatcattataacaagctat

SEQ ID NO: 62412 - DNA, 647 bp, Cannabis sativa
aaaaggaaaaaaaaaataaaaaatatattttttataattatttttaaaaattatttttttctattttttaaaattttaaaatatttaaaattatattttaattattaatattacgagaaccattaaaaatttaatacaaaatatatacatgaacaattgactatggcacttaagtgaggtttttaaacaaaaatgtaatgaacaagacataagtgagattgagaagattttaccattaaaaattaaatttgtaagatttaagtgtaattaaatgtgtagtttagatagtattgctcccaatattataattatgtttatgagtttaaattgacatttataatgtatataaagttacctaaaaaatttaaaatcgtttctagaccaactgtcaacatagcacctgaacagtgcatggcgcattgcataaaattggactcattccaatcaacatatctcaaggcctgggcgacacgtcgcttagaccattaaatgatagtttctagctttacctttaaatgtgttttggctccaatagttgagtcttaggatgacttttacaccatacataatagggtttatgagaaaagaaatatgatgatcacatattcactatctctatggtgatcacattctctctctctctctct

SEQ ID NO: 62413 - DNA, 1102 bp, Cannabis sativa
actcgaatcctgactagaactcgaaccccaacccgaactcgaacctaaactcaaacttggaatcacaattagaattggaaccggactaggactaggaccaagacacagaccagtacccaaacccgaacccaaacccaaaaaaatacacataacgagaccaaaacccaaactgaaattaggacccagacccaaacctagattaggaccaaaacccagaccagaacagagacgtggacccagaatcgggatagagacctaggcaacggaactaggaccgggacccaagagccgaccccagacccagacttgaacataggacccagctcgtgacccggcacccgaaatggaacaagatcgagacccaagatcgagatctagatctggacccgaggcttggaccgaacccgtagttgatgtttggatctaggacccaaccccagacccgaacccagagcaggaaccaaactaagacgtggacccaaacccagtcctaggcacaaaagtggacccgaacccataccctttgaccgaaaaattggaactgaaaccacaagtagatcgagacccaggaacgggaccggaacaaggacttggacctagacttggacctcaaaccgtaacaaaacatagacctagacctaaaactgtaaccggaccaggacccggactccaacccaaacttaggcccaaacccgaatcccaacccatacctcgactcagtgccgaacctggacccgaactaagacccaaacatggaacctccctcgggacacagaattggtgtcgagacctagaaccgcaccccagtcttagtcccgaagcaaaactcagaactgggtcccatgacctgaaccgaaaccaaaccgatacaagtgatagggatccagatcagggactcagaccaggacccgtacccgaaccaggacaaaaactcggaccctgatctaaacttgagacccgaaactggaacctgaacaagtatcgccaacccaaacccaaaatcggacccttactcgggaccaaaactcagacacagacctagaatcaggcccaaacctagacctagacccggacatgaactcgaacccagactaggatcaga

SEQ ID NO: 62414 - DNA, 2203 bp, Cannabis sativa
tctttcctggatcaaccatgatcctattcttactaacaatgtgtcctaagaatgacacttgggatagccaaaattcacattttttaaatttggtgtagaacgtatgttctcgtagtcactgtaaaactatctgtagatgctcctcatgctccacttctaattgagagtacacaaggatgtcatcgataaatactataatatatatattatcaagagggaaaatccttaaaaataccatattcatcaagtccattaaagctaccgctttacctgtcaggctttgaacctctttaggtttggtagaagatcatatctctaccaatacttttatttttactaggtttgcctcgattccccgttggttcaccataaaatcaaggaattttcccgaccccactccaaaaatgcactttaacggattaagtcacattttatagtgacgcaggattctaaacatggaatctaggtgaagggacataatcctttgtatgttgagattttacgagcatatcatcaatatacacttccattgtcttccctaaaaaatatgcaaacatcatgttaaccaatctttggtacgttgcacctgcatttattaacccaaaaggattactttataacaatacaaacctcagtcagtgatgaaagaggtgtgctcatggtgtggctcatacatcgagatttgattatatcccgagtatgtgtccataaagctaaggagttcatgacctacggtggcatcaataagctggttaatgctaggtaagggaaagttatccttgggacaaactttgtttaaatttgtaaagtcgacacatgtgcgctataatccattgggctttggtacaagaacaagattagctaaccagtttgggtaaaacaactcccttatgaagccgcatgccagcaaatgatccactttctctttaagtgtttggtacctcgcggggtccattttgtggcgctcctgtcgtactcctcgtacttcggggtcaatgttcaaatggtgaaacatgacctcgggcagtattccaaacatatctgaacgtttccatgaaaaaatattcagattctgcttgagaaaagtgataagcttttctcgctgctgaaaagttagtttagaactatttttagcactttagtattatcaaaggattcaataggtatctcgattgtctcttcttcggcttgcactgttggtatagtcgaggatcctgggatccaaatcgtgtttctctacatgcgatatttcctcaattttgaaaaattcatgtcgagggggaggagcttcgagaaaatagatgatatttatcgacttcttcttttttgcgattttcaaagtagtattatagcattcccttgagtcctcctggactcttcgcattgatcccacacccccaggggtggagaatttcatggtgagatgataaattgacgggactatcttcatttttttttagaatgggataacttatcactgcattatagacagaatgttgatcaattactgtaaaatcagccattaatttggcagtaataggtgcagtccctagagttattggtaattttatcatccctttcaatgcgattgtatccccaatgaaaccatatatactcgaggtcactggtcgcaagtcattttcatgcaatcccatttgtttaaaagcatataaacttaggaggttgacgaaacttccgttatcaactaagacacgatgtacattatcccctcctatgttagcgactaccactagggcattgacgtgtggatgatgtacccacctcgcgtcactttccatggaggtaatgtcatcgcattcttttttgaacaacttctctagtcgttcacttaaattattcacatttgtaaggggtttttcttttgcttcttttgcatagcgctcctgcgcctttctagtctttccaccgacatgcaatcctcctataatagttaaaatattgtgaggagctcgagaaccactcatatcatttgtatcattgttatcatccgctcggggataattgtctccattcttcttatactggccgaatttccctcgtctaattaattcttcaatctcgtcttgaagaaaccatcactctagagttgtatggccaaaatctttgtgatatttacagaatttcttgggatctctcttttcgcaatttctctagattggcggtggcttcatgaaaatgccat

SEQ ID NO: 62415 - DNA, 625 bp, Cannabis sativa
  modified_base (566)..(566): a, c, t, g, unknown or other
cccactaccctgccactcgagaccacctgacacccaacaatggtacaaggcaaaagaccacctcctgcgcctacaagttgcagccccataaagccagcttgtcccttgcgggtcgcaagtgtatcttaggccattagagcctataaataccccattttcatttgtgagaagaggttggaaaatcactataatacttaaccctaagatttacaagcgtttgtcaccctccattgttgctctgaacacttcttaaagttttcatattttcatgttttcattcttgttctaagacttgtgtatgatttttgattttttggcctcaagttagttgacgatttttcaccgtcaatcatgtggactaataaattttgacacgttgtaattttaagaactacaattgaagatgttaatcgggtaactacgaaataacaatgaaaatctcgagcttggggactattaccgtaattttttgagattagagacttatgaacattgaaacgaggcaagaaaggttagatggccatttgatgagtccatatttatcttataaatatgattaatttatntattaatattcttaaatttattctttaaattattgattagtgtgattttaatttgttag

SEQ ID NO: 62416 - DNA, 519 bp, Cannabis sativa
  modified_base (466)..(477): a, c, t, g, unknown or other
cactgatatgctcgagactccaggcgccaatgccagtcaagccactagtactagcctcaccactggcccctggggtactgcttcaaaagcgcacagggggaaacaactgaactcactctctcgtactgacctaacttggcatgatcacccaagttcgattccacaggtctttagtatatcacctatgtagcctaagatagatcgcaccttcgattctattaactcagcttcaaatgtggctttggggtcctgggagtctttgatgtacgcggcttgggaagcaatgtttcaaagtccaagtcacctggttcaaaagcaatcgtgactttgggtaaaaacaacggctttgccaaaggaataaaggacacgctgggaggttttggccaggcctcatctcgcaagaatcggcattttccttcggagatttcttgcaagaaacgcatgtagtgttgggttttgtgccctnnnnnnnnnnnntttcaatataatcagatttactagctaataaagatcagaaat

SEQ ID NO: 62417 - DNA, 971 bp, Cannabis sativa
tatctgctatttattatttttcttttttccttattttctacctatttgttaattagttcatttcatcccctcatacatacataatatatttgtttgttcttggtgttgtgggattctctcgtctaatttttttttattaatcatgttattgtataaatttttctagtattcataatttcgcattcatgaaaaaatctattggtttcattattgataagttgatttcatgtacagtatgtgtactgatttttttttctttttctgttctgcataatatttaatatatatgtgcaaataaagatatatatatgtatatatgtatttaatatatatatatatacatatatatatatttatctcatcttttgtaacttttctacaataaattatttcatgcataaatattgcttcataattttcatttacactatcaaagaagagtagtgctaaaaatccagtatagatttagatatgtatatgtatataaaaatgataagtacatagtcgtacaaaatgtgaaacgttttgtattttagtgagtacagtaaaagagagtgagagtacttttaacatttaagtatgtggtttgatgccgtgctttaagagactatttggatttgtctcgtttaactaatttaacatattatgtaatttgtacatgtttataacaacagattacttttacacaaaattacattgtaagattagacaactaatacatctatgcttttgtttgaggggacgagaggggaaatatttagatatatgttatttacatcttatccttttttgtagtatttgaacaaaatattaacgaatttctagacactgttaaatgaaaactgatcaaggtcctaatgttaattaatttacaaaattagggtaattgagattaattgcagttatttggcaaacatttgacaacatacgaaacgtactcacacatgacctatcatagatgtacttttttt

SEQ ID NO: 62418 - DNA, 865 bp, Cannabis sativa
tacttgtgagtagatctaagaacctggtaaaataatttctgacacaataaagggtcacgtccttttagacttcatgcctaagtgcaccaaatcaactattgagattcgtcaagactcaagagaaaagcaagagctagagaagaagtgagagcaagagtagcaacaaaatccgaactaacttggaaactccatgttgacggaagctacactgaccaattttctggtgcaagaattgcccttacaatagctgggggcagcaactgcacgaagaattcaaatttggcttcaaagcctcaaacaatgaggctgaatacgaagccttaatatccagcctcaagttggcacatgaagtacgagctgatcaccttgacatattcagtgattctcaactagttgtaaattaagtcctaggtgaatacacaactcgaggtgaaaacacggtggcctacttgagcaaaatcaaagacatacaaagttagctcaaaggctacacaatcaagtaggtccccaaatagtagaatgctacaacatatgcacttgctcgtctggcgagcaacaccatttctgacaaagaaaaattggtgcctataccgttcttagaggaacccaacattatcatcctagaagaagtaaacatgttggatgacactccaacaaggatggaacctatcgcagtttacctccaaatagaagccttgcgagatgacaagcatgaagaaaataaactaagaagaaaagttgctaggtacttgatactagacgggataatgtacggatggagcttttccatgcctctcttgaggtttgtcactaaggctatgttgggttttatgtcctaaataaaactctttacaatctgattagt

SEQ ID NO: 62419 - DNA, 1079 bp, Cannabis sativa
  modified_base (82)..(87): a, c, t, g, unknown or other
ggcataaaacccaacagatggaacattcctcaaagcagcttatggaggaactttgttgtgcgcatgcacacaagatgcagcnnnnnntatttttccactagcattttgtgtcgcagattctgagaatgactaatcttggaaatggtttttcaaaaaaattaaaagaagcgtatggagttcgggaacaccaatgcctaattttagacaagaatgagagccccatcaaatcaacaagagaaatatatccagaaattacacacggttaccgcgggtatcagattttgagcaacatcaaaacaaccttcaaacaacatgctgccaaatacaatctgccattctttggagcagtgaaagcctatacataaaagcaattcgaattccacatggttgaactggatggattggacaaacgcataagaccatacttgaaaaaagtcggttatgaaaagtcgtcaagaatccatagccaaaacaagaggtattcaaccatgacctcaaacatatcagaataactgaatactgcaaatgtagcagcaagggagctgccaattacagcactgctagaatgcttgagagcattggtgcaacaatggacacatactaataggacaaaagtacacaacacctttactaagctggcaccacctggagaagacatattgctgaaaaattacacatactcattgaaccttgaggtaacatttacatttcactaaaaaaattatgaatcctaaacatacagtaactgcttatgttgttctattgttgttttaatgtttttgtactgttgttaaaatactataaatgctagtttttttttaaaaaaaaaacaggttaaagcaacaacagattacttgtttgaggtaacaagaatgaaagaatcgtggaaagtagacctcaaagaaagaacatgcacgtgcaacaggttccaaataaatgaaatgccctgcggacacgtcgtgggtgtgctgaggaagatgaacgtagacccatacaactactgttaggggtgttcgcggtgcgggtggtgcgatttttgactattttttcaaaccaacccgcacatgcggttttttaaa

SEQ ID NO: 62420 - DNA, 1073 bp, Cannabis sativa
ttttaaaaaaataatatttaatttgatttaattcaaattttatatattataaataataatttatattaattgtatacaaataattttattaattaactaaatgtaaaatttataaattacactatagattagagatagacaaaaatgtattttattaaaataaaaacctaaattaatttacaattaatcacagagatagacaaattcttccataacaacatacaaacactataatcaaattattagtatactaacaacaccatacaaacactataatcacattctttatacatttttttttattactgttgcctccaaaagagcaacaaagcaccaacgaaaactaaacatcaatacaaaccaaaaaaacctactatcagcagagacaaaaaggggaaaacgcagagttcaaaagaaacattactatacaatcagagataaataaatctcaaaatgagaaaaaaaatgagaagattatcccaaaataaatgtgataaaatttttcttttggcgagctcctaatctcatcaaacgcccaacctctacgacaaaatcagccacctgtgaaccccgataatccaagaacagctacttgcaaactccgaacctcgacgacgcaagcacagctaggtgcaaagcaagcccccaatcgccggcaacctgaaagacagacctttataaaatagaaaaaaaaacaagaatagaagaggagatcaacgatctcaaagaagtcaaagaggggggaagcgaaccgagaggtcgttcgtggcctctgtatgactcaccggcattgaaaaatggttatcgaacccactaattcagaccatcttccatttcaccttgagagcttgagagatcttgagaaagagagagaaggaggcgttatctcaaaaaaaaaaaaaaaaaaaaagaaagaggcggtaagtgagggtgagagagaatgagatagtttagggtttcttatcaacttatttatttatttattattttatgttttttttattatattatttatataataacaaaatgcattctcaaattacagccgccctccttttcaaaaaaaaaaaaaa

SEQ ID NO: 62421 - DNA, 601 bp, Cannabis sativa
  modified_base (60)..(64): a, c, t, g, unknown or other
gtcttattgttattttccagccttcgttgattgtttctcattcccagtcgagtactcgcnnnnntaggttgaatactcgcacttattcttacacataaatttgttattgttattgataatacattataatttggtgttgcgaaattcactcgacaacactggctttggaaattatacgtgtcctcatacaaaaacactgatcacatttaacccttaagcatttagagctctaggggttatgtaatattgcaccttgaggacaagtggaggctaaaggtgaaacatttttgtaatccaaaccaaaattttttctggttaagagcttcttaatttttaaaatgaagcaacacatggcattatatctttggcttgtcgggatcatttttcttaatggagtgcatgcagtagagcttcatgaaacaatgatgaattacattagaatgcataccaaggagaatataatcattggatatcttgttcccaagcatcgcattaaatgcgtatctaacaattttcctagactgtaggatttttcttgtgtcttcttggacgtgaccttaaccattgatctagaataatgtagatcacctcttttatttat

SEQ ID NO: 62422 - DNA, 674 bp, Cannabis sativa
aacattatacaaacttcttagacaatttaaatactcataataacacgatgcatctaacgatttgtgactaaaagtaaaaaaattgtaactaattataaattaccattcttatgttgtgactaaaaggtccgtggctttggtagcctcgaccataaatctctgaatatagtctttcagaggttttccttgtcgctgtttgacttcgacaatgtcttccagctgcgatggtactagaattgtagaattctcgtgagaactcaaccctggagttgaacctccccggggtaagcttaaagtaccactgttgggacgtcttcaacagtgtagctgggaatatgcgatagtgcacatcaccggtgaccgaccttctggaggtcaagttgcatatatatcgaagtatttgatgtgagccagcgggtcctcccgtccggtatacatctttcatgtcggcatcttgaactttggtagagggagggcatttatatatgccaagaacggtgatctcctcgaccgatcaagttcaaggtttgaaggcttcgggccagatatgccctggatcatgcccctgagttggtccaactgtgcttgcatagaaggatctgttgctgtggggacttgattgacttgtccttcttagggaggctacaaattttgaagagacaggggctggctag

SEQ ID NO: 62423 - DNA, 820 bp, Cannabis sativa
  modified_base (78)..(78): a, c, t, g, unknown or other
ttgctatgtgtagagtagatccatctgacttctccttctccatactcattctgcctatatacataaatatatatatanatatatatatatataaatcaatattagttaagctgcaatatgtaagtagtagtagtgtgtcactgcaaaattaagatgttacttaagcacgatcaaaattagcaccaacaaatgaacaaaatagctagctacgacaataagggttaccttaaaatgagactgcgaatctagctataagcaagaagatatatatatatatatataaagctcgagagagagagaaagaaatggctaagacttgcacatgtgaagaatagaagaccgtatatttatatatatatataaatatgacttacctacgtaactgaggtagaaaacaaattacagttagggggtaaaatgtaggaaaatttatatagtgtcataattgggtatcagactgtgatataatagtgtcatattgggtgtggttaggtagatcatgtggtgtgggtgaaattgatttattgtatggatgtaatgaatacacgttccactaaatctttatttatctacatagtattagtatcgcatagatgtatatgtatgcatatacaataaatttattacaaattacaaggcagaatcaatttattaggatatcaagtgtgcaattggttagaatgtttcaatttttatatttgggcttacattaaatttttggggaaatttatatggtatactaatttttgtcatttttttacaaaaatactgccagacggtattttttacttttttactgtgttttcttataagtttcata

SEQ ID NO: 62424 - DNA, 932 bp, Cannabis sativa
tgaggcatgtttgttcttttctagtttgagtgttggttgtctagattctgtctttggtctcttctctcttgtgttttctcctggtcttttctttccgagtgtttctccaatagatgtgagtttttggtctgttatggaggctgatttggccagcttttggggctcttggttggggtcgacgtcgtctttatcggactgcttctttggcagtggtttccttgctaaccgtggttctacgcgaggggttcaacgatcatcttctccgaccgaggctcaggcggaggtagagattgttattgtgtgtgcttcgattcacggtcaagccggtttcgttccgggtaaagctccgtttgttttgaatagagtgatgttgacaagtcgaggtaggatgttgacaagtcgtggtgagccgatctctggtaagggccagcgtgctgcgtggatcatcaaaccaaaaccagctggtaatggcacgccggttgccaatttgggtttgcagaccggtcttgaagatggagcaagtggaaaggtttctgctggtttgcctgaaatagtcatgcctatgtctgtacctacaagtgaccgtttgatgataaatgtgcctcatttgaataaggcttttgacgaaggaagcaatatgggccgaactcaagttgtgtcattgcaaaaaggtgggccggtctctcctagtgggccagatgcaatgggatataataataatgggccacttaatttaaatgtgaaggccaaaggttgtttatctcttggtgttgacgtggagcgtggaatgagtggggctttaatggatgggccgattgttgttaatggtccagttggggaaaagattagtgaaattggtgatgggacgaatgactctaatggaccaattaattatcatgagcctattgtttctaatgggctggttcttaatg

SEQ ID NO: 62425 - DNA, 920 bp, Cannabis sativa
gttgcaaagtttaatactctgaaaatcttccttgcactcgctgccataaacaattggaccattcaccaattagatatcaataatgccttccttcatggagatcttcatgaagaagtatacatgaagatacctcctggatacaatgctcctccaaacactgtttgcaagcctcaataagagcatttatgggccttaaacaagcctcccgacaatggtacgccaaacttagtgctactcttataaaggatggctttcaacaatctcaatctgacaattccttattcattaaacgcacttcctccttttttatggctgtccttgtgtatgttgatgacatgattattgctagcaacaatgctactgccataaccaacttcaaacgcaacttagacattcaattcaagttaaaagaccttggtaaacttcggtttttccttggtcttgaagttggccgaactaaagacggaatattcatttcccaaagacatttcactttgcaattattaaatgacaccgggtacaccggcaccaagcctgcctctacccccatggaagtcaacttgaaacttagcaaagacaaagggacccctttacccgaccccactctctatcgaagtctaattggtaagcttatctaccttaccattactagacccgacatttcttatgccgtgaatcatcttagtcagtttttggcttgccctcggctccctcacttacatgccacacatcgcatattacaatatctcaaaaaaacccctggtcaagggttattttttccttctcatgcagttcccaccctcacggcatatgcagaaactagcttatctccagcaaatgttcaagtttctttctttgctgatgccgattggggtagctgccaagatactagacgttcaatctctagatattgcatcttt

SEQ ID NO: 62426 - DNA, 1814 bp, Cannabis sativa
agcgtcagcctgagtcatagtaaacaaacgtcctagattttgattattgttcttctttggttcttctttcttagcctgtagacagtctctaataaaataaaatggcctaccatatcgcactggaaacatgttttagctcggcactcaccctgatggtgctttttgcatttaggatactctgggtaagatttgaatgtagacccgggaccttgacaaccacctctatttccctgaaaatttttgttacttcccggtgtttcggaagcttcaaccttttgtttatgatttgggttgccactattggttcccttactgacactaccacccatactagggtttgatgctgtgacgacatccttagcagcttgctctttaatcacatgttgttctgcctcttcaaccaaggctaactcgaccactttcttgtataatgtattgtgatcagtggtaattttcaagtcccgactaatagaggcattcagtccccttacatatttttgttttcgggtgaagtttgttggtaccagaacaccaacaaacttggataagcgatcaaattctagggtatactcggccaatttcttcttctcctgagtcagcttcacaaagtcttccatatgcaaagttttgatggcgatgctataaattttttctttagacaggctcttgaactcttcccaagacatgatactgacatctcgggtctattccataatatcccaccaaacgtgggcatgctgttgaaacatgaatgcaacacaattaactcgttccgcacccgtcacccccatgttatctaggatacgagtaataatgctcatccactgctctaccttaaagatatcagtacctcccaaaaacgttggaggttgtaacttgaaaaagcgttcaaacacagaatctcgatgtggtaaaataaatcccgagttacccaccactagcacaggagctggtggtaacacttgttctgctggagcttccggtgctggttgcctaaactgtcgcaattcatcttcttgacgaagtataatgcttcgcatttcgaggaacatttgctgctagtcagcaggtggattagcattattaacccccgcattatccctcagattctgcagaagcgcaggcagtgccagtgggttggcttggtcattaccaagctctacgtgctcgccctgtgtctagatgattgtggagggtccattttttttcaaatagccatgaaatcaaaaagcgagtgaggcaccaaatccatacttgagcatttattgccttaaccctatctcatacattctatttctcttatgaaataaacatttatcaatttaaacactaatcatgctttctatataacattcatttctagatgatgctcgtatacatactgcctgcctgcctaaaatgaaaagcagtaaataaataatcacaaaggcagtgaattttttactcttaacacttactgcaccatgagtcaagcttgtcttcgacgatgattgtacatgttcattcagtccacaggaagtttaaaaaccttggcgctctgataccaaattataatgccttaatgaaaggcaggctacgatcaaccattaaacataacctaatcctgctaaactgggactactaggaataaaagcataaatttaaactttaaatttattacagagtaaaaataaaacttgcaactatttaattttacaattattccaaaagattacacacgtttcgggatcccgtaaaaaccgctgcaaaacattaaaagttatttttacatgctgacctagatgggaaacactgagaatacaaaatacatcaac

SEQ ID NO: 62427 - DNA, 1050 bp, Cannabis sativa
cccccctcaagctgtactttgagtgttctaagtaaagcttgttacatagaaatttgaatctaggaaaggacagaggtttagtaaacaagtcggctgtctgatcttgggttggaatgtagcaaacttgtagcttgttctgagcaatttggtctcggatgtagtgaacatcaagctcaatatgcttggttctggtgtggaaaacaggattgagtgccaatgattgagcactctggttatcacaccagagaactggaggagtagtgtgaagtttaatgccaagctcagtgaggagagagttgatccaaaccagttctgttgcagcagaggcaagagctctgtactcagattttgttgaagaccgtgctactgccttttgtttgcgagagctccagttgattaaattgccaccaaggaagacacaaaaaccactggtagatttcctatcatcaaggctgaaggcccaatcggcatctgagtatccttcaagattgagcagtgtagatggcctgaaatgtaagccaagatgtggggttcctttgatatatctcagaatgcgtttacaagcattccagtgttgaactgtcggggatttgaggtattggctcagcttattgacagaataagcaatatctggccttgtcaaagtgagatactgtagagccccgatagtactcctatagatttctggtttgtccatgcttaaactgtcatcttgagctaatttatttgctgaaatcatgggagtgttacagtcttttgcattttcaaagtgggttcgagagagaatgtcagtggcatactttgattgagtgagataaatgcctgaagcattacgataggcctcaaaccccagaaaataactaactgatcccagagattttaaggcaaattttgtgtgcagagaagttatcaaatctgaaatagcagtggagttggcacctgttatcagcaagtcatcaacataaacaagaaccaagagtaatgaaccttgttgatttctgtaaaatagagaggaatctgacactgaaactttgaatccccattgaatta

SEQ ID NO: 62428 - DNA, 661 bp, Cannabis sativa
actcgaagttcttccatgctgccatgggatcaagaggaaacacaattttatttctgcagtgtgtgtggatggtaattcctggctcgaaggaaagcaacccattagaaatcattttcgttctaatttcatgtctctgcttacttcgacatcccctactacccataatctttatggcctgatctcttcgggtgttttagcagaggctaatcaagttttgatcaggaaacctacggagaaagagatcaaggaggtggtctgggcaatgcctccccttaaagccccaggtcctgatgggatgcccgacaatttttttatagatcactgggatacggtgggaaaagatgttgtggccgcggtgactcatttcttcgagattggagagtttgccaaagaaattaattagacttttgtagtcttgatcccgaagaaaacaggtgccaattgttttgattattttcgacccataagtttgtgcaattttacttataagatcatttctaagttgttggcgaatcagctgcgccccctccttaaagatttaatctctccgttccaatccgcttttgtgccgggaagatggattgctgagaatagtattatggcgaatgaggtcttggactccttcaaaaaactcaatggccccgaggggtacgttggattg

SEQ ID NO: 62429 - DNA, 1230 bp, Cannabis sativa
atgttattccatttttgtagagctatagcttttttggtggattgccaaacaaacaatattgggtatcttctacgagagtaaagaagatgagacctgatcttgctagcttgaataggtccttcgaaaattatatataaatgtacatatatatatgtctcttacaattgcgccatctcatttgtctaaaatgatatttatttgaactcatctcatgtatttacgtactgatcgattcttatatatatataaaaaaacacatatatattaacccaccaaattctttttaatggataatcacttatctccatgtcccgtaaaatctatctataaaatcatttatcggcagggattaattttgaacggacaaaacataggcacgcttgaatgaggttagaaatttacatactgagttgtcatcacccatgtggttaacaaaaattaaaggttccactggttaattagtgcgccctagctagatgtggtagcaagtacgcagccccagcttataatttatataatgcactgttaaataattatttaggaacttttttttagtttttttttaaaaaattaagttaattatttattggaaggacaggttgggataggaaaattgaggacagctgattttttttttttctatatgttagtagtttatataaaacttttttattatttgtattacttgattttttgactttgcaaccttctagtctctttgttttattatttattctcaaattattatcatggcattagagtttagttattatgaaattaaatttgttagaaaaatactatatatcatgaaaatttataattaaaacctatcatgaatggtatagcattttataatttcttattttatcaatttattatattttacttttttgaattattttttaataaatatattatcacatcgatcactcaagatgacaattcatgacaatttttcaagacatgtagcgttgctcaatttgttaaacgtaattaggcccgattccgggcatatatagacgaactagacatatgtttggaatccacctaattaatttagagaccctaaattttttttcctctttcaaaattacacatttgttttataaattttaaaaaatgcaattttttttttatagcttattaaatttcaagactaaccttcagcgtaatcataactttacaaacataactctgcaaatcctccgcagattagaaaagtaatttata

SEQ ID NO: 62430 - DNA, 5900 bp, Cannabis sativa
aaaataagttaaggtatcctacttgagaatcccatgacgcctctagaaaacttataaaaatactaatcaactatttggtgttgggacccacaccaaaggttaacctatggtttattccttgcaagggttttcatcgagagacctcaatccgataaggaaatcaacaaggacttgagttatttaggcataaaatagctagaacttgaacataaaagaattcacaaggaggctaatccacaacgcatggctgacctgtgcaataaacactacaacaaaagggactttttatcccactttttacacttgaaaaaataaaaaagtgggataaaaacttttgatcccacttttacatttagagccttaaataaaagtttggaacaagggccttgtttggaaaatggataaaaaacagtgttagaaatgctatttttagcatttgccaaacagaacttagcattttaagtgagacttttaatctcgatttttacataataactgcgataaaaggttctcatacatttgggcattttaattgttgggccagctacacatataaaaggaaattaacttgtaggattttattttattagggttactcttatttttcctcccacttcatctctatctctctctaagcggctgcccacatggagatcaaatgggctcgaccatggtgtctctacgctgcaatccttacctggttcttttatttttcgtgcatcatcacaggccagcgacatttttctggtgaaggatgagccaacggagttcagatccgagctccacgccctttgaaacttcaaggtaccgttcgtgttctttttctttttcgttcttgagagatctatgctccacattctctaatcttgttctacttcttttatttcttttttttttttttgaaatgccgatcaactctctctcttctttctttgctcaggtgtgaaggttcgtggtcaacgggtcatggtttttcatggtggacgaagcttcgtggttgctatttgtgctcgttgataatgactctcggttgtcgaaggtggttcacgtggttgtcaaggtggttcgtggcttttgttgtactgattttttgggatttaaatctatactgattgtatattttaccaaaattattgttgagaaaaaaaaatatactctgtagtggttcattgcttgttagtgttagtatattctttttatttttttaacctttaatcccggttattatagaaaaactggggtaaaaattactttttatcccagtttttaaagaaaaactgggattaaaaatagtcttgtattccagtttttctatatataataatcgggattaaaagtgattttttatcccagtttttatcagagcttttatcccattggcatatatcccagtttttattttagcaaaaacggggataaattgtccctaaaaaccgagataaaaaacatatttttgtagtagtgaaaaaagatggcataggtctctactcgcaattcaccaaaataaacttttccaaatatagtcctcaacaccaaggagtataacataagtgagagaaacaatttttcacttaataaccatgcttgtcgatcctatgccatctttgtatggaaataagtagcacaggccgaccacaccgaatggaaaggagattttttttcaaagattacttttttatcatcaagaaattaaaacaaagtgaggaaggccagcaagtggtgtaaaaactatctagcgaacttgtgccattttgtgcacaaggaagtggcagacgctggccacatcaaatggtgggaagagttttcttggacaaagtatatttcaatcatcaacgtacaaaaaataagtgagaaaattcaccaacaggtgtagaacacctatggccgacctgtgccatctttgtgaccaaaaagatagcacaactctctcccaccaattggccaataactaatgtgaccaaagtatttttctagcatccatatcactaactaagcaagaaataccatcaaaggcttctcataagccttggttgacatgtgccatctttggcaccaaaagaaggcacaagtctcccattagggttttggatgtcgagatgagttttcggaccccgtaaccccgaaaatatgattcaccataaaaaaaaaataagttaaaacacacccagaggtatctgagaacatgcatggctgacctgcaccataatgaggtggcacagctcgtaataacatgacacaagtgagatttggagctgaaatgtacttacaacccttcaataaaattgacataactctctcaatttttatccaaatgacttggttcaactttaatttgaataatattttataaatggatctaagtatgtctcatgatcatagtacaattttgaagttatcgggctcaaaattaggttacaagacatgctggcacactttactaagaaattgattggttttactaagtgtgggtcacaagggaatgttaggagagctgtgtcacaatacttgtgactctctatttaccttaactgaggtgtgccatcccatggtcacttctctcaaattttccattctcaaagcacaatgccacatgaccaatttcaagaaacaaggaaaataacaaattttgacgaaaatcccagtggttgtagaatatttacctatgacaatgctacatttctaagatttgtatttattcatatattttcttcattattttataaaaatatttgagatttgatgtgagataccccaacttgtgagggtttactaacaaaccatatgcctatatataaataatgattggataggatttaggatcgaattctagaccttgaaacacattttagatttccacaccactttctagaacactttgctccataagatcttttcctctttatttttttccttgagttcttcttacatggacaacaccaagcctccattattccatcactatcgacatacatatttaccaataaaaaaaggtcattctctattcttgtatctatgattttactatttcgaagaacattacaaccacccttaatatcaagtttatatcattgggtctttcatgagccttttattcataagcttcgatacagatttcgcctagaaatctctttttgtactattcacgtactcttgagaatataactcttgtgtattggaaccaactaataaaaataaagtagatgtagtcccattaccatcgcaataagaggtgaactgctataaattcctagtgtccttttttatttttcgcggctttatttagcaaaattaattcaccgcagtcatcttcttttttacgatcttcttagattagttgataaaaaaccgcgtcaataactcattattcatttaattttttaaatgaattgagatgcaatttaattgatatgtaattgagtgattggtgaatattggataataaagtaggttatttattaaacaacgagctatataattgagtgtaaaataagttttaaagtgtttaactaagtatgaagatagtgatgattgcaaggaagcaatggtggcgtatgaaccgaggagtgaaaccttagtggtaatgatagaaaaggaacgcgagagtctcagatgtcgatgaatcattattaccaatgcgggactcactataagttggcatggtagtacattacaagggattgtcaataaaatagagaatatacatgaggtttgtatatttttgaatgtgtttgaaaagattatcaagatttctaccaaacatagaaaagaaacttcaggatcaaggaatgatctttgattaatcgttattagttgagaatttgggaaatgagtatttccagtttagttgtgggtacttggtatgagcagtgttgcctctaccatataggtttaatcaatatactttataatggtggttaaccgtaaatgattaagaaatttaaaagttgtgtcaattctagggaaattggtacaagttaaaattagtggagatgaacaagattcaagttgatgataagttggaaattcctcatagttaagtgaacaataccaatgaggaattgtaagaggctataatgaagggagtgatgagaattgtgtctttttttacgaaagaatgaaggcaagaaatacaattaggaatgaaaaagaagcatctacttatggataacccaccatgagcttaccttggagttaagcatacttaacatggggtaatctcaagatgagaaatctttcggggagtcatctcagaaatcatacgagtgaggataaagtacgctaaaaagattcattttaagatgtagaattgatagtcgttccagagatttctaagtgaaagaatgtgttaacaagtaaagatttacaaggtatcaagatgagcttatgttggtgggtggaaataagaaatgctttaatagagtatctatcagatgctttaattgagtatctattagaaacaagtaacttgttattaagttaagtcagtagatcagcttgggaggtcccataggagaaataaaaagacataattatgaattaaggagtatgggatcttatgatttcgaccaagtagtagtggttggaaatgctgagttaatatgctgtctattagtgcagacaatttatacaataaataaagatatagaattcatatgaaggaacagtctaatcttgtgaaattccaaagttgatatctttgactatgatgttaagaattaaagaagatttttgagaaccatggagattaaagtaaaaatagtataatattttattcctaaaggatggataacctgagaggatcaattgaatatttgaaatatgtcataggcatattagataaaggttagattatcttagaataatctcttccccagataaagtgtttgtctaaacgtgataattaaatgtactattatttggtactttaataagtgtggtacgagagaaatattagacacctgttcattagagtaagtaggccaagtagcctatcagctagccttcgctccatgctgagaaaatatgtattagacttgactcatattctgagctacgacaatattaaactttaggcaaatttagtatatgggaaaaatatcttgtccaggttttggactagaaaaatgaagtactatgaaatgagacaattccactagttgagaaagtgttgtagcaaaacagcaagatagaaacattaatttgagagttagaatcataaatacaggagtaatattctgaattgtttaaataaattttgagcacgaaatttctataaggaggaaattattgtaatatcccgataagcctaatggtaaataattaggatttatatttatattatgggttaatacggtaataagtgggattatatattacatcccctctcatttttcatgtataatattgttggagatgatgaaatttttttcatatctatcaatgttcgacatgaaatcttcccaaaattttttcatgtttggtagtgtatgtatagaagtatagattatatatttaatatattaactattaaaatgtatttatactatatgaattaaatttttaaattaatagtttttcactttattaaatatacaaacttagatagatatttgattgaataagtgattttacatgttcatatattatgttaagtatagtaaatggcctaaaatcataaaattatattagtaaatgtctttatttcaaaacttgtaaagaaatatccctttttggactatttattatttattttatcttttgccacataaaaaaaaatcaataattttcttttagaattaaaaacaaattacttaaatatcatggtatatctatattaattttgttaaaatccttttttttttgaaagttatgtcgattttcttaattttttatgagttgtt

SEQ ID NO: 62431 - DNA, 676 bp, Cannabis sativa
aaatatatgaaacctattttccgtacgactttccaaagaactaggcaggttctaatttgcttttacgactcaactaacaacaattaattaattaattaattaattttcacaatacatttgttatgaattgatgacctagcttgagatagaacttgtaattaaaataataaagcacattatatatatgaaactcattattcaagtaccgtacaccccatgtgatgtaaggaactcaaccactatgtggagaaaattgcagtcaaacttatatgcttgacactccttttcatgatcatacagctcacctagccattaatataagattttataattttaataatatcttactcttcattaaaataatatcaaataaaattggaatgatattccaagcacattcacttatatacttttcttcttttgtttgtttttgaaatttataaacacttatacttattgatacgaaatctctctgatcaaaagggcatcgtgtaccgtacgttgtgaaacttttcaaaggagagagattagagagagagagcaattaatataattagtgctcacacacacataaatatttatatttgctacactaaaattttagagcattgctataaggcaccagtggtacctagcaccttctcgacatgtcacgttacgattggctagcgatact

SEQ ID NO: 62432 - DNA, 869 bp, Cannabis sativa
aatttctctacgaccatctttcaatgttagcgtgtgctctcccagtccatatttctactcaagtccagaattatcgcctaattcttcaccaggtaaattttttcctttttgatttcaagaaccattttgcatgttcaagatataggaactatgtgtgatttacttcttgtttgggaattatgactttaggcttatgattggaatattattgttgatagatgtaaaatattctggatactattttgaatagctttaggaacaagtaggagttaggtcttttgttttattgttatgggaaaagtctattttgttgttgaaatactagaatacctttatggttcttgatagtgtgtgagttttcttatctttaactttttgtagttcccaattcactatctaaaacaattgctcttttgagaatattatttcttgataatgaattcggtggggacctttccgagaagttatgggggaggattcccctgtgcccttattatcattgttggtctaggcagctagctgcttggtatttttttagaatccatcatgcctagacaagttttgcgagaagaagtagaagtggaagaagtagctagttattgtgatggaatagactgctacaccaaagttggtattgaattcatcttcttgggagatgaatcaatatactaattaggtctgaacttatggaaacctccaaaagtatgagacgcaaagagggcttaaaagtgttccagatctattctggaataaaatgtttatctgaggagagaagcctagctagtttgccgagggaggcttcggtatatggagttggggacatgtggaaccgggtacccatctttgtttaaggtgctacttgaaattct

SEQ ID NO: 62433 - DNA, 1028 bp, Cannabis sativa
  modified_base (127)..(138): a, c, t, g, unknown or other
ataaattaagaaacaaaccgtgcttcgtgtgcgatttataaatattttcaattatttatataaaattattttagtaacatttaacatttttatcttaattcacaatattataataataataataatnnnnnnnnnnnnaataataataataataatttactcaattaattttataaatatgcctccgactacaataattttactattattagattatttataaattgtgtttcctagcctatgcataaagtttttttagtacaatagtatagacatgtgtaaaataataataattataatgtaaaatgagaaaaataatacaaaaaatatctagaataataaataggatattttttctggaactatgcttttctgaacttttttttttttgaatttttttccataactataactatcattgcaatttgcaaatgcaatctttatttatttctattcattttcttaaataatttactaacataatactaatgtgatatactaatttagaatattaatagatctaaactaagaaaaaattgatatatttatataaaagaaaaattttaccataaaaaacaaaaatggagaaatcatctaaaaatggggaaatctaaaaaaatgaggaaaataaaaactcaccatgaagattaaaaatattgtctaatctaaagaataaatatgctaaatattataagaacgaaagattaaaaattaaaaaaaattataaagaactcacttaaaagaatttaatctaaaaaaaactttaaaatatgagaaatttataaattctccataaaatattgaattaataaaatagatatatagtatgaagatgttataataaaaaaaaccattaattaaaaatgaaattttcaaatattaagaaagaataaatgtagtaaactaaaattatataataagtggtaagtatgaaatataaaatatttttcttatttgaattttgctctcatgaaatataaaataattttcttatttgaatttttatcaatagataaaaatttgaatct

SEQ ID NO: 62434 - DNA, 702 bp, Cannabis sativa
attgaagggcaaagctgctaaccgtactgttaaacgcacttcgggagtgaaatctagaagtggtagaagacggggacctggtactggggacaatagtggaagtgacaatctcaatgaattactcaacaactgtattgaggttagtattgaatatgctagtgttcaaaattttggaagcgacgaggaggcggctggaagcatgcccacattgtcctcatgaggtgcttagcttggaactatcgtggattacctcgatccacgacagagaggacccttcagggtttaatccgtgattttaatgcggactttatctttctttcagaaactaaagttgctgtggagaccatggttaatgtgatgaatcgactggggtttgtgaatcattggtgtatcctggccaatggcttagctgggggcttttgtatagcatggagaattggtgtgttgtgtaatgtggtggatacttatgagacaggatttcttgtgtctttccaagttgttatgggatgcccggagtggaagctttattgtgtttatggaactccatatggtgcttctaaatgagaattttagaattggcttacaaaaaaagtaactgagtgtaatgagccttgggctcttgtcggagatctcaacgctattattgatcacacgaagaaggttggaggccgagaatttgatgctagtgttgggttttatgcc

SEQ ID NO: 62435 - DNA, 1094 bp, Cannabis sativa
acttggggaataaattagaacacaaccatgcccacttccacacagaagtgcgcaaaatagctcctaagcagaagttgtgctcccatctcaatatgggcccagtttcagacgacaaagttgtctgcacagttgcatggggattcccttaaatcagagagtctgttccaaaacaaacctagaatatttatgaggctctggtgatctttgtacacctagagagctccgtaattcttgaatttgttcctatactgatccatctcctaaggagatgaattatacactactactagagttgtaacttttacttgcttcaaaacttttactttattaacttgaatagcttcagccatggtgggaaatagaaaagagcaaaaagaaaaggccaagtggttagatacccacactaaagaagatagcaagggtatgggagtgtcctcccctaacactacttgtagaggtccccattagaccctacatctgaaaataaaattctcgaaaattattgttccaagatggtcagattgggaacactaaattgagacaaaaagctacgagatgtgccatctggaaccataaggattctagacaggagaattaagtttagcaatgcttagtgctaaattttagttatttcagttcactggtaaaggcataaggtagcagaacctaacaatgtctacaagaaataagcacaaaaaatattcgtatttgaacaaaatgttcaaagtatggcctaaatcctattgatctacctagggtaagcatgcaatcatcaagaaagaaaaataaaactttaatgctacttagaattttagaaaatacaaaaattacttacttgatgaagaacttagagaaagatgaggatttggagagggaatacaaacatcgtgcgatggcctccgaaagatttttgatgaaaaaggttcgttaatgcgcacaagcctggtatgaagggagaaagctttgttaatgagtgcttgatctccgcttgaagatcaatggtttcgatggtgtagaagaatcaataattaagactaggggtggtgcttctcggtattctctctcacgagtttgaagaagaagattaaaactct

SEQ ID NO: 62436 - DNA, 1258 bp, Cannabis sativa
ggactaaaaaattctcatggatacgaaaacagatagggatagaaacttcaattctaagagatttactatagaattatctaataatttttgtaccatgtaatatatatatatatatattcatgtatagttcaccttataaaagtgttgttttggcaggctctatctattttgagatctaacagaattttttagtgcattttatttcatgattgtgtaccgttgtagttatttaaaatcaccgataaacttaaaaaaattccaaactatagtgtcaaaaataaattttaaatattttttcacttatctttatttattttttttgtatatgtgaataattatattacacatgtatacgtaaataggtatatacataatttagttacactatatatattacacattttataaaattttggggggccatggccacaccaccccctaaagtacctccgcccctgagtacaagtaatgataatttcagcgacatttattcgattataggacgatgtacattagacattgtttgtacttttgatgcataaacttttcactgtagttaagcgagtttaagcaatgtttgtacgagatatgtgcgatatatacatgttttaagcgacgtttgtgcaatctttatgcaacgtttatgcgatatactcatgttagtttgcaacatagtccaagcaataatcatcttttttgtttgtaaatacagatggctccagaactcattctcccattgtctgagcatttttcagggctatcacttacagaaatgtactttacttcaataaaggctaaattcaaaggctttaagttgaccaacaaggtcaaggagactccctttggagttttttagaatgccaatgatctgaaattctccggggtgattgtgcatcaactgttattaaggaaaaaaaagtgagtgaggtcaaaaatgatgaagtgtggttttacgtggctaaaactgaagccagatttgagcggtctgagttcggtttgatcacaggcctaaagatgatcagtggcccctcgacagaagaattgagtacacaatgcaattctgattggatactgtgggactatctaaacaatacgaaaaagggtcacctttaaaagctttttgctaacttttgaggcgtgcgatgttgcagacaatgtgtacaagctgggactgtgtgcatttgtttaaggtgtgttactatcaagggctgagggtgtttatatctggatagatatgttgaagttagtagaaaatgta

SEQ ID NO: 62437 - DNA, 817 bp, Cannabis sativa
  modified_base (787)..(788): a, c, t, g, unknown or other
tttttaacttttttttttttttgtcaaatttacggtttgagtttctaaagtagttttgtcaatggtttctatgtggatttttatacgattttttgttacaatttaagttgtagcgctagttgcaataggggtttctatgaagaattccgtaaaaatgcacaaaaaaaaaactgcttttaaagtatacaaaataaaaaagcccataaatttaatagtaatagtaactggttacttagtcagatctaaaaagaaaaaaaattcttaatttaacttaagtgcctactctgtaagtttgtatagttttttttttttttttttttgtatagtttgtaagtttgtatagttaaaacttcaaaagggatatttacacaaaatatctaaaatagttttctttttaaatatttttacagaatatattttactgttttgctctttttatttatttatttacatttacataatctcatgatatcaatatagaaataatgtgtaaataaaataatacaaatataatttatataaactaatatgaaaacaaagtaacataatataatattgctgtaaaaaaataaaattaaaaatttcaatctgtcacaatgttaaaaactataaattcgtattattgtaatttttttggtcatttgtgagtatttatgacttaaaatgtgttagaaaaaaagaaaagattgtagtagtgggcttctcgagattgggcttgccctctttggatttggggtaagttgaaaaatgcctcttttatttatcaattaatcaaatttacctctanntttatatttatttgaaacatacctctttt

SEQ ID NO: 62438 - DNA, 698 bp, Cannabis sativa
ttattcaaattggtaaagtctatatagattctccaaatgccattgggtttcagaccaagaactgagtttgcgagccacttggagtagtacacatctagatgaaaatgatggaaattacttcatgccaccatgcaaagacatccagggcctttttgacgattgccataatttttttctttactgtgggtttgaggttacgctcgattcagatggttttggtggggtctgtgtcgctgacataggcttcttcaacatcctccataggttccagtattagcttcgcacctaccctggaatctaggtcatcctttttttttcaactcgtcattgtcattggtgtcctcctggacccagtataacatcgtctgacttctctttagtcattccttacagtccatgttcctcctaaagtggcagagaatttatgcacaagtgtcgaatggaagtaatttctcccatgtccattaaggaaagacatccaaatattacattttatgccatgaggcaatccagtaccacaaaatgtgcagtatttgaatgtactctgaattctctccattgaacccaaacaattgggagccataagagcatctccaatggtagcatcctttcaggatgctaataatatccacatcatccaaaaatataatattttattttatctctcttccacatcatttttagcacttttacttcta

SEQ ID NO: 62439 - DNA, 805 bp, Cannabis sativa
atctttaaaaggtctattgtgaagtaccaaaagcctgggatgccttgcaacaatttcagcaatctcttcaagcaatttcttcgggtaaacagatcctgttgggttggatggagaacatagaatcaatagtcttgacttctcagtgatttgggattcaagaacctttgggtccaacagaaaattgtcctcaatcttcgttgacagaatcacaggtgttgcatcagccagccttgccatctctgggtagctcacccaatacggagctggaattataacctgaaatatgcattcatcagtaacagtgaaaaatatacatcagcacttaaatgcaaatcttcatgctctctctctaaattcctctatgtctgtctaagacttaaagtttcagtaatttctgtctaaattcctcttcttctcttcctctcttctttctttctctcatagttctacatcacacaaactacaacagaaaaagaattcacaatcgcaacagaaacacaagattgttagcaatccttctgctaataaaaaacaaaacagaacaagcttttcacaataacaacagagcaacgctaaatgacaccttctacataaaacaagctcaattgttaatattaagtacttcacctcatcccctggggcacaaactgcaagcactacttgtgtaatactttgcttggctccattactaactagaatctgatcaggtgtgtaagaaattccattttcctctgaaaaagggacaacagttagaacctcaatcttgcagcacatacgcaatagtaaaaatattgaacatttatct

SEQ ID NO: 62440 - DNA, 1054 bp, Cannabis sativa
tttttcctttggattttatatatatagtcagctttttaaatctaatattacattgctgatgcagagcaggatacaaaattttcaatcttgtagatgataaacccaaagttgatggatgacattctaattattttagcacaaaatcattttgtgtataattattgaccttgattattcaaaacactggtggcaaggctagtgaacatgattctttagagcatagatgcagctggtgttcgtttctcctccgttgcacaattttacttggaatacctatacctttaattttttaggtgtgcagtttccttggtaaatcttttttgcttgcttatattatactatggctcgatatgtgaaatttttttgttatttgatgaataataatagtggatccaagattcacgagtaatagaactgaaattcagaagagctttctcccaattattagctagcttaatttgaaagtaaatagtttagcagttttatatttagttaattttgtggattgcttgtgataatgtattttaaggatttgaggcttaaatgtaaattctagttcataacaaaatttgtcgattttaatcaccaacgtctgcatgaccattttacaccaatatttaagaggctattcttgtatttcggtattgctttttatgcaaaaagaagttttattgtcgatttgttcacattaaaaagaaaaacatttgcacttgtattccaagagacttaagaagctagcgtcgtacttggacaaccatcaggagcgcaggccaagatatctctgtaatctcgtgatatcctgaatgagtcgtgaacttttccatcactgctcttcttgtactcaaataacagatttgaatggtcgaatgctgtaagtttggtgaatccatagtcgtagtccctaaccagactccattttggtgtagctgaggagaatttcacaagactcgatcccccgccaccagcaaccacatgtattgtcccattcaagctacccttataataattcttcttgtcactggtgcaaatgttctgttgcaggtacatatcatag

SEQ ID NO: 62441 - DNA, 528 bp, Cannabis sativa
acttaggttttaaaccaaaagtttacctactgaaagttaacatggaaataccctaaactaacagggaattaaccaaccaaagctctgaaactaacatgaaacgaaaacaggaaaagtgtaggaaatcagtttctgatccggttaactggtttttacaccaagtaacctaatttttttgaaaagctaaccaattcgactccaaaccttaccaaaccttccaaacctgcatattataccccaataaacataacccaagcaatagaacaacaaaacatgctcaaaatcaaattccaccattaacaactaaaacaagctaccaattaacttcaaatcagcttaataaacataattttaacatcagaacacctcaatgaaaacaaatcacatgaacaacaaccttaaacccaaaatcaagcataaaccttgcttaaaacctaagaattaacaaagaaaaggtgctaggaacttaccttcagcttggaatcactaaacccttgctggaatttacttgaattgatgaacaatact

SEQ ID NO: 62442 - DNA, 928 bp, Cannabis sativa
gagcaaaggtttactgattaagtattattataattaggccttaattcaggggttatgtctctcatttttgtcaaatatatatatatatatatatatatcattctgctatatataccccataattattatttcctttcctttattatttatttattagaattataacaataacagacttatgtagtaataaaggatcttggaaaaaataaaaaaatattgttaagaacatattattattaggtcaaaagaatttatgctttttggtaaccatacatatattttttagtacattaatgtaggtttcaaatccgagcacattaatgaacttggttaatttgaataattttagtgaatctgaattgtttataattcttcggtttggtcatacttttaaaattcttagtagggttttaatctgtatctccttcaccttcttcttgtcttcaatttcagcaagtgcagtagtgttaatggcctttgagatgccttgatgtatcagtagggctttcatcttgatcctccaaagtccgaagttattttctccattaaacttgtcaacttcgaatttagccattgccattcgaacctttgatcaaacagttcttgatcttcagctacaacagctctgataccatttgttgcaaatcataacctcaccaagaacaccataacaaaggattcaacgcaatggcaataatttagcaatcaaaacagaacaaaaaaataaattgaattgaatgactatttattcataacagtataccatgaatgagaaggaaaaatagtacaagtttggatcaccaatatataagtttcgagaatacaattttagctcaccatgagagaagtcacttcaagagtgaacaatctctatttacaaccttccacacacattaaacacaaactgaaactatacactctaacaatg

SEQ ID NO: 62443 - DNA, 581 bp, Cannabis sativa
ctcattaatgccatttgataatttataatagtatcaccatttgatttgactatattttagtataagcacttgttggaagataaaggccaattcatttcatttgtatattcatctctatatttgataattgattttgttcatctctttttctctgtgttttgattatgttctttgttatctctttctcattctcatctctctcccgctttcgcaccagaaaaatggagaagatgatacctctgcgatcactctaccgctcactctggactagatcttatcacatggctgccctcaaccaccacgggctccgccattactacgccgctcgatgcctccccaatttttcatccccgtccacctcagttacctctcgccaagcccttgtttcttctggtaattttttgtttttatttttgtacttctaagtttcatttttgtttcaattgcttcttttttttttctttttattattattttgggttttgttttttcttctttagaatcgtaaagctttaattgattatagtttcattttcattttggattttggtccggatctttgagctgggtttatgcgttat

SEQ ID NO: 62444 - DNA, 931 bp, Cannabis sativa
atggtttagtattttagttatagcaaggcaagttagttaggcatttggaatgtcaggattagacggggttatggttttggaccattttacccctaagtcattttacccttttgatatgagtgaggggcattttaatcattttgaccttgggtttaagtggcctcttctcgtgttggcagctggtcaatgttgagttaattaaattaattttgtattagtttcacttagataatcaagtgtagaagatgacaaaataagaaaacaaccttcttcctttttctttcctatttttggccctaaaagattcatcaagaaaccagagctttctccttcaatcttagtaactttcagttggaattcaagtgagtttggaagctaataactaaggtaaaacttagaactcttcttcctttgtttttcataggtaaagttagattcaagcatgcaaatattgagttagttgttgtttagggatgatttgttttgttgatgtttttagaggttaagttgagttgatttaggcttaatttggttagatttaagggttgtgtgtggtgttgaccaagtttgagtttatgaactcaaatttggttcaacaatggtgatttgtgaatttctttgttttttgaggttttagtacttgtaaatgattcattatggcttgtataggtgttctggaagttcttgtgcagtttagggtcaaattgaattgtttaggaggaattttgtatttcctgcactgaactggtcgaccaatttagtgggacatgtaggaaccggaattctgattggtccctaggaaacccctcagaaccagtcttccagttggggaatcggtctaacagttggggcattttagggcaccctagtttttcccatttttgcaatatttagggtatttccatgttatctatcgatagggaaactttta

SEQ ID NO: 62445 - DNA, 2424 bp, Cannabis sativa
attcatgtgaagaatgactagcttcggtgttgagtaataaacagctatttcacaaaaaatgcattgaaatttagtacaaaatcacattagagttaacaaaagatgatagtcttatgatttgattgcatacctggcttgtcgagtgaaccatcggggaaaggtacttgattgtgaggccgacatgctgcaactaagatcatgagaagtatcacaagagcaccaagagcaatcccgaggatagctgctttcgatatagtaactataacaagtagaatgggaaccaaaatcagaccaaaaaaacatgaaaagagaatttaagcatgcttaagtgaaagtagtattaacctcgctcggttggatgaggcacatgacatgatgagctaagccagtagccgcatagacgagggtttccaatgaaactgtaaaacataatttacatcagtacaaatcacagaaacaaaaccgaaaactatatacaaaacaaagattgttgtctaacctgtctggtgaaaactttgagaagttattgtttgtgggaatattgcctgctaagttgttgtacgatacatttctgtgtggattacattcgagtttttcgattagaaagattgcattacagaaagaaaagaaggaaaatgcagaattttgtgaataactcacagtagagtaaggctgaggcaattgagcaatgacattagatcacccgaaatgttgttgtgttctagtctcctacgaaaaataacagccaaaacaagagcttgcttaggatcatgttgtgggcaatgagtctcggtcaagtacaatgaaatcaacaaatgaaaacttacagtgaaaacaagttctgaagctgaccgagttctggtggtatggaacccgcaaggctgttgctcgaaagatctctgcaattcaaacacacacgaaataagcgttacataacaaaacaagcaaaaatagcataaactcaaaattgttgaatgtactcacatttccataacacttcttagattaccaaactcggctggaatacttcctgttaaatggtttttgctcaaattcctgaaaatgtgaataccgtgtgtcagcaaaagaattcaaaggtgcaaaagggctttatttgaaacaatttgttgaaactcacagctttagaagatgctccaaatcgccaagagacgcaggaattgatccagttatcttattattggaaatgtccaatgtgtccaggttaccaatccgagatagctcgataggaatggcacccaaaagatggttggaggagagatttctgcaaatggtcaacagaattagaaaccgaaagcttaacataacggttaacaacacgacaaaagagtccttacagataagtcatactctccagcctttggaaagctgttgaaatcgttccattaagcttgttcccatgcacattgctgagattttgggggaaaaacataaaatttcaaaccatgttgtaataaaaactgaaactttcaaaagcataacagaaactgagtttagatagatgctcacaggctgttgagatttgtacatgaactaagattctccgggattggcccctcgagattgttgttagcaacatttctaaaaacgatatagtataagtaaatcagatttaacataagaagatagtaatgaaacaagattatcatagtaagagaactttacaggtcaaataaattggtaagcttcccaagctcgggtggaatacgccccgaaagatggttatcattcaattccctgaaaaaagaaaagaaagaacaagaaaaaccgaattcagaagtaagcacattgtcttcaaacatgtcataacaatttcatcgaaatgagtctgcatacaagtaatgaagctttgtcatgttcccgagctcaggaggaatcgatccagtaagcttgttgctatgcaaatacctgtgatgttttaagataaacaacttaaaaccaagtaacataaagggacaaccttaaaaaaatttcgaaaagtatgacttacattttttctgtgtatgtcaaatttccaagaataggagggatcggtccacttaacatgttggaactcaaatctctgatgaattgcaaaaaaaaaaaaagacgcgacaagcatgagataattgaagaaaaaaatagcgattactcaagtcaaagagtgtaagagcttacaatacagcaagtgcctgcatcagaccgatcacagaaggtatatgccccgataatctattaccttgcaatgatctacagacaaaaatgcccatttcaaatcgggtagagataacaacattgtcaagaacaaatgatgaaacaaatactacaagaacatacaatgtagctacttgaagaaatccaatattgaaaggaatctcccctgtgagctggttataagacaagtccctacaagccatcaaaggataa

SEQ ID NO: 62446 - DNA, 1269 bp, Cannabis sativa
ctaactgtctgcctacgaaatccagacttcgttctagacatgtgcctattgataccatctgccttatgcatcacctgtgcagaggaaattgaaatgatacacacaacttcgaactggatgatacccatagcagcctacctcaatattggagaacttccaaatgatagaaatgaagctcggaagatgacaaagaaggctatacggtacatcatcgtagaaggggtaatgtatggaaggggattctccatgccaatacttagatgtgttacaaaagaagaagctgcacaaattctgtccgaaatacatgatggattctgtggcaaccacgcagcctggaaaagcctatcgaagaaaatactaaggcaaggataattcttgccgaccatgatggaagattcaaaggcctatgtaagaaattgtgataaatgccagagattttcgaacataccccatgcaccgcccaatgaactaactcagatgcaaagtcgttggccttttgctatttagggaattaacctaatcggacaattgcctgaaggtaagggcggagtacaatatgtagtggtcgcagttgattatttcacgaagtcgacagaagccgagccgttggcaacaattacatctaaaaagtattggactttatggtgaagaatataatatattggtttgaaatcccgcacaaaattgtctcagacaatggcaaacagtttgacagccaattgttcacagatttttgcacgaaccatggaagcataaaaagtttctctacagtggcacatcctcaataaaatgttcaggtcaaagcaatctatagggcagtcaataggacactcaaagacactttgaaaaaatgatttgaagaagctaaagggaactggttggaggaactaccaaaagtattatggtcataccgcacaactgaaaaaaaggcaactagacaaactccattctctatggcctatggttatgaagctatgttgcccgtagaactagaacctccgtccacagaagattgacctatgatcaagaagctaaacatgccctcctagcaaattactttacgaaattgaagaaaaacaagcctcagcaaacaaagttagtagcctatcaacaaaaggtggctcagtacttcaacaagcaagtgatggcacaaaatttctttgtgggagatatggtcctcagaagggtattcctgaacacaaaagatagcacaacggtgtgctcagaccaaattaggaaggactgtatcaggtagtcaaagttctagag

SEQ ID NO: 62447 - DNA, 626 bp, Cannabis sativa
cagagaggcaataacagcgaagagtctattcaggtttcgtgacatggtggctattaaaccattgtagactattgtaaaatatcagttttgctgaaaagggttgattgttgatgattgaaagaagttttgcagtgtcaaaatatatacacagtaagttcccaatcttcattcgttgttgagtaatggagataaaaaataagtaccatggttctatgctaaggtgtgatgattaatacacctttctacttgaatcagggcactcatgcacttatgatgagaacttcgtgttgatcattgcttctggctcgtacaagtggcccaaatgtggaattgtttttttcaagaatcaagcctccactcttttcatgattagtatatatttcaactctccgtccatatatgaaatctaaaatttgttaccatagaaaatattattcattttaataatttactgtattataatcaatgctagtttttgagcttctcttagtcagatatctatactcagaggtggcagaccaggattttaatcgaaggaaaaaaaaatgacaatttcatagataaaccggacatagttcattacatataaatactgctcactaagcaatcaacataggctaaccaag

SEQ ID NO: 62448 - DNA, 1632 bp, Cannabis sativa
  modified_base (750)..(760): a, c, t, g, unknown or other
gagtagggacaaatttaccgttctgtccttcaatgtattttttccttaaaacacttcaactatttataaattatatttcagtaaactaatataattactgaaatgagtgctcaattatttatagcgttaagccaaactcaaaagaaattatcgtttcacttctaataagttattgaagctataaattctatattcatgattagagctcccactcaattgcactatcatattcccaagatgtatgtattggaaatatctacttggtcaactttaacaaacaagtcaaagaacatgaataatacatttaagtcagaaccttaaccccatcacatgattaagatctattgacctgactttgaaagatataactgtaagtttatgatatcttatccaatgtcaatatcggtccagtccgatgtatactacatacatcctatactagcatactttgccaatacccttgaaaggacataccacatatcaatgtgtaagtaaacattatcgttgattatcacgtcagtggaaattcagtgtactgacaaattatgggactaacttttgagaaatacaatcatgattatgttccactgtgtagacaacactataatcatgaataactatatgttatgaatttgatagaatttatacattaaacatataagcatgaaagtagtcatgtgaaccatgtaacataaaataatttttgatcttttattaattaataattctgattatattgaaatgagtttnnnnnnnnnnntaaaatcccaacaaactcccactatcactcatgtaaaactaaaagtgcatttcaattaatcttaacaccttgatgtccatatcaaatgtagtatgtagtattatcagtgtaatagcacctgacaggttgtattcagtattattcttctccaccattacatcttcttagtcacaaaatcattgatgttatgaaattcctatctatatatttaatcatcttagggtattggattctttactgtttgacaaataaatctgtgttgtttggaagtaacactagtagttaattcattactggaataattttaaaaattgtatggaattttctataggctgaataatcatctactagccttctaggccactttaatattcagtctcattggtagagttataaactctggataagtttttacacttctccaaaaattattgttccacccccagagtcacaatctcataagtagactttttatcattaacacaagtctagaaacttgatttggtgtagtctaagagtattaaagtaccatcattatcgactaacatatagttcctcttttaatcttaagatttgtttgattgtcttccaatattcatttcctagattaaactaaaactactcttaactctcactcaacagcatgtgtctggtctaatgcatactggagcatacatgagacctctcactgttgatgcttaaggaattcttttcatgacttttatcttttttggaatagttgaaattgttccttagataaataaaatctatgtctagaagctaaaagacttcttttagagttagccattagagaaatacttcgacatcttactaaagtaagttattttcactagagtaagtaaattaccagg

SEQ ID NO: 62449 - DNA, 1862 bp, Cannabis sativa
aaggcatatattatagtgatgaaattacaatatgtgttatctacagtagtcacctttaaatgcatcaactcacttgtgcatctaatgatgtccaccatatatctcattggattccatgctattacaatcctccctccatgatgccaatcaatatttgatgagaaacaccaaccttcaaacacatttaggtataaggttcccaatttatgaacctttacttttatctcgaggagccccaccaaaccaacattctgagcctgaataaattgtttaatggacctctacttttgaatgttgtttgctcctcggacattccaactcagaaacttatccattaccaagagagggacctcccccctcccctgtgttctcaatggatctcatctcagactcttggataacatcttgctgttcacttctttcttctgcaagtatgctgaaagaattattagtctttgttatagcaggcacctctttcccttgcactccttttccttttataacctctttaaaaccatccccatccaccttggcctcaggagcttctttcctactatcattcttcacaatccactcctgtcttggctttgttttcttcttacaatcatcagttaagtggcccattccaaaacagtgcttacatatagtaggcttccactcatagttcactcccacctgtacattcatatcatgttcattaataaactctaacatactcggcagttcttgatctattaccacttcaaccaatactcttgggtagttaagcctttctctctcttttgtaacttcatcaaccataattggccttcccatctgcccaacaatcttgaaaagggattttcgaccccaatatttgagctccaaatcctctagttgaatccatataggcacttgctgaatgtcttctttcttgtagttggtgttcgggtcccatggcttcatgatcacaggactccgattgaaaaatgtatcccccattcaaaatcgaatccctaatctcaattgtttcaaatcggattatgaatataccataagccaacatctttactttgtcaaccttctccccccataaccgtttggcaaagccctcaaggatgtgcaaaggaggattcgatccaagaaaatagcataccagtgagggtgaccaatagctcacctcctctgctatatcttccatccctatcttaaccttattcccctgtccagggctcttaaacgagctttcaagattacgaacaatattgccagatctcagaattggtgggttagtggacataccttttgcagttgcactgttacattgattattcacctgcacaaagcttagaaaatctctctcaacatcctccatacgttgaatctccttcagagagctacaaggagacagtggaggctggaaaaaaatcatccatactccttctcccctgtatctcgcgaatcgcatcatcttcatcttcagaatgctccagtggatcgataccagtaatcccttccatctcttgcgcttgtttctcagtcaatcctcctttcgatcctttcttcctcactaacttcgttgcagatttcaatttcccagcgttttttgatcttgtttttgccatagcatcagcacgagctgcaagagcagaaaacgagagaaacctattattattttaaataactattattatattttgggtatattattttttctctaacaaatttgaaattatttactcttatgagtatagatgtgtaaatctaaaatttatgtcacaaaatatggtaatcttttttttttttgaacaaaaggataattttattcaaaaactgagcaaatacaacctgaacaaggcagagccgaagcccaaccaccaaag

SEQ ID NO: 62450 - DNA, 838 bp, Cannabis sativa
catgtgatcaaatatttatgttaactaactcaatatcaacaaaaatatcttaaatttaaacaatataaccataaatatatatataatatttaaattaaataaccaactaattaatgaaaatatcttacacctgaacaatataaccatattaccttattttttaatataaaataataattttaaaatataatttttactctcaatctgacttttgagatttcaaaattaactaaaatcaagagacatgtgccttccttgaagattgaatattcattcattatttaaaaaaaaaaaaatcaattattttaagttatatattatgatttaaataaaaaaatataataaatcaaatcagaatttaaatttaaattacatacatttttataatatagagtgaaaagtataaataaaatcttactttttttaaaaaaattaatttatgataaatacataaaacatgagatacggttcataaaaaaatattgtaatatataaatattttaagctaaaaaatgaattgagaaaatagactaaaaagactaaaaaagtgtgtgataactttttcttaaatgtgacactttaaaatctttcaaaaccactgtatttatttaattttttattttttttattatcaacattttcaaaataatagttaatatcaaataaaatatcaatatcaataatattaacaaattaagtaaatatataaatttatttttttaaaaaaaaataaatatataattttattgttcaattaatattcatacatataatttaaaatttatataaatagcctcacgcgaagcgcggtctttttactagttaaaaaataaggtaa

SEQ ID NO: 62451 - DNA, 804 bp, Cannabis sativa
taggtagtttaaccgccaaaattttggtttttgtggttaagtgttacaaaccgtaaaattcaggtggtttagccgccaatatccctataaaatatcaatattataataactatcagtattatttataataggtgaattctacgtattaaaattaatgttgtttattttaataattaaattaatattacgtgtattaattacttacttatattattagttttttattttaattatgtatattttatttagataaaatatttttatatacttatattaatcaataaataatattatttttgtataaaaaagagaacaaaataatgttgttcttaatatataattttagtttaaccgtaatattttaattttataatactttttatttttttaaagacataatacacttttttgttattttttttcaaaaaaaaaataaaaaaatatttttttggtaagcaagacaacgacttcacaatggtgtttttttttttaaaaaaaaaaaaaacataaacactctttttattttattgtttaaaaaaaacaatcataaaaagatattttttaaaatatggattggataaaaaaataataattgaaatatattttttaaatatgtagaatggatttaaatttaaattgcaatattaaattaaaaaaaaatattatgttatacagctaataaagtaggggtgtacgtcggtcagtttagtcagattatagcatatttttatcaacccaatataaatatcgggttgcaaatatttaatcgtaacccgcccaatcaaaaattagagaaagttcaac

SEQ ID NO: 62452 - DNA, 610 bp, Cannabis sativa
cggtacatgatgggaacaatcccagccctccattgagcgattctcatgaaagcaggcttagacatgtcgaagtgaaccctaggagggttacaccagccaccattgttggaaggtttggaccaattaggtgggcaaatgttggtggcagtgattgtggtgaagcctgagtaacatgcttttgcattattaacacatttaatttggaagcattgcccacaagcatatccatcgttaaatagtgttgtgctcaatgcagcagtatctgtgttgtaaccattggtaaacaagttaccataaccacatgctcctcctgtgtatacatacataacaattagacacaacccaatattattattcaaacttggaaaaatataattaagtcgtaaaagctataaatatatatatatacatatatatatatatatttggttaattaggatttttttcccctcgaattttgacatataccaaatcatgtctcctgaaattttaaggtcgttaaaaatgctccgtgaactgagacggttgaatttaagaatttttgtctaattttagtaaaaaaattctaacatcgatgaaagttcaggggacatgatttagtatatgtcaa

SEQ ID NO: 62453 - DNA, 1955 bp, Cannabis sativa
tagtcatttttaatttatttggtaatacgttttgttatcttaaaaactaaaagaaatactaacaaaatccataagattatattttgtccagcagcaaaagaaaaagaaaaagcttaaacaattacaattattgctattgttctcccaattagtgtggctattgtggccttcttgattggctttttctacctccgtaataggaaaaccacgaagataaagaaatacctctctgttcggcaagacagtggtaaaaagaattcattttttcgaattaaaactattttatcatttgagtgctttgttcattttattttgatcattgattgaggaatgtttcatattcaaagaaaaaaaaagtgtaatagctagaggctagagcttttatagttttatatctggaatgtagttcgggaagaaatttcagaaagcgacacttttcaattttctttggaggaaattaggactgccactaataacttcttggatgaaaataagataggaagaggtggatttggtgcagtttacaaggttgaaatattatgatgaatttctcaattgtataatttataagccttatatatttgtagttcttatcccaccggattttattttcagggtaccctccctaatggtcatgaaattgccgtgaaaagacttactggaaatatgggaaaaggagcagatgaacactttaagaatgaagcccttttgatgaccaagcttcaacacagaaatctagctagactaataggattttgcttggaaggacaagaaaaaattctggtctacgaatatgtacccaataaaagtcttgatttctttctattcggtatggccgatcattatacttagtctgtgaattactctttgttcatttttatgtttatgctaactagaagaatggtacttgaattttaatattgcttctaatgacttgttaaagtagtacacaatttactgaatgttctcctaaggttggatgaattttgatcaatttactcttaaataacctttctaattgattcaaatttatgttatacatacaaaagaaaaacatgttagattggacaacacggtacaagattataacaggcgttgccagaggaattctttatcttcatgaagattctagactaaaaattatacatcgtgatttgaaagctagcaacgttttattagatgatcatatgaagcctaagatttcagattttggcttagcaaaagtttttgttgttgaccaaacacatgtaagtaccaatcgtattgttggaacttagtaagttataaataaagcctatctattataataattccatatttatatattgttcatcactatgaattataaatattaattatgctatttttgtagtggttatatgtctccggagtacgccatgcatgggaaattttcttttaagttggatgtgttcagttttggtgtgttggttctagaaattctcagtggcaagagaaatttttttccgatgaatcacaagattactcagacttggtttttatgctctgttacttatgtctggttttcttcaaggtaagatcgcttctgtgttcatataaatatatatttctctatctattgttataatgtaaaaatgtccatattaaaactcatttaaagagagataaatgagttttttttaaatgataaaataaaagaatttatgttatctttctgctccaaattgtcattcgcacaactagaaaaaagatggaaagtaattattaaaaacaaaggaaaaaatggatgcagttacatatactggcaggtgattaactattttctttctttttttctttcatgcctatatgaaatattgtattctattgacgatttttgttgttcttattataatagaatttatctaatgggtcaaggttgaaatgagagaatgcttccgtaaaagtttttaacttgaaagcttattttagtttat

SEQ ID NO: 62454 - DNA, 633 bp, Cannabis sativa
taggatgttaataaaacatactttgtagtaaatctagatcctggtaaaatatttccaacagttacgatgagtattcttgaacacgaaagatgcatcaacagaagtaattcgaccgaattgggaaggacctatgtcgtcactaaagcacttgaacttagtactttaaagttggcatgctatgactacaacttgaatctattgtcgataccaaggtactagaaaggggtgcatctatgatggtactaccaataaaagtagatgtcctcaaaacaactcgcttcactgtgagatttactagcttgagcaagtgaatcaatcgcctcttaaaataacgagatgcgacaaatttttctctaggttaagaggtccattgctaaggtatggttcctatactaagatgtcgaacagggcattagtataaggatgatcacttcaactaagcttggatgaagaatgaaatctgcaactactaccctaagtgtacttttttctttcaacttagctcacagtaatataattgtatttaatttgatgagaaaaagcattgaacaaagtttttcttagtactacatttaaaataatcaattacatctcatagacctgacacactctcaagcagtaaagcttgtagag

SEQ ID NO: 62455 - DNA, 780 bp, Cannabis sativa
aagacagtataaaagtaatttctgtcgtgtggcagtatttttgtaaagattgagcaaaaagtcagtatttttgtaagtttccctttattttcatcacataattgttagaaaattgataattgtattgtggttttttcttttctttttttctttgctttctgaaatagggttcatttgtgcattatcaataaagattgatttatcttagttataattcctgttttttaattttttatgtggttttttggcagatttagtgaacagggccggtccttaattgaaatgggtaataggcaaaataattttttaagcccttaatacaaagataaatgatatttttaaaattactacaaatatatatatttttaaaaaggtaatttttattatttgggtccctaaaatgagtgggccctaggcgcgagcctagcccgcctatgcctagggttagccctactggtggagccactgaaaagaagaaataataattcttttttacaagttatatgtgagttggcattataatctaacttcttttgaaatttggagcagagagacttcactttgaatatttgtttgttaaagtgatattaactttgaaaattatgatatgcagctttttatgtttggttttagaatagtgtgtagacattgttttcttctctcaacactataagcagggtttatgtgttttttttttttaaaaaaattaatatataaattaagtaattttttattaataatattgtatacttaattaaatggggtcttttcaatattata

SEQ ID NO: 62456 - DNA, 924 bp, Cannabis sativa
tttctctagaatgaaccgtaaaaaggaacttcaccagctttagccattaattatttctgagcgatgttataaattgcgggaccaattccaattgtgacaaaccatttcaatctaaaatttccattaaattcagttcatcttcttcacctacttctcatatgatattgattattcaaaattaaatttcatttgtttaaagcaactttagctcaactgattctgtatctaatggcattaagggtttattttattttatttaagaaaaaatttgtaccaaacttttttttcaatatttttattattgaaatttatattgcccttagcactaaagagcgagttattcgttatgggcgatgcgttgctggatcaatacgtccaagtcagcatttagtgttcccatttttgtttttgtaataaagtaaactcaataactaatcactgaaaaggttcttaatcatacattacaaaaaataagtacaaatctttattaaaaatacagtagataaacatttcaatcacgaagatgttatcaaattgggcggttagctttattattattttgataaataaaagaatattaatagttggattatttatttaataatgtggaatcggcctaattgggcatggaatataagatcagttcagccctctctcaggaaggtatttttgagactttttaaactttgttacacaaatccctttcccatttaaatcatttttgctggcccctttaaaaataaaatataaaataattaatgaaataaaacacttgctctgccacccatacaaagttaaatctgtaaacatataaaattaattgattatttatttatttgcatgcgcaaacaaacagtattttatttaagcagccttgaccaatgagaagaaatttaattatacctctactcacaaaatatcctc

SEQ ID NO: 62457 - DNA, 871 bp, Cannabis sativa
ggatgtcttactttcgtgggaaccattgaaggtttctcacccattataagtaaattccctgttgctggaattggaatggcccccatgtcagctagaaactccatccccaataccacatcaaagtcatccatgcaaactgctacgaggtccagttgcccctcccatccatcgatcttgacattcactttcttggccactccaattttggccatggcctttgaattgactggtttcatgtagccgtatccttctccagttttaggcccatcctcttggcttcgaatttagaaatgaagttgtgggttgcgccagtatcaatcaacacgcttttggcttgctttccatttaaattaagttttattatttatttagttagaaaatcaattaagttggaaaatgacaaaaataagataatccacctcttctctctctctctctctctatatatatatatatatattggccctaggagaatcactaagaaaccagaacttttcttctccaattttagtagctttcagctggaattcaagggattttgggagctaagatccaaggtaaaaacctagaactcttttcctttgttttagtggtggaatttaggttcaacatgcaaatttttgatgtagttgttgtaggggttggaagaactttagtatatttaatgcttgttggatgtgaatttgaggtttgtttgtggagttgaccaagtttgagttcaagaactcaaacttggttcaaccatggtgatttttgtattactgtgttttctgggggtttattgctcggaaatgattaattataacatgtttaggtgttcaggagcttattggaagattaagggtttttttggtttgttatggaggtcttt

SEQ ID NO: 62458 - DNA, 1811 bp, Cannabis sativa
cataaatttattgttgcacaatataacttatgattattttgctaataaatttatatgtaaagttattttgctaattcagatttttataaaacactaatcctattttcacattcttgtaacactagggaattttcatttttatgtttttttttggcaatgtttacaaaaatatgaccatctttttccttcaaaaaaaccaaaattttcatattttcacacaatttgtataaaaactcataaaacgtacaatttctacttttttttagtatctaaaatataattttatattattagggaaaaaattgtatcatattttaatagttagaggagaatgtgttttatgatctatcataaaagattaagctgaaggtgaaggctcacaacccatacaaagtcataggcccacacccacaacccatctttgagcttttttattttctctttgtttattttataaaaagaccatcattttcaatcttttatttttaattgaaaatgacgaccggggtacccgctttattccaaaacactttaaaaaatgttatagatccaaacaataaaataaattctgttttttttttttctctattaattaaaatatagtatcacaataaataaaatcatacaacataattggttttgaatagttttagtattaatttaaatttaatagttaaaaatctagcatgaatttttgaattagccaaaaaaataataatatattttttaattattatctaataaaaatgaaaaataaaataaacaaaccatgaatataaggatattgtctagaatatttgtggtaatttggatttaaattagacaagtatatgatatattggaagggagaagggaactcatgttttattgtttcatatttcacatgcgttcctaaaatgacgaaaatacccttgtcaacatatgatgaaaagaggtgtatcgttttcctacttaaaattaaaataaaataaaagaagactcggatccacataaagaaaaaaaaaaaaaaaaagaagattaatagagacaacccatacttggaatatatagcccgatccattagtggattggatggtccattgttagaaagtcgaaaactaacacccatgtgaaaatgttttcctttttcaataaacatttattcatttaagttatcattcttttatgggcaaagttatatttggtaaaaatataattactgtcaaccaaattccattcattataagtaattacacacactcctcttactcatatgggtaagttaagataagtaggtaggtttggttaggtactctagtctcaaagagtgaaagagaaaaacatactcctttattgttcttaggtagagatttgatttgattttttctttcttttaaatatatatttttacaaaataggtaagtttgtgttgtgattaaacagaataatatttatgagagtgagtgggactacataaacgtggattatctttttttcaatatggcttcagtcaaaggttcccctaacactctgctccatatgggtttggacaaagtagttcaaggatggtcggatagggcccgtggatatgggccctacaagcccataactccaaaatggaattggacttgtgggcccattctaatctctccctcttttctttcacacagatcacagctctcaactctcaagtgccttgttatgggatcaaaagtttaataacgaaagaagggctaagtttcttaataacaaatcatttattttttgcagtgtcataactgacagctcaaacccctcttctgttttctagaacaaaacaataataataataa

SEQ ID NO: 62459 - DNA, 735 bp, Cannabis sativa
ttaaaattttactttttttttcttggattggatgaatccagtctaatccaatacatattggacctaaaatatttgatggatccgatccgttctaaaaaaattaggtctaaaatattagataaactaaaattaaaccaataaatatataagaaatacatccaatggatagaaccgatccaatccaacatccaataaatgttggatcgattggataactaaaattaattggatcggatcggatgataaaatctatcatctaatatatagttggatcagatctggataggcctattgaatgtggtccaataaacactatagtttcttatatattgcaagtgtccacataattttatatattaaacttgggatattttcacaaacatatttttcgattttttattatgaaatgttgtggctacgttgtacatatacacattttttgaaataattgaatgaaaacaatatagtatatagtgattttcacgtgtcaattattgttttaattaatttgaagtgagaccaaaatgggatacgaatcttatcaactcttccaccatgaaataatataatagtaaatttcatcatctttctgtcttttagtaattatataagatcatttgttaaagatgccaaataatttttattttattataaataggatatatttaagtggatctttggtttaaaaaggaaaaattgtttttgaattttttaaacataaaagttgaatatatt

SEQ ID NO: 62460 - DNA, 754 bp, Cannabis sativa
tagtccattccctagctttcttgtggtaagcttttatgtcttctcgatacaaaatacaaatagggttaacagggtcttctggatttggatcatcaaggagcgagcatatggctaacaacaatacctcgatagtgattcccggggtccaatcattatgcaaaatattaacatggataaacccgtttttagatatgttcggatgaaaaacctacatatacacatacaaaatcataaaaatgaaagttgaagaactaatataccaaatattacatttacaagaccgatttgatcattatttttcgagagattgatgactaaaataaagataaactaataacccaattacactataatagcaaacaataatagtgaagagtgaaaagcgaagagagaatgactaaccttagtaatgaaagtaatttcgggaggagagaaaggataattgcgaggtattttgatagaaagtttgaaaactccgccctcgtatggagtatcggaagggccaattgattgttccttatgaaacggaaacaagtcattcttagccacttgtttgtagttcacaagaattgaagacatattaaaatattctccttcttgttttatttcaagttctcttctcatccttgactctgcattaggttcctttggtttttctggttccttcggtttttctggatcctttggtttttctgatgaggatttttttgatgaggaaaaacacattttcattttcatcttaggaaacatagtt

SEQ ID NO: 62461 - DNA, 1110 bp, Cannabis sativa
atccatggtgctgagagaagaagtaacatgatccgtggctcccgtatcagcaaaccagatggaatcatcaccaaagtcaggcagaatggtggtggatgaagtgaggggatcacattccgattcatgttcagcaagaaaggcacgaggattagatgctggaatcttgggagtaacccaatttatatcgaatctatagtggcacacagctgccgtatgcccagattttaaacaaacttgacagataagacgagagggaggaaaagagccacggcctctgccttgcatacgggttgattgatcagtagtagaaccacgaccaggtggttgataagatcgtgaagaaccagatcttgagttgttatatgcaagattagcttgcattttgagagtgagatcggttaaagaattatgatgttcaagccgactttcatgagcaagaagtagagcttgaacctcctcaagacatagttgatcacttcttgaagtgatactagaaacaaccgagtcataatccgggcccaatccattaagaagttgcaagattacatcttgttcatcaatagttgaaccagcaatgccaagagaatcggtgatggtctgcactttatcaacatagtcagaaatggataaagatcctttacgaatgttagaaaactgacctttgagttgcaacaaacgagctctagattgactggaaaaatgttgttccaaagatctccacacagaataggagctggtgaattgagcaacagatccaaggactccttcagtcatggaggatcggagccatgacaggaggagctgatcacggcgtttccactgctgatatgctgggtttggagctccggtaaccaaagtctggggaggggaaataccagcaaacaaaatatcgtcgaggtcatggcctattacagttggtaccacttgagatttccaagcaaggaaatttgttctgtcaagtttgatggtgagagaggctgaaagcgaattggagaaagggttccatgggggtgcggtttgattggtagtagcagggatagggtttgcagtagtaggggtgggatgagggttttgaatatcgaaagcagaagcattatccggggaagccat

SEQ ID NO: 62462 - DNA, 1486 bp, Cannabis sativa
cgacatgtcgtgtctagaggtacattggcacaaaaaataaatttcttggcacgatttttgtagtgtcaagtctttttttcttggcaaatccgcccaacctctcactcattggggattaatgggtaagtattttgtaaaacattttgtttgagagtgttgtgtaaacttccttgtcccatgtatagtatattttcgttagatctatgtggttgttgtttgtttgtttgtttgtttgcttttttgggtgtgatataaattttgttaaaattgtgagatctcgttgtttggagtattctgtgcattcgtatttttctcgatgggttctcgacgccattgtctcatggtcagggatgacctttctcaactggttctcgatacgttctcgataggttcttgacacggatgtcccaaggttagggaagacatttcttaatgggttatcatacgttctcgaaaggttcttcagagatactttctataaatcttcaagtattcaagtcacgattatatccctattttatgagacaaattcgcattgacaagaaaataagaggaaccctatttagttttcttttttgctttatttgtttaagaaaagtactcaagttttatattttaattcttattaattttgggaaacttaattgatgtaattattacctataaatagtaaagtcatttcactacagcttttttagagagcacttaagttgcaaaaaccattgtaagaactttcaagagagatttagaacttctaggttcttttctcacaatttatgtgttatgtttgtttaattattattatcattatttattatttttaatcgatttaattgatttattgtcgttggctaaaaataaggtcaacacttatgtttctcttttatcttattcttccgttacattttatgtttaataatttatcaattaaacttttttttaattaattagtatacttttattttatattgaactaaattaatcttttaaatggacaagttatgctacttaatttttaattatcgttgagtcaaagttaatttaaaggtcatcaaatggatagctgattctatactttcattaatgtttgttctatttttttgcaattttattgaagttcataattatattacttctagcaacagagtaattcttaaagcttcatcatcttcctcttttttgacatatacatatatctgatgtttatattgacaaatttattaagtaataaaaagtatttgttatgttgttattaaccaagaacagaacattgtacaatctatatataaatatatatatatataggaaatgtctatggtagagaccttgattttgtccctatggtagggatacttttttagcccttgattattgatctaatggtaataaagttaaggaaacatgattgtaatagtgtaacctagcttatagtatttttacaccttttttgtctttacactattgtcttattcttcttcttcttctt

SEQ ID NO: 62463 - DNA, 1221 bp, Cannabis sativa
actgattttgtcgactcacagctattgcttgcatgtgtaggtaagggcaaggctaaggttgagcagccgtgaaagcgagcggatgaagattgtacatgtcgggacagttaggcttagagcgtatgatttttgggatggctggtcatattttgcatagtcgctaggcaataacttttgtataaaatacctgaaacagttgtaatattttgtacacgtgatcccggttatatatatatgttatttattttggtatttataagtattcaaataaagtttaaattattcatgatttttaataaactcgttgattagccacgaactgcacaattaaattaaaattacgataacacgcttaaactagtagggtgttacacctgttatgaaaatgctggcccccgatcgagtctctaaggtcgccacacctaaaaatatttttattacactagtaactcatattacattcacatatgtcatataaatctctgtagtttataaattacgtttatttatatccacttatagcaaatttaaaatttacatttaactaaattagtaagatcataatcttacttattacctaattaacccacctataattataaactctaattatttaccattaagcttatttggatattacactgctggtcttttctgctctttgagcaccattcttgattattaaggggtgataatcgatcacaatagaaacttggatcaaaccagaaatagttgtacatatataaaatcaaagctaaccctagagactatttacaaacatttggtatgcaaataaacgtagttgaaaattaaataacataaagtgatcatatatactctacaaaaaattgatgtttttagtgacaacgatcataacataatttttttatgactaaatgtgacttgttacagcaaaatgttacttgtgactaaaatatagtctttagttacaagttgtctctaatttagttttagtcacaacaattattgtgacttaaaaatacatttagtcacaacaaattaattgtaatttttgtgactaatacctttagtcacaaactttttagtcacaacatataagaataaaaatttataattagtcacaattttttttacttttaaccacaaattttattatgactaaaagtaaaaaattttatactgatataaacgttacaattgaatttatgctctacgtatgacaaataatgtgaaacatga

SEQ ID NO: 62464 - DNA, 1630 bp, Cannabis sativa
aataagaacacaagaaatttataagattcaaccttgtgataatagtaatagtcatctactccctttttagttgcattacttaaaaaattattaagatcacaacggtccgaccaagtgagtttcttattagtctcaagaaaacttacaaatattttaacagcataataactctttagaaagttcaaaaaatgatcccactcaactgtagggaaaatacagggtggaatgtctcgtgaatataagtgaagaattcgggaaactaaatattaaatctcatgattctctcaatgagataaaatcagtaccattaaaatagaaattctaattaagctataattgaggaaatatttaaaggaaatatcttttgagatcttcaattactgcgtttttttgcatggagaatggaactcagataggtgtatgtgatttgcttagagaagtgcaaggcattgaacctgctcagataatacctgttgaagaactaaacttaatcggtttggctatgaatattgttctggatggaaccttaaactagtataccgggtccatgtaaaaacatgcttaatatatgttaccttgttgagtgccacatcacattgtgcgacgattagaataacatttgcctcccaagtttgcgtgggaactgatggtcgcattgttggtaacacgttttagggttcacatgccttattggagttgatttttgccctacttgagacgtgtgtatcttcttaaatctctttaaatctctacatttaattcttattaaaagaccgagaaatgggaaaacgtcttttgacggttccacaccccagacctttctacattttggcattttttgaggggaaaacctaatttcaatctcataccgacactacccttttttggtctataagaggaatttccaaattccaaactttcaccagttcttcactcttcaaagcttaaaaaaggaaaagttgttattcaagctacgtgagcttcgttcttcgtccagaccttctaccaagaaaaaattattctcgacgcatcattgagtaagttattttcttttgaattcttctttttttactttgcttttgcatgcctagaactactggaatatatgagtatttcgttgttgcttgctagattctgagttttatttgaatttatttttataaaaaaagaaaagaaaaaataaacccaagaatcgtgcgccttgactcaaaaatatttggtgaggaatttttgcaagaataattgtctctttttccctgtttatgctcttcagagattctgggttttaaaaccctaagatcagtttttgcacaagtgtttctttattaaagtggatttcctcattttaatttttttttccttttgtctgaagtacctgggatgttcttcttttggaaggacaatcgaaacctgttcggatactaacctattcttcttctttatagatgaacctagttgacttctgtgaggagctgatttctgaatagacaaactgctccaacttcttcataagaattaattacctagactttgagcagacatcctcatctctgagaaattcttcctatacttcatgtttctctgagtggtaagttagcactgattccccagaatcaaaaacataacacca

SEQ ID NO: 62465 - DNA, 1209 bp, Cannabis sativa
atctgtggtactataatttgttatcattttccatgatttcctctatctagtaacttttcttgctgagtcactgtgactcttaggtgcttcttggtgcaggtaagaagattagcaattttgttcggccatgggtcagaggtatcccagtaatgtacatttcaaccgtgttgtcttggctttcgtgtagctggatcaaaccttttctatgattgaacgtataacctattcttgtactaatggatttgtaattagttataaaagaattttattaagcaggggacccccatattacgacagtattttaaaatgaaagtcttatgttgaatttaattaaaggttttaattaaaccacacttctccaaaattaatagattagtaataataagtttataaaagcacatatgtggcgtccctgaaagttagggcgttacaacaaggtatcagagcgaccaaggtttaaagatcctgaagactggtcggatatgtacattggctgcgaagacttgtttgactcatggcttagtaagtgctacttgttagtttattaatagattatttcttgattgcttgaattgttgcttatccgaaatgtgtaagctattagagaagtatgataatttgacataaaattgttaagcatgataggttatgatgaaattgttaaatatgtttatgtggtaatgcttattagcattaattctggttcaaaagatttgaaatgatgaaaagaaatggtcgcaagtgtactggaagaagtacctggggcgatctagtaaggttaatggcgagcttaccaggctcggagttactagtgtggtatgaatttctcactatcacaagactaggagaaaatgtatgccatgaagtaagagattacctgagtggtaagatcgtagaacataaatagttgattccgggtagcgtggtgatggagaatgacactaaactagaccgattggcaaggttctattttaagggagcggctgttaaggccgctaggcagtctaatctagttgaaggtgggaaaaatatatcgctctgaatgtggatatagttgtttaacaactaggggttgtctagttctatgctcaggttgttgatctaacctcttttgccaagagtgtaaggtcgagatgtaagagacactagcaaagtgaatgctacatgagagcatgttttcagtgtggggaagtaggccatttagaataa

SEQ ID NO: 62466 - DNA, 923 bp, Cannabis sativa
tttataaaatatgatacttttatcattttttttttcacatttaaagtttgttatagtatttaacatgttatatttttataaacctatcatccaaacccattttatgtttttgttcgggactttaatttaccatatacaaaaaattttaattttttttttatattgtggggcagaatatttttcaaaaatgttgggtaaattttatattgtgtactgtgttaagttttcactgttgttccacggttatttttttagttgtataactgttgcttttaattgttatattttgttattttacggttattttataaaaaaaaaaaaaaaaagtatttttgtaaaaagttctgtataacagtaaaattgtaaacttttccttaaaattcaatattttttgtaaaaatctctttttgtttcaagcttaattagttttatctttttctttagtttattttacatttacattttacagtttctatctatttgaaaaatttacactaaatactaatttttttctagactttacatttatactttcctttgttaattattttcttttttactgttttacttattaaatcttcaaaacaaaaaaaacctttttttttgtctttttgatatttttttaatcaattttagctctctttatttttattttcatttttttttaagtcaattgctaactttttttttctttctttttcttctctctatttttcttttttatttttttttttcaattacactctgtgtctctctttttaaagaaaaaattattctcaaactaatttttttttttatatttgtatatatataataagtgtgtactacaaaaagctgctacttttactgacaactttttagtcacaacataactattctgtgactaaatgtgacttttagtcacaacaaaaagttacttgtga

SEQ ID NO: 62467 - DNA, 1869 bp, Cannabis sativa
ctctctttctctcaatcgcaagggcaacttttccaccatcgccaccactgagaaagaaagctcttgaaacctaacaataccatttttcacagccgcctctttctcctctacaaatctcaaacttcttctctctctttctctcaatcgcaggaggcacggttcgagggacaaggacgtctaggggatgagatttttccaccatcgccaccactactcagttcgacggagcaagggcggtatgtgaacaacaaggacaggatcgccatggcaggaacagaactccatggcctgaacttaaacgccaaagacaaagaaagggaccaagactggccgaagacgaacctaggcaaaagacgattagggttcaaagtcaggcgaggcatttccaagatctgataatgcctctgcgtcttcttcttcttcagagagagagacagagatctgatgatgatgatggtactaaatttatatatttttgatattgtgttttcatacttttatatttatactttttttcatgtcgtgttgtgtcatattttttgtattgtgctcaaattcatttttttgttccgtgtttaagcttatatttttttacttgttgtgctcgtatcttaggatcgtgccgattttgtatgatgccaaatagtctggcccaaatgtacaactctactcccaaggcacgtacaaaacatgcacgatgagttattaacttattaacatgttaatattttcacgtgagaacttcacattttaaagtgtagttacaaaatattaactcatcatacatatacgttgtgtataatctctagtattgtaatgtaaagttaatttcttgataaataattaatattttcgtctccaaaactttttctactactaagttgtatcccttatagtgtacaactcgttaataatatctctcgaattataatttttaaagtaaaaatataaacaaatggtaattaataaatagatgcaaaataaatatctttcacccttaaaaaactaaaaataaaaatatatcttattagaaaaatatatatatatatatattttattctattattgattaacgtaaaaaaaaaacactacattaccataaaagttatatttctagagatattaataacaagtgttataatatagagggcagcaaaaatactaattattcttatacttccctataaagcttcaaagcatcggaggtagatcaatttaatttcaaaaaagagaagatattgatcataattttggtgtaatacgttttcttaattttggtgtaaataccttttcttcagattaaaataattgctaaacaaatatatgatactgaatacagagcaaagtgtcacagatgtccagctaactaatcctcagtgataatgagacttgaattataagcctgcgagctgaaaacaaacacagtactttcttcctaacatctaacctgtaacttccttaaaagatggacatgtctggagctggtccatagagtgttccccatgaaaatgggatgagccatttgccgtccgcgtagtctacaaaaaaccattggcacaaattgattagaatgttgcaacctaacatgcatataaatgtgtacctaacacgcatatataatttataaatgtgtacggagaaaaaaggtttgtaaaaagctatttataatctggtccattaagaaaaaggatatatactgagacagaaaatcagatgaaagctacaacaaataacataagttattcaacatgataactattctgttagtaaaatatgtagcaaatattagttcatacaaaatagttctgagctttaaagatgctatcatcattagaatgtgctacaaagctcaatcacatattgttagga

SEQ ID NO: 62468 - DNA, 1097 bp, Cannabis sativa
ataatatctttaccaagatcaatatcggtcccagtctaatgtatactctatacatccgatactagcatactttaccagtgtcttggaaagcacataatacttatccaaggtgtaagtaagctttatcgctgagtatcacatcaatgtaaatctagtgcactaatgaatcatgggacgtaatcttttaaaatatattatcacaattaccttccactgtgttgacatcactgtaattaggaatgactatatattctggatttaaaagaaattgtatattaaaccataaacataaaaactacgtgtaaatataaatgacttttaatcttctattgataataaataagattacattgaaattagttttatttaaggcataaaatcctaacaaactctcacttgcactaacataaaacaagaagtgcattccaatcaatccattatcctgatatccaaatcaagtgtagtgtgtttgactaaacccaaataactggaattgtaaggttgtggtaagtaactgctttatccactattaattcctttgtggtcataaaacattatgcaatattactttttctgtatgcattactcctccaaggatactgaattttttattgtttattaagtgcatctgaatgaacaaaagacatacctctaattctatccaaaatggaatagagataaaaacagttaaggactttcttcaatttgaataactttctagtgcctttcaaagcaactaagttacataacttcattggtagaactaaattattatagatgggtttttacgtccttcttgaataattcttccacccctggtagccaccatctctgatgttaagtttttagtcggtgtagatataaggattctaatatacacccctatcatctaacatataggtcactttcagagattcttccttgattgtctccaaatgttgattacgtcttagatggctcccactcaatagtagaagtctggttaaattcatacacaagtgtggatttaaccttttactattggtgcttagggacctcttgttgtgacataatatctgttgggttttgtgccccaaataaaacccatttcaatataa

SEQ ID NO: 62469 - DNA, 700 bp, Cannabis sativa
tttttcgtattgatctaatttttacattgtattactttattttattaaaatattgaaagtatagtttaattattttttgtaggttaattgtatttaaagcagtttttttgataatatttaaatgaccattgtattatttgatatttgtaagtaagttagtttttgaatttactttatacttattaagtaaaattaattatatttcatgcaattttattacatactttaaatttattaatatctaaaatatatgaaatactccagattttttaaaagcaaagtatattacttattgtttctcatacttgtatgttaaattaatatacattatataatttgtattatatttgtatttatttattgcatcaacaattttttttttttttcaatcaattatataaatttttcacataatgttatttactattatattttattatatacagagatttatattaagcaataaaacagagaaagaaaaaggattgtggtattgcatgagagagctacttcaaaaaataattttgtttttttaatgttttgtatggcttttttcatttataaacccatatttttagtttgttttgttaagaaatgccatatattgtgacattaaattttcatgccatatttatctaaactttctcatttttttccatagttttgtaaatacccgttattaattagagaaaattcatta

SEQ ID NO: 62470 - DNA, 1223 bp, Cannabis sativa
  modified_base (406)..(407): a, c, t, g, unknown or other
  modified_base (654)..(655): a, c, t, g, unknown or other
gaacagggactaagacccaaaactcgaccctagactcgagacagaggacccgaccctggacccggaacccaggacctgactacggggacacaaccccaaacacggacccaaacccaaacttaggacccgccgatagacctagggccgaacaggaacaagactaagatctaagactgagatccgaatatgaacttgaggcttcgacctaatccgtagtcagtgcttgaatccatgacccatacccagacctagacctagacccaaactgggatccagacctgatcccggacccaaaattggaatcgaaccaagcatgggactagaacccagacctgggacagtaacaggacccaaacctaaacccaaactcaaaccaaaacccataccgggacttggacctagatcnngacctgtgacttaggacgtaaacccagatcgagaccttgacccagactggatcccgaacctagacctagacccaaacccaaaaattgggaccggacccaggacgtaagaaccagactcagaccagggacccgaacctcagactcgtactaggaccgggacccaaattgggaccataacccaaactaggacttggactcagatcgggactcgagacccgaacctgaaccggaacacgaacatggaccnnaccaggacctaggacttgaacatagattggggacccagacctgggaattgggcccacgaactaggaccagaactgtggcctcagaacttggatcgagatccatgacttgaccccaaaccaagacccacactcgggaaccaaaatcaaaacttgaactggagccggactgggatcttagaataggaccgggacctgaattcggacctaaacccggcaccggacccaaccgcgaaccctaaccgagaccgaaacccaaacttgaacctcgccctagacaaaaataaggacccgaacccagactcgaatccaaactcgacctgaacccattccctgtgacttgaaactagaaccaaaaccagaagcggatcaggacttagcaacaggaccaggacccacactaagacacaaacccaccctgggattgggtcccaaacccgaatccaaacccgatctggatgcgggacaaaaaccaagacctaaacttagacccgaacatggaacaggactcgggacccagaattgggatcgagaccaagaattgcatgcaagtctcggtctcggacctaga

SEQ ID NO: 62471 - DNA, 565 bp, Cannabis sativa
ttattaatagtactgtagcgttgggcggaatgataaatttataattattaattaaggagatttagttctgcaaaattcaaactaacttcgtaaatatatgacatgaaacgaaactaagatataaagatatttaattaatagggatttatgatcgtgtaaaaaaagttattccggtatgacgacccgagagctagctaggcccaactccgaactcgatcagatctcatatattatacaacacaaaattaaaaactgaccatgatcataaaaaccaccatacatatatattatatataattaatattccatatatataaaagaagaagactaaaaagcatttaataatattaatccttcttaagttcttgttattattattatatattattatctcaatgaagcaaatcaaccgaagtagcaatattagtggaggagatctcagctctaagatgagccgcgttgcagggaagtttaatctcattattgttgtgatggtgacgatgattgtgattacggttaagatcattattattattattacgatccaccataccctcatgatcaa

SEQ ID NO: 62472 - DNA, 679 bp, Cannabis sativa
ttttaatattaaatatataatgacaattttatcttttaaaatatatcttacaaaagaactaccatataatatagtttaactcaaatggacaatttaattaatttaaacattctgattaagttccctaataaaataaagaagataaatcacaactattctatttccaaaaaaaattagtaagcaacatattacaaatattgattctaattatttttcatttattctgtaatatttctctattaatttattccgattttaaatactgtatagtaaacgtgttggaaaagaatgacccaatggaaatgatgataaaacaaaaaggttaaaaatgtggaataatatataatcacaatactcagttggttatccatttagaacctaaacccattattattaaatttcttagtatttatttttggttattaaagtgttttagttattggttattatatataataataaagttattagaatggaagtttcaaaattttggtgacaaattatatgattacattgttagagaacaatgtttttggcaactaagttttttgtatggtatttccaatctcattagaaataattattagtgattttattattttttattttatatattttatgtaatttggaacgttatattttcatttgaaatatttaaaaagagtggaacaagcatcga

SEQ ID NO: 62473 - DNA, 1281 bp, Cannabis sativa
tatcacataggtacggctagagtaccgaatatagactgatattatagtcgatagtattgtcgtacaaatgtttaagactcagtaccgcctaggttgcggggattaaggttacagttgggtgtatgggcgcctgattgtaatccaagttatatttatgaatatgattatacttttcttactaagtctgtcgagtcataaatattgtttgcatttgtaggtaagggcaagggtaaggttgagcagtcgtgagagcgagggggtgaagattgtacatgtcggagcggttaggcttggagcgtacgatctttgggacaactggttgtattttgtttagtcgctaggcaacaatttttgtattacgtactttgtatcagttgtaaatattttatacttgggatctcagttatagatatatgtcttttattttgatattcagacgtatttaagcaaaaattttaattactcgcgattttcaataaactctttgattagtaaaaagttgcatagttaatataaaatcatgttaatacgcctaatctagtagggtgttacaatttggtatcaaagccaccagattgtcttctaaagatcgtcacgacatgtacaatcaccatcagcaataatctcgactcacagttcagtaagcccttattgctttagtagtttattttattagtatgttataagaaaagcttgataggaagcatgttattagtagcctgatagctgaataggcgcatgttttgattttttttttttaaaaaaaataagtggtaatcagtaagttattcttgatcgcatctgaccaggctagctcttagtttcccagattgttctattagaatagacgccatgcaaaatacgaggagccatggtaactcggtcggatccaatggcggccagggagttcagtttcccctaaatatacgtggccgaggtagaggccctagaggtagggtacgcggtcaaggagatgttaacccaccgaaggctgcccaggattggaaaaataagtttgcagcaatgcaaggcagaatcaacgaacaagatgaagaaatcatacgcctgaggtagcatggtgctcctacaatgactgttccagagatgcaggtggctcctacccctgctgtgcaggcaaggctgattgttgcagtgaatcagatagaaccattgtacgaaaggttctacaagcatgcacctccagtgtttctgagaggtcctaatgtgatgaaagtcgagcagtggctaactattattactcaaattttgaactttatgggt

SEQ ID NO: 62474 - DNA, 952 bp, Cannabis sativa
ggtattatttttaacgcccaatataaagattggaaggattatatttttgtcgagtttttcggtttgtatttttcgttgagttatcttgatttaatttgggcaggttattcggattggtcagtttataaaaacttatgtacaaccttactcgaaagcttgtagaaccttctctcgatggtaacactattgttctttttcttttatagacttgattacagactcaagacaattacaaaaatatacataagcacagtaaaagagatgaacacactcttctctacaaaataaaaactctcttttctaaaaatacgagtgaaacacaaaaagatgtgaaaaaattactaaggtgcaccattttctctttctctttcactccttcataattaagatacaatcttcttcttcttctttttattttattttttatatagcacaataaaaacgtgacaaattccaaagatgacattaattaaagaggattgaaatttcgtagaaacattattcattagatattaataatcatttttggtcagccaatataaaatatgatggtaaaaaagttcaacacatcacaagtttacattatattgaaaaatcatctacaaaaatatttaacaattgtactcatcataacttttcttagtgaaaaaaaaaacatgactaatcaactatataattaaaaaaaataattaagagaattgaaatttcgtcaaagcatgattatctctaattacatggtcataagatgtaaaaaagaattgttatattaattaagctaattatccatataaatatataaatatatttatataattaagttagccacctttgaaaaagtttatgaatttcaacttttttgccgcccattatatatattattggaaattgcatggtttaaggtcaacataagaacacttagatattagatttagacatcatctatttttttttt

SEQ ID NO: 62475 - DNA, 806 bp, Cannabis sativa
ttttgatgaagccccatcaagtttggcatcataaaattatgtgttattctattagttcaaatgcggtcggttactctatcgaatgacaagtatggactcacgttgacatctcaacagctttcatatcggtgccataaaaagctccatcaagtttcgctgttattctctatgagttcaaatgtgctcggttactgtatcgaatggattctttagccttcaaaatcaacagaaaaaacgaaatcttgtttctctccatcagtgtggtaataaccatttatttcatttgcttcaccatcataatgacaaaattactaattgtttaaaggaaaatgaatagcatttctattttctacaacatatttaaaataggcaaattaggaaagaaaacgaaaatattgaatttagattcttcatactacatccataatatatatgagagttcaaatgaaaattaacaaaggagaaattgatattatccattgcaacactaacattgactctcactaataattaaacacagaaaacataatataataataataataattaattaactcacttggtctccgtaactattggatgagtatttttgttcttcctcatagtatcacaaaagagatagaaaagttgtgcaaaagatttctttggggaataaatggaaacaggagtaagattcacataacttcttgagaaaaggtttgtctcccgaaatcttatggtggccttggcttcaaagatgcgattaaatagaatcaggctatccttgctaagtacatacgggcaatatccactaagcaagaccttct

SEQ ID NO: 62476 - DNA, 947 bp, Cannabis sativa
ttttgaaaatgtatatgtacaaatattaatttataagaagttaagggggcaaatgacccccaatgaccccataagacctcctcccttcgcccctaaccatgtcgacgacaccaccacattgacaacaccaaattcacacactgtcacattattatggcatatgttatttgtatataggtttgaacataattcaatctaatccagtccaatccaattataaaaaattagatatctaattacaattagattggattgggtttttaaagttgaatttatcaagaattaggctccacttatttccctatctttagtcctctgctacattactaactgttattgttactgaccgttattttcgttatgttagttacgttcagttagttgtgtcagtaagagtgtttttgctcttgacttgagttagttggttgttatggttagtctaactatagttagtcagttaactcccttttcctttcttgtatataagtcctcttctctgtttttgtattcgttaatttcttcttgtaaagattacattgaacattcaataaagctttttccttttcgtaagattgaattctaattagattggatctgttattgaatgtctatcttgaaattcaattaaaaaccaatccaatccaattatatctaatacatattaaaaaaatatttatatataataaaaaaatattttgataatatttttacctttttttttttttttgaatttgtaatacttggttattttatgtatttattttcatgatgttttttctatttaagtagttggcaatattgttgttttagttatttcaaacttttgagtgtattaaacttgtaaggattatatattgggaaatttacattatatactaacttttgccattttttttacaaaaataccggtattttatacttttttgtatttttttataagtttcata

SEQ ID NO: 62477 - DNA, 725 bp, Cannabis sativa
tagggtaacctaatatattaagtcatatgtttttagtacaaagttactttaaatagtcaaattattaaataaatatagaaccttaagtaacctgataccttgaaattcatatcaaaactgataacaaaaacaaaatagctaaaagtattgatatcttgaaacaaatcaaacaaccaacaaagaacactaaaagtaacctggtgccttgaaactcgtatgaaactaacaataaagacataagtaaagtaatcaagtgttttgaaactcttatcaaagctaacaataattacagagaatcataagtaacttggtaactgggtacattgaaccaatatcgaaaccaacactaaataaagtgccccataaccttcaaacccaacaacaaattcagagatattaataatttgttgcaattggaaatccatatacacccaacaattaataaaataggatagtacattcagaccatatcaatatcaaatacaaaatagagttatgcggtaccttgaaacccttatcaacactaaagtaatgttgatatacagctaatcatatgcaattattaaaaaggaataattaatactcgaatccaatatagttatattgagaagatgataacctgatgaataatgaatgactactactgcttgtacagacatactaaatttgatctctaattaatgctatgttgtgaatgagttatttagtgaaattgtacaagtaat

SEQ ID NO: 62478 - DNA, 862 bp, Cannabis sativa
  modified_base (621)..(621): a, c, t, g, unknown or other
gttcaacattcatttgaactttagaggtactgaccattatcaatcttgttctttaagtgggaggctttaaaggatctttcttggaacctaagtcctttgattgatcactcacactaatcaagatattttcaagaaattttgcattcattgattccacaattcttgtgttatgtgatggacaataaaacttgtaaccttcagacttttcaatgtaccctataaaggattcacttatggtcctttggtctagtttcttctcatggactgtatattctaacttcagatggacacccctaaatgcgtacatggtttaaacttagtttccaacctttttataattcaaaaggagtttttgagattgcctttgttagaactcagtttaatatgtacaaggatgtccttagagcttcagccacaaggattaggaagataagagtttccgctaagcatactttgcaccatgtccattaatgttcaatgttttctttctacaataccattttgctcaggtgtaccggtaatgttgtaatgggaaacgatactatttttgtcaagaaactttgcaaatggaacaggtgcttatccttcttctgtgtatataccataatactctccacctcnatctgatctcactatcttaattttcttgttgcattctttctctaattccgctttaaatatcttaaagacatataatgcttcacttttattgtgaagtaagtagagatacatgtagcatgagcaatcatctatgaaggagattaactatttctgaccatgtgaatccatgtctagactacatatatcagtatgtatgatttctaatatttttagagatcctatggacaccagttttgataga

SEQ ID NO: 62479 - DNA, 711 bp, Cannabis sativa
gtattttggacatttgaccatgttttgtattttcaaagaaaaagaaaaattggatttttgttaattgagaaaacccatttcttggattcagcctctcttagccgacccctctccctctccctcacatctctttttgtttttttcattaaaattggaaggaaagcttgattaatcttgggtgattgctgtactcggagcttgagaattgtggtaaagctctctaattcctcattgataatgttaaatattgttagtgaatgctctttgaatgtgttcttgatgttcttataaattattgatgcatattgaagatttgaagtgatatcttgatgagttttgtgtgtttaaatcattggaagtatgagaattgcatttagtatgttttgggggattttagggctgagtagtggggtttaatttttaggttttgactttgattttctgggcaaatattattggtttgaatattttgaagattggaatttaagcttgattatagtgaagctatatggcatgtccaatttgtgtatctttagtgttgtttaagcttggtttgatgctcaaaattgttaccaaagttagtttggtttgttttgatttaaaatttgagtttatgaatggttttgtttgagttttgggtatattttggttgaggttcgaaaatataaaaaaattggcatttttaggcttcaaaaactcgttttcttagtt

SEQ ID NO: 62480 - DNA, 1207 bp, Cannabis sativa
tgtggtgggtggagtgggtcttcgtgctcggatggtgggtcgagtggtgctcagatggtgggtttggtggagattttcgtcgtcgtggtgggttcaagagacttcgagagaaagagagggaaggaagagaaagagctactttttggaatgagagggtaaaatgagattttagtaaaaattgatctattctacaaatgttgaatagttttgatttagtggaccaatttcagtccaataaatacataaatattcaaattttccttatattttctccataataatattctttgcactcagacataccatattttggatttctttctttcttttttaatttttgtcttgatttggtccagtttggatttttgtgtgaatttttttaatcgaattttgttctgtgttgttgattggattttcaaaatatataccatatttgaaattgcagttaaggttactaattatcacatataattaaaatataaaattgaatgtaaaaaaaaaatattggtggtcagacttgttgagtggattgtacttaaattttcataatctggattttacatttgattgaataaaatgtagtataaaccgactaaacttgtcaatgtacacagttataatctcaattttgttataaagtttatagtgtagttatttaattttgagacatcttgcacaatttttttttttttttaaaaaagtatgatttaattgtatatgttacatacttataaaataaaagcacacactaaattatttaaacttttgtttattggtgtgttaaattattggaatttttttttttaaatttacagaatatattaaataattacaatatatattatctttaaaaaaaattaaaactaactatgccgaaaatatgaagaaagtacatatatcctattttaaaaggtgcaccatacaatttctcaattattattattgctagctcatcccataataattacagtagctagattagatagccaactagtcacatgacctaatagaatcaaggattttgtagtcttgtcctatgttagctcataagggactttatttttctctttcttggtgggcttgacaaattaaagaacttaatttttaagaaattagactctataccatttttatattctcctcttttatttttaccatctttttaaaaatttattacttttacctctttttttaaacattgtacaaa

SEQ ID NO: 62481 - DNA, 603 bp, Cannabis sativa
gtgtaccaatataaacgtgtcatgtgtataagagtgtacacataagtagtctatgttggcagttaactgtagaaaacggatgctaccttaaatttgtaaacagttgagtagtttagaagattttaccgttaaaatttgagcttagaaagttaagtgcaagtagaatgataattgagaggatttagccgcaaaaaacttttaatttaattatgtagagaagaatataaagaaattgatgtgtggtttaatgtaaaaatgtgttgaaaaaagataaaataaaattttagtgatgtattttaaagaatagaataaaaaaactattaggagtgctcctatccatcaaaacccctttttctctataatacattagagaagcatgaaaaatactcttacatcatatgcataaaagtatatgtaaaataaaaatcttctaaaatttctataaatgtagagaatagagttgaatatctggatccaaaaatccacccacttggcaaatccatcctacccaaaacccgaaaaatgggttttaaaaattagagtctgaattcaggctcaattaatcaaaaactagaaaaaatcaagttacacctgaacccactc

SEQ ID NO: 62482 - DNA, 787 bp, Cannabis sativa
taaacaaataaagaaattgattttatatattatcaataaaatgactataaatatataattaattattatttgtttgacttattttacgtgcattagaatataattataaataataggcctaatataataaaacaaactcatttttgtgttaaatttagtacaaatttttaaattttatattggacatggtctaatagtgtgctaaatcttgagctaatttgacaatgctaaatgttatatcaaatttgacataagatataatatagtaataaatttgaaaaatgtaatttttttcaattatagtttatcattgatcattaatgataaactttaacatataaattattgcttttggacaccaatggtgcccaacactttctatagaggaaattatattttatatttactttattttatttgttttaatttatacctttatttttacattctttaagatatatccacttttataaatgatatcttcattataccccttaagttaatgtaatttatttgctaataacttctgtgcaactgtttcggtccccgaccttcaacaacttatgtgctaataacttaagtgaaggataaagatatattttgaataattataatataaatgtatttttgattaatagattcaaaaaaaaaaaaaaaaaagtattcttcaactagaactcagtatttaattacaccaataacaaaaatactagaatgatattttttttggtcataatttgcagtattgaatgttatttgtaaattggagaaatataccatttacttt

SEQ ID NO: 62483 - DNA, 936 bp, Cannabis sativa
gaaatcccgagatagggtttcggcaggtaagactaatgactttacagtggatgatacaggaatgctacaatttatgaatcgtgtttgtgtgcctatggatgatgatatttgtagagagatcttgaatgagtctcataagactccttacttagttcatccaggagcaacgaaggtcaacaaagatgtaccaagacctcaaggctatgttctggtggccaggcatgaagaatgatattgctgagtatgttgctacgtgtttaatttgtcagcaggtaaaagctgaacatcaaaggcctgcaggtttgttgcggccactgaatatcccggagtggaaatgggaagatatttccatggacttcgtggttggattgcctaggaccatgggacaatatgactctgtgtgggtcataattgacaagtttactaagtcagcgcacttcttacctgttcagacgaacttctccattgatcagtatgctgagttataagttagagaaattcattgtttcagatagagatccgaaattcacatcaagattctgggagagtctacatcgacctatgggaactcagttgaagttcagcacatcatttcatcctcagactgatggacagtccaagagggctattcaaatcttagaagacatgcttcaggcatgtgtgcttgactttgaaggatgttgggtaagtaccttcccttgatcaagttctcttataactacagctatcaagcaacaatcgggatggccccttatgaacttttgtatggaagaaaatgcagatcacctattcactgggatgaagtgtgtgaaaagaagttcttgggtcctgaggtggtctagagaacaagtgaggtagttgataaaattcgagcgcaaatgctcgcaactcagagcagatagaagagttttgctattccaaagcgacgggatatcg

SEQ ID NO: 62484 - DNA, 1461 bp, Cannabis sativa
taatttatttgatttggatcactcctctatgtagaaagcaagtgtcctttgatcttacataatcggttagacaagactgtttattacattaatcacataatttaattaatataaatgtttaaagaataaatataagaacagtttcattcgttcttaattaattgcctaaacgtgtgcaacctatcaagtcgcatattgatttttcatattccaaacacacaagctcgcgggctctgaggtggtctgttcgcataacgggctttcaggccaacttagttaattaatgtgtctgcgagttcacatctcgatcacatatatggatattcctacgttgacaacttagaacttacgagttcttgtcaagttgtcgaacacactagtctttcagaccaaacctatgtaaagaagcggtctttacatgtcacaggagaaatgtacttgctggtcgcatataatcgatatatgcgcgactcgtactaatttctcttagtcctgcttatctttcgactatgctgggcataatgtgtgactaaatcatatctcggtcgcaccttcttgcaagttcacatcatgcaaggtcagctctactgaagttatttattgacacgtcattcttttctatcaggaactgaatccacgtgtcagttatttatgagattatacttgtatttctagacaaaaaattctcactataacaaaaatagtaacttaattgaaatacttgatcatataaaaaatattggttccattccaaatgcattctttgcttattgaattttactaacaattccagtaactgttgcttctcaagagagaaatttttcaaaattaaaattaataaaatcatatttaagatcatccatgttgcaagaatgattgagtgaattagctatgttgttgatcgaaaataaattgctaaataaacttcattacgatgatttaattagcaagtttgcatcccaaaaagtaagaaagatacatatttaaataattcatctattgctatctcttcttattaggttttatgttttaagaattgtccgttgaggaaaacaccacgtttactaaactgtaattggaatcagaataatcaatgcgagaaatgtatcggtttaaaattagaaaataatcggaaacaatattttattatgatgtttactaaactgtccggaaagaaaaccaaaatcatattattttgtttacataactaggaaaggtaatcggaatgctttaatttgataaaattgccattattagaacatgtaaatattttctgtttatagatttttaaggggtatatttgtctttttcatttttaattaataaatataaattaaaataaattaaataaggaaatggaaaggcatttcctataaaaataggggtagaacctttccttttgctttctccctgatttgtgtgggtcccagtttctcccgttttaaaatttagtaaacaatt

SEQ ID NO: 62485 - DNA, 3727 bp, Cannabis sativa
atattctctatgttgttggaatcgttagcctatttatggaagctctaaaaacaactcatttaaaatctttaaagagaatactttagtacatcaaaggtacgaacaattatgggctattttattcatcctctaaccattatgagatagttggatatagtgatagatattggagtcgagacttggatcatagaaagagcaccactggatttgtgttcttcatcggaaacactacatttacttggatgtcaaaaaagtgaccaatcgttacgctattgacttgtgaagtcgaatatgttgctaaaattctatgtgtttgtcatgctattaggctaagaaagttgatgtagaatctgaatgtgccacaagaggagccaactaagattcatgttgatagctaatgagcaattgtactagcaaaaaatctagtctttcatgaaagaagcaaacacatcgacacctgctatcattacataagagaatgcattggatgaaaagaagtattaaaactacatagtattattggagtcacaaattaagtttaagggaggtgttgaagtattaaactttatttaatatagttaagttttagaatttttttgttgttactaatatatctagactattattacatttactaaagtgtctagaattttcttgtttgtttgagtactcttgaattttctagaattatcttttacttgtgttagtagggagaattatgtaaaagaatgtagaaggtagtcatataatattgtttctagattagtctatagaggcctataaataaagatgtaatcctatcattttgtaccaagtcaaaaattacacaaattgagatataaaatatagcttcttccatttaattattctctacaaaattcttcttattatctaatagtgtatgcatttatatattaatataatatattaaaatttaaaagtaaaattttagtaatatatcttaaagaagttaatgtatatgggtaaaatataaaatatagaaaataaatttttagtgatatattttaaaagatgataaatacagttttaggcgttatgttttgtaaaagttactgattgaagcctctattttattaaataaaaatatagatcctttgtatgtcaaaatggtaattatttattgagattttcataaacaaaataaaaataataagaaagaataaataatcaatagagaaagtataaaatgagacaaacagtttttaacgtggttggagctttaactagccttagtccacaagtcagtattattcaataatctgttgcttgtaaattccttagaaaattcatacgatgtatgttctcaagtttgcctaaacaaatttacaagaaagttttttttttccttaatccatgagattaatggggtatttataatagtttgagaattacattaggtttcccatttccctctactggagagcttacagtaaacaatactcgtgggctttctcatgaaggctagcccaaggagaaggtgatctgctgaataggtggattcgatttgggttgattgggtcgacaccgtgtacactgattgtggtcaattaatctgaaatagttgcataatgtttggtgtgagaagtttaccctttaattttgatatgatgcactattatgatctaataattggagtttccttatttgtgtgcatgcatataaagggaaactggaagagtcttctaggaacgtgctgtcttgcctctccggtatcatagtaccagacatgttctccaggcacaatttgttaaaggtagaagactttgcgagtgtggaaccataacatgttcctggaaggtaacatccaaatgggctcgacccatttgcctttaatgaggatcccactgatgggtcttgaatgctgatcaggagtccacgtgtccaattccaaaaaagcggataacatttaccccccaagcttccagaatgctatggttgaagcttgcatcactatcttaatttggacatgtgcaaattaaagaataaaatagtgacatttcaattgacattcgaccgcagaagttggctttcatatatgatgatgatgtgtccacatgtcaatcgcgtgtgtgtgtgacaagtcgcgaccatcgaggagtcatcttccaaatttgcaatattgtgacagttgttcaatttttggtgcaaaaactgaaaaaggtgcattttcatcactagttcataccttgattatggcgtgcattatatgctaggatacacatagattgttggagaccctaatcgttggatggacattgtgcttttggggagaagatcatggtcgtatatctcctcttcacgtggatcacctttttgggtataaataaacttggtaacttccagttaccacttttccttcttttttcaaaattttcaacccttaatggtttacaaattttcttgcgatccctagaactacaaaccgaatttgaatcagagccttcttctttaacctagaaaacactatggatttttgcctctgtctgctgctaaggattagggcacgagagttcctatgtcttccctctctagtaattaggacagttgtagtagaagaaactgccagcctaaatttaaattccaaaatcgattcgttgatcgcccttgcatcttgccttcgtgattggtgcgatcaacttcctcaggcagatcccacgacgataagccaaacatctccattatcaatattaggtatgttgtctctttgtccatgggttgtattttttgaattcatcactttaaattatgtttggatgctctgttctgggatgagattacggttttttttgtgtgatcatcattttaggtagatttaatcatcacgaaccacattatctttcgaatatttttcttacaaatttctagagttgatcgatttgtgacggaagtgttggtaaactcttcttttcacccaaaattcatctcgttgggggtttgatgttgatttctgtcatctctcttcctgtctcattttcgacttcctatttggaactagtacctcttggaagttctcaaaactggatatttagtctagttgggacctctctaagaagtttttgggggaggacccccagctccctttctatgctaggttgttagagtggataacttcttggattttcttctttttgtacaaaaactatgcttaagcaatggagtgagaagatgctccaaagttggtcctgaacgacagtccatgggaattggaccagcacatcaatatgtttaagaactacaataacttgaggaagtatgagaccctacgaggactcaaaagtgttctaaaattgttctggaataggctctctgtactcggggagaggcccaacaagtgcgcagaaggatgcttcggtgtttggagttgggctcacatttaaatgggggaacacctacccttgaggtgctattttgtagagttctatgttgtagccggaatagcacctttcctgcttattccttaggtgtagtgcttgctgtcaaggtgggacctcttttatgtgaaacatggaaaatctgtgccgaagctggaggagatcttgtacttttacatgatcatgtcccaaccaatgaggggccagaaggagaaggtgggcttctacaagttggagtgatacaccaggagtattccctaccccaccagttccacatagtgtatccacgactgtaatgaccgctttagtaatgtggattagaaaaggcaattagc

SEQ ID NO: 62486 - DNA, 1725 bp, Cannabis sativa
  modified_base (1663)..(1678): a, c, t, g, unknown or other
tctgtgggtgtaagggcccaatggaggcttgaagcggggacgttataagaactaagaaattgactaagtaatatatcactaaggcattaaaaaaatacaagtccaccacgatttcccactcatacaacctccatgttaacgtcagaatgtcaacctgggcattggttattgaacaacctccagtaaaatgaccgtaactcattctattttttcgattgacgtgatttcacttgcatttgaaagctctttcaagacatgtctcacactcatatcgtaattttaaagatttcaatttgaaattttatccccaagtcagatgcaattttttctacatatcactcggaaatgatccaacatacacgattcaagctctgaaaattgacgattatcatctaaagtcaattttagtcattagatcatcatcaatggtcaagattagccctaaataatttttttatatttttttgtattattttattattattttaatggacctctttttctataaatagagagctccattagctcaattttcacattctggaaagtctctataaggtcagagcatctctctctaaaaatctgatctctttccttagtcaattctcttataattcttgtgagaaataaaaatttaaagtaaacgtatgtaatgattatatttagacatgaaaattagcagtttgttagtactttaattattatttttatggttatatgtgcattattataaaataagtcctattgtcagaattagacattagtgatataatttctcaattacagaaattttattgaattcttggtatgccatgcatgttaattatgaattttaatatttttattttatgtttggtaacagtagaaatttgatggtttggcaattagggtcactttgatatggtttaataccttatatttagcgggacaagatgtatggatagttagaatattggggttaaacaaggtatttgattatgatcattttacccctagattttaagattacttaaaaaaataaatatcatccgagaattaatataattgttgtacaacaccgcgcgaagcacagacaataatattgatatgattacatatatagttgttttacataaccataaccatatggttaggactactggtatacaaattcttatatggatagacttttaaactgttctccaacttatcagattggactagagggtgttcacgttgcgagtgatgcggtttttgaccatttttattatagaacgtgttctttttatatttatgtctcaatattttttgaaattgatccccactttttttattaaaaaaaagttataacagtgacttttccgacaattttttccacaacggtaacttttctggtaactttttcggcgctgacgacttttctggcgccaatgacttttctggcgaaacttattattacaagttttattaaatttatttattatttttttttttcatattttaaaatttaattattttttaatctcatattttttttacattttttatttatgccatataaaaataaacaaattaatgaaaaaacctctatattcattgcttgaaaaaaaaacatacaaatacaataatagcaaggctttctttggtgggcctttcatcatattgggattatttcacaaatacnnnnnnnnnnnnnnnnaattacaaaaatacagttttacagaattttaaacatttttatgattt

SEQ ID NO: 62487 - DNA, 873 bp, Cannabis sativa
tactcctccatggctagccaaacctgcaaagggcatggtctgactgcccgtgatgcttccagggccagccagacctacaaagggcagggtctagccgcccgtgacttcatagtcgactgatgctggctgtgtgatgacaaggggtagatcacaccaaatttttgagtttggtggatctagatgtctgaagtgatttatttcattccttaaatttctgttttggatgtttccacccattactgatccttttccgttgaagtcgacctctgggcacgtcgttccccttggggatgaagtgttgtactctagccggccaagggtactactgttgatggctggccgtccaatgactgcacaattgggggtgttactgagctagaaatccctgactggctcccgtgccgcaggttgtcgggatcttgctatttctgttggttaacctttgaaaaaatgtctatcctccctctgctagggggagatctatcctagttcctaaggagatcctggccttttttatcgattctctggttgaaccgtcttatcagatcactggcctcttaattacaatgatctaactctgcttggtaagatcaaaggatgtacccctagtcatccactaatcttagaaatctgcatcgctactgaccaaaaacattacaatacaaaacatgtggttttttaattagtcctgcacggtctacattttcctttagtctgaccagctcaagatcttctcctaacgctggattgccaacttttgggcctgtctctccggcgtagaactaaagacgagatcaagttattgttccaagggactgtcgcccttgtgtccttccctcaggaggaggggccaatggtgggtcttctcttaga

SEQ ID NO: 62488 - DNA, 2554 bp, Cannabis sativa
taaatttaatattaaaaaataaaacaaaaataaataaaataaattataataactaacttgatgaaggcaattcctaacacgaacaaatgcagaaagtgtaaccagccttgtcataatatctctagatcaggttattattattactttgttttttaaattgaatgaaattttattaatcaatcaagcttcagcattattatgaatgaacaagagccacaagtaacacaatgtgcaatcttattcatagaacatttaacaaaataaaatttaacaaaacttaaagaagctaaaagaagcttataatcattaattaactaaagaatcaaacgaagatgacatatgcacccgtactatgaattgtttgaacaagaactgagcaatcaatttcaataataatatgttaattcttacgcttaatcaaactcaaagtctccttaatcccaactatttctgccatagcgagttgattaattatacaactaacccaatttatagaaaaagcttccactaaacgaccattaccatctcgagctaccccacctgctccgaaaagacttttggaatcaaagattgcactattaatatttatcttaattgtatttaaatatagtttagtccaatgccctaagacattatttacccatgaataaataatgactcggccaatttcctttcttgagtacttttccattgattaagcaccattttggctgacagaataacctccaatgtagaagaagtcttatccatccaaacaatatcattcttttccttccaaatcgcccaagccaccatagctagctcctcatgcacactcaaagcctattaccgcaacaaatcagaaaaccaactctaaaaatcctaagcagacacagtccctacactaatacttgacctactccaacaagaatgagcaaacaaataagtcaccaaactatgaagaatagtttcatcctctgcatgacaaacaggacacaaactatcaacatgtacatgttcgaataacaattgcactttagtaaataaacaacctatataagccctccaaataaaatgacctactttagggggaatatgtaaattccatgcaatctttcacatgtcagaatccacattagccaccactaacgcaagagatggctgaagagactagcttgtaaccttgtttaataatatataagctagtgacatcatgattccaaaaccaaccatcatcttgaatggaggaattcaataaaatactcaagattaactcacgatccctaagctcataaacatcattaattagattcacattccattctctacaatcaacaaccatacaattaaacacaatacaattatccaacccaatcaactggaaagtcacatacagattctctatatctggtagccaaggatcacgatgaatattaacaacagttgcagacccaacaaaacactgagctcctcctttcactagagactaagattcgaagatactcctctaaataaaacttgaattatccccccaaagatgcagagagattagaactacgagggtaataatgggctttataaacacgaccaactagtgaaaacttatttgagactaacctccaagcttgtctccccaacatagaactctcacaagtgttgaaagcctaacccactataagacttatgagcacgcaaattcttccaactaactccatacttcttagaaggattagattttcaccaatattttctaatcataccttccaacttgttacaaatattcaattggtaataaaaagacagacaacgagttattattaagtttaattttgacaaaaaattagttcaaggtactattttagaaaatacaggatctaatttgtcatttaacaaagtagagggtccaatcgataacttttgcaaagtacaggatctaaaatggtatttaccaaacaaaaatttacacaaagtattatttttggtaaaaatgttaattttagtgttttttttttttaccttttacggtgttttataaaaacaacacaaaaataagaaaactacattaaaataacatccaaacaacatccaaacaacatcaaaataatatacaaataacaaaaaaccaacaacaatataacaagattacagcatagaaataacatgaaaatatcaaaagatcgtatttactattttctataaatataatcttaaaaatcgtaaaaatattaaaagttttgtacaatcgtatttttgtagttttttttgttatttttgtgtaattctgaaataattccccaaaaaaatatgtcttttttctactacaatatagatgggcctattttaggatcttcggtcgacgagatatgaattaaagggaacttttcaataatacacattttttgcatctaatttataataataatgttaccactattactaacatagcacgtcagtcaaatctgatatgttttgttttttttttcttaaattattttcttgcattttaatagtaacttcttggttacgaataattttgataagaaatcaattatttacctttatatatatatatata

SEQ ID NO: 62489 - DNA, 1325 bp, Cannabis sativa
ctaagcctatacctagggcccacctacctcagtggcccaaaaaaattccccttttcaatttttctattgattttaaaaaatgtcattttttttaaataaggacccaaaaatattttttttttctatgatccattaattaaatttcagggctgagcattaataagataataattaacataaaattgcataaccaaatagttaagaataaatatggaaataatctaaaaactttgattcataatctaaaatagttccatcaacactctagagaaagtgtttagttcataatcacaaacagaataaccacaataatcatgttcataattaaatagctaaacaaaagaataatgaagaagaagaagaaaatgactctaatgatgatacttgatgatgcttgcttggaatctcttctctcttgctcttcaatgtattttttaatctcaaagttgctttttatatctctcttattgtgtaaattcgaattacatcattctttatataggcttaaaaagataggaaggatgccatttagaattaggatttaaatttgaaaagtgcatcaggtgatatgtcgccttataaggccaggtggaccatatcttcgggatcctttattctttttatccgtcacgtgcaaatcattccgttttgtagcgacatgtcgcctgaacctagttaatcgggggttttcctatctctttttatccgcacgtgctaaaatttgtattttttcgtaaattgggcgacatgtgtcacctggaacatgactgcttcgatcttgctcagtaaaacatgcataacttttgtgtctaaactccaaatgagatgatttaatatattttgaaaaagtggtaacgaactctatatatcattttggatttcataaagctcttcaagaaaatgatgaaaatattatcaaaaatttgctcaaagttctcagtccattaaaaaattgtcttttaagcacaaatttatacacttagagaaaatacattaaatctatacaaaactttaagaaataaatattaaatcatctaataaatgacgaagtcatcatttactaaagagcaatttgcggcgaaccatatatttcaattttatacacttaacccccttatcttattttggtggcaaaacctcttatgtttatttttctttgcaaatttgacacgctagttaaatattaccgttaaatatcatctggattaccactgtatacacttgtgtatatgtagtagtaaaacatcgaagtcgatacagaagtaatccagttggtattaatacggtaatatctaactgaaaccttaaatttacaaaaaaaaaaa

SEQ ID NO: 62490 - DNA, 1507 bp, Cannabis sativa
  modified_base (515)..(521): a, c, t, g, unknown or other
tggtaattcccataatattaagaacaaactaaaattccataataatttaacttcccaaatatatctgaatcaatatattcttgttagaccattagtgttcccacctccctttattacaagatcctcaagattcttattcttcaatttacttaattagttataatattagaatctgaatactaaaattctaaacactttccttttatgctgaatattcttaaagaaatataaaccaaaacatagctaataggaattagcgtttaaagtaaaccctctgaaacctaatttcagtttaaaatattctttaaatcatactttaaccaaaataatcctttcattctggctaataaaatctgtatagtgcataacttattaactttaaaatattattgtgtaaaaattttcttatacattcaataccggaaaatgtgaaaatttaataaactaccctaaataattaggggcccaaccatataataggtgctaaagccttgtaagacgccaaagccataaannnnnnncgcaaaatagaacaaaatcaatattaaacaaacctcaaaatcgagttttcagtccaatccaaaagaggatctaagatattattcttcctggcccactactgaaatgtcaccacattctttatttatggtattttccaatactaattttcttggtcttcatattatgaacagattaaaatatcaaaatgcataaattaacaacataaaacaaagtaataaggaaaatgaaaatcagtaaaacggcagaaataatataatcagattaaaatcaaaccaaacactattcctctgagattagaacatcaaataaacagagcaacaacgaaatcggcaacatcctcgacaaatgctttgccaacttcagtaacggcgatgccgaccccattcgcgacgagcgaaaaccttcctcgtgcatctcatcgaagagtctggttgagatgggtgggtgttggtagatctggtcttctccgtcctggatctgtcttaggtgtaatgatacttaaaccaatggaagacaataattgaaaggtagaaagctctggaagaagaagcagaagggagagaaagagaagagacaagcgtgaggaacggaacaacaaaatatgagggagagacaagcagaagggagagaaagagaagagacccggtaacaactattattaatttagtgtggtactggtattaagtagctgaaattctcatttactctatattatttttgctattctttttaatttttatattaaaatatttttaattaaatctaaaattatatttgaaaaaaattaatatttgtactaaaaataattatatataatgagtattgataatctcacaaaatatttaaaatgagataataggtaatatgctttaactcataaaagtttcaaagtacaagattttcattaaaaaaaagaacatgcttcaaataaaatacatttttgttactcatagatacatccaataaggggagttctatttgcacc

SEQ ID NO: 62491 - DNA, 801 bp, Cannabis sativa
tattttcccacattttttgtattactttattaatattttgatagacaagctacactatttttcacatctccatgaaatatgagttatttctttagaaaactcaaatgggaggtgacaccctttgctgctaccatgaactacccttgtttgttttgtttattctttcctctgggtttctttcaatgaaagatttcagttataaaaagaaaaaaaaaacacaaatttcagccaggtaattgcattgttgctattcagaatcttgtgtagataataataaacagcatactaacagcattgacatgaaaatgaaaacatcaatcgaccaataagtaaaatggtgttccacaattttcataaaattgtaagcaaaatgaatgtttaatgtgccgattacagcaacttcttcctcttcttagacaatccataagaaaaggaaaagaaaaatccacgagaaagaagcattacagcccttaaaagtctcgagttttattagtaaatcaaagaaaaaaaattgcttccgaaccgctatgtgtgaataattcttgagctacaaaatggaataggcaatagatgaaaatatcaagcagtagattccttcaaatatgcaataagatcagcacgatcctgtggtttcttcagtccagggaacaccatcttagttccaggaatgtactggaggacaggacaagggtaatagtccagggatcaatattgataatgatttgagaatagaataaacaaacaaagtatgaggttggatggaagaagaaagaacacgtcattaccttcttgggatttagc

SEQ ID NO: 62492 - DNA, 1326 bp, Cannabis sativa
tcagttggaaatcaaatctccaagcagttgttgcattatccacaataaaggctaaatatatagcctgtacaaaaacagtcaaataggccctatggctcaaaggaatcccctgggaaatgggaatagatcaaatgagtatataggtccattgtgacagccagagtgctttgcacttaagcaaaaaccaggtattccatgaaaggaccaaacatatcgatgtaagattacactccattagagacatccttgctagtgacagtgaatttgatcaaggtttcgacagatgacaatgctgcagacatgttgacaaaatcacaacctgcaacaaagtttgatcattgtctctacctactgaatatggacagtagattgggggcctaagtcttgtaatttcaaagacaaggtggagaattgttgtatgtttatgcctttgtaatttagcatgagtttgtcactttctatttatgtcatcggacaattagttaactaactgtgttagttaattcgattgtgtcctaatgtaatgtacctaggggtattctacctataaatacctctaatcatttctcattcaagtagtgtaataatgtactaaaaattctcgagtaaataatgtcacaattttagatgtattctctctcgagctactattcttatttatgtgtatgaattctttgatttcgagcttggattgaatatgatcaacttgcactgatctccaacattaatatctactaaaattttgaacaagacaaatgaaattgttataggtgagaatttaagacttctctaatttttaagagaataaaatatggtatcatttcaaatagtatttttcttttgcgtgactcccatgatgaaacccttgagcacatatggtttagatgttggtttagtgaccattttttcgctagaaataaagattgattgggctagaacactaaagcttataatatgtttcaacttatgagatgggtgactagaaacaaatgtcaaagttcaagaaagttgtttactccattgcttttattggtacagtatatgaggtttggagaactagaaattacttttgggagcatgaagtcattagaggagaaatcattatagacaatgtaattgtatacttaataaaatgaatccattcataccttccaaaactaaaactgtggttttggtcattgtttaactgtttggagagcatgttttatgagctttttggttacccatttcgctttgctttggaatgttggtggaggtttttccccaattaattgtgtagtttggtattaataaaattcttacttaactaagagagagagagagaga

SEQ ID NO: 62493 - DNA, 853 bp, Cannabis sativa
aatgtaccgcggaatacattccgtaaaagtacatcacgggacaaaatcatatcccagtaaatatattagctatagttgagtatagtactactatgttgttttcaattggataaaagaagaaaatatgccttcttcataaagatggtaaacaaatacaaacatattctaagtacaacaattttacaaggccatgattatatttgagcattggtattataggcactctcttgtgccaaaaagcatttatatctcctacatatttttgtgattattaaattgtactaacataatatattataatgattagattcacttcattcagcatgttatattagattgtatttagttattgtattgtattatattaaattatattatatattatattttttttatatattattatgttaaattttagtttatatttatatgtatatacaagtttgttaatttgaaaatattttttggtgatgtagacattaatgttcgacatgtggtaaaaaagataacatcttagaattaagtagtcccgactcatagcagtaggcctgggaggggccctagctccgtgccttggttgactccgagaactctgggatgagtgtttggatctcaataaattatttttaattcacgatctttcagtcttctatacaaggacaaggggacttaagcttatatgtaggtttaagccctcactcaaatatatacatcaaatttttcacatgtagatatatacatgtagtaattcattttacccaatttattaaagcccaattcacaaaagccctcactcaatatcttaatcatgattcatgagcctaccctcattctaatcaagcccattttaaaa

SEQ ID NO: 62494 - DNA, 1489 bp, Cannabis sativa
  modified_base (34)..(58): a, c, t, g, unknown or other
  modified_base (1090)..(1090): a, c, t, g, unknown or other
agcatactttgccaatgttttggaaagaacatannnnnnnnnnnnnnnnnnnnnnnnntttatcgctgactatcacatcaatataagtcaactgcaccaatgaatcatgggacattaaattttgaagcatataatcacaattaccttccactgtattgacatcactgtaataatgaataactatatattctggacttaacagaaattatacacattaaaccatacacgtgaaaataacatgtaaacataaatgagttctaattttctattgataacaaatcagattacattgaaattggttttatttatggtataaaatcccaacaaactcccacttgcactaacataaaacaattagtgcatatcaatcaatctattgtcttgatatccagttctagtgtagtgtatttgactaaacccaaattactggaactgtaagtctgtggtaagttactgctttctcaaccatcacttcatttgtgttcataaagcattacgcaacatcattttctatatgcattactcctctagggatactgaattctttattgtttattaagtgcatctgaatatacagaagacatgtctctaattatatccaaaatggaatagaggtaaaacaactaagaactttcttcagttgaataattttctagtgctttacaaaagcaactaagttatgtagcttcgctgatggagcttaaattattatagatgggttttcaatccttctagaataattcctccacccctagagtaaccaccatctctaatattctgggttggtgtagatataaggattctaatattcacctctatcatctaacatataggtcactttcatagattctttcttgactgtctcctattgttccttgtttgattacatcttagatggctcccactcaacagtaggagtctggtgaaattcgtacataggagtacatttaacctcttactattggttctcagggacattttgttgtgacatattatcttagtctaaaactataagttccttctaggctaagtcatcaacatagcattctagtattaacattaatataaaatacttgcttaagattaagtnatcattagagataccataaaacatttcataaggattaggtattttctcccaagtcattcgaatacacttggccaaaacttcttatctcatccttattgttttgataagttatttctatccatatgaatagttagatttactttctcagttatattctaaagttcctatcatgatcataacatagtaatctatcactagtgtcatccaaataatgatgggctacaattttaaaattctcccactccgataaggtactgtgatactatgtctaagaacttcagtggtatcaattctattactacattaaccagttaattggaacaattacaggatcaagaataagttctaataatttgctaatttgtttattatattacatccatgtctaatcaaaatatg

SEQ ID NO: 62495 - DNA, 715 bp, Cannabis sativa
aaggagatctaggctcagatcttgttattactctgcgatagaatagaacaagggttaaagattcgagtgaaaggagtcatattattctcttgccaccaatgtaaggttttattaactttatatgtgcttatttttattattttaagaattcatatttagggtgttagattatagaatataatcaacatacatgttagtaaatctagatcctggtacaacatccaacatcagtatttagagttgttcaggttagatttttaaggacaaaatccttttaacaggtagataattgtaatgaccgcattattagacatagaaattaatagattattagtattatattaataattaattagtaaatcatgattatatgtgcatttttatgaaaataagtcttatttttgaaaatatgcatttgtaatataatttctcaactaaggagattttattgaattttaggtgtatgttatttgtgaaatttgatagtttttattatttttactcaacaatagtagaaactcgacagattaaccaatagtacattttagtactctcgaagtattggggaggattatggatagttggaattttgatgatacactcttcattatttaacaaaagccaaaaaataaactaaaaatcaaaattagaaaattactctctctctccctctgtaattaaagggagattggtattcaagctcaaggtaagctct

SEQ ID NO: 62496 - DNA, 1173 bp, Cannabis sativa
aaatcaatatattttcttggtaaactcgacaattaatattttgaatttacgaatgcaattatgtaaccactcattaattataaagttgaccacttaattatcatcgtattataaattttataatatgcatattttacattataaactaaacatattacccaaactaaaataaatgaagaagttgcaataataacataagattatatataattaccaaccaggtacataccaattgtggaattagaaaattgccttcttgggataagagaatatggtaccaaaaacaacatgaccttgggataagagacccacgaggcaaacctcgcggctcgcaaaccaaggggtagggagcaacccacccagggatctactcaaaactctcaggagacacaacctaagatacgtggaacaccggacgaaagtcgtcgacccttttcttcaggctcatcaaaaagaaagtcgcacaaacccttataggaagagtaagatgaatcaaaccttaagaggaggggcaaggtccaacacgtgggcagaaaatttaactactcatgtaagcaataaaaatatatacaaaatgaaaaattctttgaaaatatatttgaatttgctcaaaataagatcatttctgatgatcgcgaggtggaatcgatgatggctcgcacattgaggaacgggcatataagatgctcgcatgtaaagcaggaaattaactacttaaacgtcaagaggaaaggacaaagcaatggaaatccctaataaactttatgcatgtgataatttatattgtgaacaaaacgcaagcaaacatctgcatattaaagtatatagttaaaaatgcgaggcgttaaaaaacaaagttggccatccaaccttacaaatttgtctttacaaaaaaaaaataacagggggttaaaaagcaaagttggccatccaaccttgcaaatttgtatttacaaaaaacatgtctcggccaaatggccatttttttttaaaaaaaaaacggagataaataaaaatcaggtctacatgctcggagacgtagacaggtcttccacttgttcttcctgatcctggacacgttcttcctcaacgttgagaccttcttcctcaaactcggcaccttcctccatcttggtcttccagcacttggctaaagtttcctcttccccctcg

SEQ ID NO: 62497 - DNA, 5680 bp, Cannabis sativa
ggtgagaaccaatatggtgagaaataagagagggacttaatgtcagatagactttgagccgtgactggctggcagtggctcccaggcggaacctccactctctctgccacaggcggacgctcgcgggttctctggttcgccggaggtacctccttgcttttcctctctctcatctttactgttgctgttcgcatttctgaaattttgtgaaccacgaacttgtctcagttgttctcttgaattgcactttttttttttttttttccctttgctgctggacgattcccaggcaaggccggaggcgcgcaccactttgtagtttgttatcattaagaacaattttaatagtataagactcttatttttagacattggatgactttgcttaatacgtttgaatttgattatgtcttcaacacacacaaaggctcttttatacgattttgacattatcatctatctccaggctgggttaggtttgtcctttcaaattttaagttttccagatagcgagtcggcatacttcatagtacacatatatttgtaaaaagtttgatggtaaaaagaaattgaggtttggccatgtttctgggttgtggggtttgtttgcttaaattgtctagaatctaactaaattaaaccatattattaattgcatatttccaatttattacgtttgaaggtttaggtatttggattgtggcaacttggtgagggaacatgaagacaatgtcagcgattacccaatcccagctcctccaaactataacaactatcctcacctccagcaacactccacggttccatgcccttaacgcgtacattccccatcttacagagagcctgctgatctcaatcttctcatccaaatctctgaattcccaaccaaccaccctcctttccttttttcagtggtcacaaactcacactccctccctcactcaatctccagccctactcctcactcttgttccatctctccttcgccacaataagttctctgatgtgaagtcccttcttgtctcgtttattgcctctgataggcaaaacaagctccaccaagccctcctccatcctgatcacacccttcctagaccttctagagcacttcttgatacttctattggtgcatatattgagtccgggaaacctcacctcgctgttcaaattttcaacaagatgaagcgacaccaatttcgtcccaatttgcttacttgtaacacacttctcaatgcgctggtaagattcccttctacacatacgatttcgatgtctcagggaatttttaaggatatgattaagttaggggttagccctaatgtgaatacttttaatattttgatgcgcggttattgttttgagaacaagttcaaggatgcttttgagctgttgagtaaaatgagtgagtttaattgtttgcctgataatgttagttacaatacattattggatgcactgtgtaagaagggacaattgacagaggctcgaaacttgttgttggacatgaaaaatagaagactaatgccgaataggaacacatataatgtcttagtttgtgggtattgtaagttgggttggttaaaagaggcagcaaagatcattgagttgatgacacaaaataatttgttgcctgatatctggacttacaatatgttgattagtgggttttgtaaggaaggcagaattgaagaggcttttaggcttcgtgatgagatggaacggttgaaattgttgcctgatgtgatcacttataacacattgatcaatgggtgttttgacattgggaatagtacagaggcatttaagttgattgatgaaatgaatgaaaagggactgaaacaaaatgaagtcactcacaatatattggtgaagtggttttgcaaggaaggcaatatggatgaagcgtgtgatactgtacagaaaatggaagaaagtggaacttctcctgattgtgttacttacaatactttaattaacgggttttgcaaagcagggaaaatagatgaagcatttaggatgatgggtgagatgaataggaaaggtctcaagatggacacttttactctcaatactgttctacgtatgctgtgtgtcgaaaataagcttgatgaggcatataagttgcttaacagtgcgagtaggcgaggttatattgtcgatgaggtcagttttggaacattgatgatgggttacatcaagaatgaaaaagtggacagagctttggagctttgggatgaaatgaaggagaagcaggctatccccagtattatcacctataacagtattataggaggtctatgccagtctagaaaaactgataaagcaatagataagttaaatgaattcttagagagtggtctagttccggatgaaacaacatacaacactatcattcatggttactgccaggagggcgaagtggagaaagcatttcaattccacaacaagatggttgagaaatcattcaaacctgatgtgtttacatgtaatattcttcttaatggactttgtagagagggtatgcttgaaaaggctttgaggcttttcaacacgtggatttcaaaaggaaaacatattgatgttgttacttacaatacattgatagcgagtttgtgtaaggaaggtagatttggcgatgcatttgatcttcttgtagacatggaaaagaagaaattagtgcctgatcattatacttacaatgcaattctcagtggacttactgatgccgatagaattaaggaggctgaagagtatttgtccaaaatgatagagagtggaaaattacctgagcatttcttacaaatgactaaggaacaagacattgtgacccaagaattatctgtggagtctgattcaatatctgttggttatacggaaaagatcaaccaactttgttctgaagggaaatacaaggatgccatgcacgcctttgatgaatctaaaaagaaaggagttgctctaaataaatcggtttatatgaacctgatcaatgggctaatcaagaggcgtaaaagcttatctcggtctgtcatgttgtagtagaccatgatcgttttttgcagtgtcatccactttgttctactcaaaattgtcagatggaccataataaacatttggtgtacttaaaagtggcatctcgaccatactcaacaattctaggtacaatctttatttatttaaaagaaaaaggaatttgaattgtaacatatcgttcggtggttgtaacctgattgttttttttttttccttcaaagaattgttatggcactcgaggcaaatcaacctataatattttcttttttttttctttttttgaaaaatcatgtgtttagaatctatactggtaagctctttgtaagttgactgttttttttttttttttttttttgtgactatattgatgccaacttctgtttacttccgtgacaacttttgtttttgtgactatgaaagtgattaaagatatatttcttgcagagaagattagattactgatgtttgtggcaaccttatatctcataacaaagtgtcacacttttcattcatctcatcacttatagtattaacttttaaacttttaactcctagaatatttggggactttgcaggtaattggtagctaatatcacagtaatatcagtccattacaggatttccattttacctaactttgggtatgagtcgatttaaatgtctgaatctctttcatccaaatttatttagtgtaatgtagtttctatttcaatgtgaaatactttgagagctccagattgttgaatgcttttatgcagctgttgtggtccatattggtccatgaatttggcattctatgctccataccacccacccaccatcttagtcagctgttagtgtgcaaatagagaggggcaggaggatcaaaatgatgtggacagcaaccctccttgctattctctgggctgttggctagaaaggaacaacagtctttgaagataaagaagtggcagtagaagatatgtgggagaaggtcaaattttgggtggcaatttgggggattatctttcctggatctcggcagagattgggaaaacttttcttgtattataaatttttagcttgtgtttaatgttttgctttatgttttgtatataattccatctggctacttctgaggtgagatcattttgtataggaataattgtgcttatttttattattttatttattcaatttttttttttctttttggaggaaaggaaaaaaaattattcacaacaatcgctcaactgcacactgtaaacagcagctaaacactataaatgttttaaaaaatgctaaaacatcgttttctcttttctgttcaaatggctaaaatgacatacatttagaatcaaacaccagatgaaatagactgaagcaacaacaactgtagtaatcatgggaatcaggccctctcttggtttagcaaaccactccatccagtctgagaaattcagctgccaagcgcaccgacccagccaactttggacagcaagcacaactcttttggagtaaacataggtgaaaaaaagatgatggtgactctctttgaaaatgccacacacggcacagagtggagtcaatgggaaagaatttcaaaagattatctcttgtgagcagtggatcgttgattgcttgccacacatttaacctgtgctgaggcacattcaactgatgccaaacatgtctataataagacactttgttttgagggatgagagaaagaatttacttactttaaacttcccattatcctcaactctaatctaataaataaaagagtaatggataagttgaaagattgtaaccaaatatatttattatcattaataattataataataattttttatgaatataaaataagtaacaatgtagaattttgaaaaaaaaaaaaaaaaaaaaggaagaggttgataaaatgaaaagtagagtgccaccacccaactatggtaatactttcctttatatagattactaggaaactatgccgcgcttcgcgcggtcttttactgtaattttaatttttttaagttgttaatatttttatcaaattatagatataatataaaattagaaaaattacaagctaaaatacttaagaaagagattatctgtaacaaagaatataaaaattaaaattaatccaataattttaataaatagtatcttataactcttacttaaaaatattttgaagccaatagatcaatcacacaataataaaataatactaatatttgaacaaatacaataaacaaaatattttattttatttttatttaatagtatttatgtagaagactcacacactttataaatcatgtgagatttttttcaaaagtaaagtgattaaggaatcaaataacctttttttattgggacaaaatataaaacttttaaaaacagatctaaactcgtttgcactttctttaaagactatagaatggatgcattttaataattataactaattaattgagaaaataaaaataacaaaagaaatgatttatttataatgcatatgtgaagactcacaatcctttctaaacaatgtgagattatcataaaaataaacttataaaagaatcatgtaattattttttaaggagaaaataatttaaaattcactctcttgcaaatttaagaaatttaatgaaaa

SEQ ID NO: 62498 - DNA, 1752 bp, Cannabis sativa
cggtatctataagaattttttagtttaattttttataatcgtatacgttaaagttaattaagatattttgtaaaaatttaaaataatttataatatagaaattgatgttacaatttattttacatgcgtataaaataatgaagtcacgcgtgtaacagacttattgaatcttgttttcaacgtgttaaattttctaaattttttgaaattttatcaaatatcttaaataattataatgtatacgattataaaagaatattgaactaaatagcgaaataaataaaaatatataagtgtacatattttaaagagatgtatataataaaattctctaatattatatatgtgtcatgtaatgactaaaaagtagaaaagtaataaaataacattttatatagaaagggaataaaataacagaataaaatggattaataaactcaccatgtataccttagctaaacgtattaattttatagtcactatatatttaagctcacccgataaacgagcaacacgctttagatgccgaaacagttacttggagtgttccaaggctatctccaaccatttatcaccaaatatagtgttgcacgaataaaaaaaatataatattattttatcttataacatttcaatcacaatagtaaaatttaaaccaaaaaaatatatatatttttagtattatattaattttttaataaaatactataacatatatctaattatattaaatatgtaatcataatagttacatttagtcattagttatgattaatttaaaaatttaactaaaattaatttataaattatccataacttaatttgatttatttctttaaaataaaaaaataaaaaaaattatacatattaatttttgaaaagtttttattaaatattttaattaaaatattcatttatttaattatataattaatagtctaaaaataaaatttttacctattagtgatatgttttagctgattataaatagttacacttttattgtaactattgaatactcatatgtaagaaaatatataaactataatatatatggagcttttatggtgcttctcctaaaaataagtcagtaatgcctctcctattgtctggtcatctaatgttgttagtttatttttttttacggacgcgtacgttgtagttatttaagacattctttaagaaatttagaataatttacaatatagaaagtagtgttaaaataattttttaacacacgaaaaataaaataaaataaaaaagtaggaagcgaaaaactgtctaaacctcgcttttccaagttattcctttttctagtttttaaaaaaattgcataaaattttaaataattataacgtacataactataagaaaatggaacaaaaaattttctgttgctaactgaaatatttaaggagtgtatcggtacaatcttttataggtgcacaataaaattttctaaatatatataaatttaaacattatttaaaataataaaataattatataaaataaaaataaataatgatagtgcaactacagttgacactaaatatggtatatactgttactatacactatatttagtgtatgaataagtgcattacagcatctgtaatagttttatcaaatttgtgtggaatctttataccattttactttaatagcacaccaaattatgtaccaaattggtgtgcatcacattctacataataatattaaattttcaatctataccaatttggtgtacat

SEQ ID NO: 62499 - DNA, 2228 bp, Cannabis sativa
tgtaaaaaaacattctttgaacgcgaaaatataaataatttacaaaaaatagtactttagttaactattcctttttttaaactacataggacttgatacttaatataatgatttttaaaaaatatccatcaccttaacacttggccaaataacaatagttaaaatagtaaagtttttctggcggacacgtgtaattttactgtagttacacgtgtcgttacgcggcgaaataacgttttttttccttttgaaagagtcgaatcttgcatgtgatagggttacctggtgtgacgtagttgactgtttggatagagttttagcaaatttgaggctctgtgtgttgccacgtgttcggtgtagggagctttggatttgtgatatgtacacttctggggcccaactcaaaatatcggccgacttctttattgtcgggcctttttctcacctggactgggctgggctgggcttaactgttgacttttgaattttgtcataattggatgttttcataaatacccaaaaatgagataatgggatatattttagggattatttcataaataaacaaaaacaaaaaaatatagaggaatttgcagcgtaaatacctaaacttaactttcattacatttaaatacttaagttttatttttgatagaaatattacacaagttatatttttgaaacttctgtagttacttggccattaaatttgaagttattatccacatgtcattttcttattagtatatttaaataaaaaataaaaatttaatgacctaaactaaccagggactaccacacggttgttaacttgactcttaatggtcaggtgcctacagaagttttaaaaatataacaccgtcaaaaataaaacttaggtatttatctacaatcttagctatttatgtcgcaaattactcaaaataatattaaaaatatagttttataaaattttaaatatttttactgtttttaagattttatttaccgaaaatacggtattttgatatttccatgttatgttgtactcttgttattttgttgttggttttttattatttgtgtagggattttatgttgttttgatgttatttggatattatttttccgttgcttttctgttacttttacagaacattataaaaatataaaaatataaatattttactaaaaaatagttcttcgtgtaaatattagtaaattttaattggaaatcaaatttagtccatagccaaaactcaaaagacaagagaataagcacacatagggagagtggccctaccattacacccaaaaaagcactattagaaggcatattcttttcaattaaaaaaagaaaagaaaatagtttctattaaataataataataataataatgagatactaaaacaacatatattctcttttttttcttctttttttcaaaaacatatatactccgttaaaaaataaataatttgtcaagtaagtggatcttttgttttgttaaataacaaaatagatcctatattttttaaaattatacaaataggatcataaattgattttttttatcaaaataaaggttttaactccaaaataaattgtaaattattacaaaaatatatatgaacattaatatagagttctaaggtgtctacataatactttattagtaagtagtttttataatttttattaaattaatataaatgaaattcaatattaaattacactaatagtaatataacattttataaaagtgttaggcaccataagtatttcttagtatttctcaaaaaatataaagtattattgaacaccagtgatgtctagcaactctatacatgttgcgatattaacacataggaaagtgctaggcactgctaatgtcttttagcatttttcaaaaaatatatacagagaaatgctaaaagagacacaggtagtgtctaacacactcttacgtgtcaatatcgttattagtgtaattaagtaccgaatttcatatattttaatataataactttttagaaatatcgctaatcaatcataaaataacacgttcagaaagtagtaatatcactcagtccaataacaatgctaaaaaatatatatcaataaataattatgaaattgaataagatgccacacgttagaacaatagaagttagtacgctacgcgttggtttagaagataatgataaattaattaagttgtaaattgtaatttgattataattttcca

SEQ ID NO: 62500 - DNA, 1259 bp, Cannabis sativa
atgtatatttttttaattaggtgaaatgttatttaggaataaggaaatggcatattcgaataaatgtgatgatgattataccaaagcttcttttttcctactttgtttgaaactttcattgtttcaaactaccaattgtttgtatgtatgtatatatagacttttccttactatctttctataaatagagaacttaattaaaataaataagtttttttatttatttattataagaagattttcacatattgacagctctctctcgccgagattttagctgcaatttgtttccaaatttcttattctatctaatttcttatatagtgattagtggaatgattttgacccttcatattaaatatttattcaatgggttgttgaaaaatgatttaataaaatctacaaataaaaacgagaaaattaccttgtatattaattttactttatgtaacatagttcttatacactagtacgtcactctcgctcatggaatgacgactgaccctactggttcatggaatgacgactgaccctacaaaccaacacaagtatttccagcgtattttatcctcactcgcacgcttattgagaaaatttctcaggaggtaacccatcctaaaatgatctcaggtcaagcacgcttaactgtggagttctttcgtagtgagctaccgaaaaataaaatacacataagcccatgtcatcatttaataatatattgtttataaataatttgacaagaacaatacaactatagctagattgaccccgtacgtgtttagactatgaagaattagattagtaacaagttgtcctagctagctcatcaacatattgcttttatgttagaatgttgaagtttggcgtggagaaagcatgatgagggttggtaaaatgtacatggttttatcttaaaacgaaaaaaaaataaaatgtacatggtttaatcttaaaacgaaaaaatagctcataaatcttatatatagtattatatatattaaaatttatgaaagtgtgcctggtaaaaatgaaatttagaataagataaaggttaagtacggtaatggtgatgcacctcatcataggtgtggtgagattacatgatttgggtcttgaacattccaaaattaatcaattttatttacttaaagggacatatttttgaaatcttgatactaagtaggatcatagctgatatttcaagaaacttcttaagcttagaaattttgttgacgttcatgatgtgatagttactatag

SEQ ID NO: 62501 - DNA, 631 bp, Cannabis sativa
acaaaaaataatttgtgatttatttgcatcaatatttatgctcaaatatacgattataaaacttgatacaaaatttaatatataattaatatttttttattaaaaatataaaaattataataattttattattattttatcatgtaaaactataaataataaatgtaaaagatttataatttaatgctaaaattaaatataataatataaaaaatgatataaatagaaataaaaagtagtacatttatagtgatgcaaattttacatcagagaaaatgttattctaaatttgttataacatttgctatgtgccaaatttgcattattttttaacacactattcgagtttatttttttgctaagtgagctatattacgacaagaaaaaaataatattggcatgactaaattagtgccaacaaacttaaatttcagtgtccatcgatattttggcatgagttgtcgtgtccttttggtcgtgccaatagattcgtgccacaaaacgtcaacgagcagcacaaataacatcgtgctaattgactgatctaatggcacgacacatgtagtactcatttaaattcgttaacacactgtcagccatactattaggtcgtgcccaatgagttttattt

SEQ ID NO: 62502 - DNA, 912 bp, Cannabis sativa
ggactgtataaatgtttaatgggccggcccaaagtatttttgtattttttttttccttttttgtatttttctgtttttttccctatttaatagaaaataagaatgtaaaacgtttgaaaaaaataataaataaaagtaattgatttttttttatttaaaaacaacaataaaattgacaatgaactttgaaaattaggatagaagtgaccaataataagttcgtatagagacgtaccctatcatattaatgtaggggctataacaaaaatattgcctgaaaaattaaatctagtaataatgatcataatgtaggtataaatatttttttatgataaataagctccacaaaataaagattttgggtctgtcgctgaattgttagtcccttaaaaagttaggttcattaaaaaatactagaaggcattaaagaaaatatgtattgtttgggtcttgtgcagtagtccaacttgcacaccataaggaccaaccttgcttttaacacaatacaaaaccggcatgagctcgaatcaaaggcatgagcacaatctattacaaaaaattatagacttgtcaacaaaaaaaaaaatataaatttgggtaggacaaaatacaatactataaattagcatgacacaatataaaaaatagacttaaacaccacacgacactataatcctaaaagtacgacacataaatataaataaactagcccattgttaaaaattcttctaattttttataataataataataatacaattgtatttactaataaatattatttaaattttaatatttttaataaatttttttatataattatgcataaattattgttgaaaaattatataaaaataattcaactatactctatacataattaaggtgttttttattttacgattattaatt

SEQ ID NO: 62503 - DNA, 1658 bp, Cannabis sativa
acgtaaaaatccttctcttaatttcttacagctctttaatcttctattattttattggttgccgaaaatctcggtcaacaattacagtctaaatgaactgagagggaaattataatcctgcaagcatctcctctataaagtcccactcaatgctatcatatgctttttggagatcaagcttgatcatgcagttagccttgcttgtcttccttccatagtgcctcactaaatcttgacagatcataatgttatgcccaatgaatcttccctgaatgaagcctccttgagagtgtgaaaccaattcaggaaggatgcatttgattctagagcacaagagcttagttgcaatcttgtaaatgacattgcaacaagctattggcattatttttaaaatgtatgatttcatgtaataagttttcaaaatgtataagtttttaaaataatgttttttcgcacattttttgtaattatgctgtttttattgtatatttatgaaaaaaaaagcccttttagtattatataattagttattagaatcaattactaattttatataagttttataaacgttcctttagcttttttttattatgtatatgtatttaatattatataaaattattctaatatttgataatgcagataaaacaaattgcatgaaaattacaattttctcttacttacatttatgcttcattttgtaaccgacgcaataagtgaaaagaaaatatttcagcaatttatgtatcattttagaaccgacgatatatgtttttgtgacggtttggaaatgccacaaataattttacgtcatttccaaactgtcgcaaaaagataaaaaaagaagagtgtatattttgtgtcagtttttaaatgaagataattgtttttttgcatcatttgaaaaacgacgctaataaaaaactatttgcgaattgcgactacggcatatacattggttttctaaacggacgtaaattcttaaatgacacttggaaactgacgtgaattgtactttttgtagtaatggtagtaaaggatttcacaatcgtaatccttaaccaactctaaccaacgcctctgtctcatattcaaatctttttgagtaaagaaatatttgaggcttttatggtcaatataaatttcacatttctttccgtagagataatatcgccaaatcttcaagacaaacaccaccgcaacaagttctaaattatgagtcgaatattgctgttcatattctttcaactgacgagaggcataagcgataacccgatcgacctgcatcaatacacaccccagaccctgtttggatgcatcacaataaactacgaacttttctctaacaaaaggtagagctaacactggagctgtgattaatctttgcttcaactcctgaaagcttgcttcacacttgtccgtccacacaaaccgttgattcttcttagtaagctcaattaagggtgttgaaatttttgagaacccctctacaaaccgacggtaatacgcagcagacccaagaaacttctaacctccgtaactgtttttggtcgtggccaatcccggacggattcaatcttccccggatccactttaattctatctttactgacaatgtgtccagaaaaggacacctgagatagccaaaactcgtactt

SEQ ID NO: 62504 - DNA, 1103 bp, Cannabis sativa
actttcctccactcaatgctaacatggctactgttggcactgttggaaactccaacaataattcaaccttcaatggcacttaagctactcagaccagagctcaacttcatcgagaactagtctacttcaatcacaacatctctattcgtcttaatgatcataacttcctattgtggaagtagtaagttcttgctgtcattaaagggaatcgcctcttgaagttcatcaaagaatcaccaccagctgaaaatctgactgatgaagatcgagctcagaacagagttaaccaagccttcattgactgggaggttcaagaccaatttctgtcctgtggttactgtcatccatgacagagatgttgggatttatgtcctaaaaataagtagttaatggataatatattagaagaatatataaactacaattataagataaatgatatattaaatataagagtataattattaaatataaaaaaattccttattcatatgaaaaatatataatcttgtaagtaatctataaatgaatgagagagactatttaatattttttttttagttacacctaattacatttcatattattcaaataaaattatatgaaaaattagtaacgttaaaaatttgatacaattttattacttagttatcattaaataaaagagataatttatttcatatataatttaaatttttttaaatatccatcaaaaagcgcatattgtttattagtatatatagggaaatttcatttgaacctaaaaatttacaaatacaccctatttcaataatttttattttacataaaagatatatctctaattatattaattttttaaactttttttcctttcagtttatatacttaaaaaaatatacatatcaaacaaaaataaattatattttaaatataataataaaaaagtacaataaaaatatacaaaattttattaaaaaatataaaaaaaattatgcatgatttaaagaaaattataaaataaaattaaaacaaatattaaaaataacacaaaataatatgaaattttttggtggtgtttggtaatacttttgtttttaaatttttttaatcataaaaataaa

SEQ ID NO: 62505 - DNA, 1298 bp, Cannabis sativa
actgtagcgtgccttagcattagggcattacacctaattgatggaaagaggccccctccggatgtctcccagaaataaaaaatccaaggattatcctaggcaaacatcgggtgtaaatatcccaaaggcagcgaaagcaggagagaaagaaaaggaaaaagagagaaggacttaagtatgaaaaccgtttcatactcttaacaatctcaaagcaaaaaaggttgtttgtccaaatgaaaaagtggagcacagatgaaaagatacgcaatacgacggtcttctccaaaatcatctcaccatagaaatcaaatgcaaccaaattttttgaaaaactctgccctaacatgcaagtggacaacaaaagtaaaatgtacccagaaaacttacataaaggtcgagaactgggaagtggtgatgatcgacaataatgcagactggcagcgacgaagaaatagcagcaagaaatctatggtttctgaaattctctcaaaggttcttgggtcaaaatggtgagatagcgaaagtaacccaatgtcgagaaaatgctggcttttatagaccagaaggggtgcaaggcagctgtgatcagacaccatcgcacggtgggaatcgtaattgattcgcattctacgaatccaacgggtgagattaatgggtgccagggcggttgaaaacgtttgagtacttttctgacactcggattaaatgcgccaatttttcaatggacgggaagcgaatcgttgcttgcaaaaggaaataaatattaatgatggccatcataaatgtagcccacgcgcctaaggcccatgccggtataccaacatgccaaccggaggcatcaaacaagcctcacttacctttcactaactgaggcttgggggggaaatattgcctttgatttttccctaaatacgtggacgcggataaaagtgacacgtggatctggatgaatcatcactcatgaaaatcaactaagtcttagacaaaaaaggaacacctcagggaaggtgcctcccggaggagagcataagatacatctttactctccgagagcctagagtcctgctaacgcagttacaggaggtatagagattacttgaacaatcatttcgcatttaatgccgcatgggggaagacgtattgaaacatccataaacgacatgatagatggcgtaagccccctttcacggagattacactataatcgatgtgtctagtgacaactgcatcatgaggaattacatcagtcaagaggggataaaagattatatccacctaactcctaagatacctacggt

SEQ ID NO: 62506 - DNA, 707 bp, Cannabis sativa
taaacccaggaggcggttgcaagacatttttagtgttataccataagaaagattctcatggtttctcaactccggatggtagtagttaggcattgaattttcccggtagatgttattgtaacgtttattggccatatattgtgcttgttctatactcatctcaggcccttgtgatgtagatgcagtaacaacatgctcttcaattgatgtattcttctaattaactaaggctgccacttgattagataaagcagaaatttgagttgttatatttgtcataggatctacttcatgtcacccaaccaccttcttgtgagtatttctttcattaggccacttataactattggtggccatcacctccagtaaattaatggttttagttgcaggtttagataataacactcctccaggtgcagcatcaataatagtcctagttggcccattcaacccgttgtagaaaattgaaacttgcatccagctctcatagccatgtagttgggtagcgacgtaataaatctttgaatcgctcccatgcttcataaagttgctctaaatcaagctacgtgaattgcccaatctcacttcttaactgtgcagactttgatggagggaagaatttcatcataaactatctagccatttcatcccatgtagtaatagaacctggctgcagagattgtaaccaacttcttgctctatccctt

SEQ ID NO: 62507 - DNA, 2612 bp, Cannabis sativa
  modified_base (220)..(227): a, c, t, g, unknown or other
  modified_base (544)..(551): a, c, t, g, unknown or other
  modified_base (621)..(636): a, c, t, g, unknown or other
tactttgctactttgttttcagatttagtcattttcttagaaagtggtatttgttgaaacaaataatttcttatctaatgactatgggatggtccacacataataacttatgttatcctaattttttcactctgatgtggcatcacatgatggtgacacgtggaatcaactttgagtatctactcagagaacacagtccaaacaggatgcctcatatgcnnnnnnnnagcaaagcgatcagcaatccgcgcagagcgaccaacacttagtgaattcaacttttgcatcgtgagtcatcagagaaatccctataactcggggatcagatttcagagatatggcaagctggtcaaatcccacgatcagtgtattctgcatttaccatgcaatctttctgcttatctccattgtaacgagaagggaaatagttcccctccatgttcatagccctataaatagtgatgcatgctcactaggcaaagggtcgaaagattttacctaagagatattatctaagatttcatattcagagatattgttgtannnnnnnnaagaaaaggaacctttctccttgttcttgagtcaatacaaataaacaggattaggctattaccgaactgnnnnnnnnnnnnnnnntataaaattattgtgtctttacattgctttactatatatcgattgctataaattacttatcgcttactaaactagactcattgtcgttggctaaaagagaggtcaacattttggtgctctcattgagagcagaatcaagaatcgttcttcattcgaaatctaaccataagtatgatggtggtacagactcgtaggggcctggttgatccagcaaatctaaagacggtggatcctgcattgtagaacccaggaaatgcaagggttttgccagctactaatcttgaacagccagcgaacgtgggtcacggtgtaacgactattgtagatgaaatcactcctggtgtggaagagactaggaataacagttcaacacccaaccagggcattcataacacagcccttctgcctgctaccaacactcaaacgaccattggagatgatactgagacaaaaaacctctgtgcgtctcttggactcgtggagggttataccaataccctacatcatgatcaagaagaactccgcgctgcggtaaatctcgcgttcgaggaaccaagacgtatgtttgtcaggtggagagacaaagagatggaatcattaagggctcatcatatagagattgaaaatcgtagtcagcaagctactgtgctgatacgaaaaagcctacccaactgtcaaacagtaacctccgagtgtcatccccctaggtgagacagacaaagatccagcgatcaatacttcccagactacaaatggtcagttgccgaatccccggtcacgagttccacttgtgggcctagcggtaggcgggcagaccttgtccagtaattcatcaagagaggtcatacctgatagttccaacccggttaacggtgtcattccactagccaaccaagcaaatcaatcgctaagacagcctgacgcttctgtattcgataggttggggacgactcatgacctaaggggcgatctgaacagaaggagaggagtagacgattagattgtcatgacgatcgtacagcctggagcccgtgctcaaattcccggtcagaaagattcggatgtgattcaaatcgaccagaatgccgagcaagttagtccagctgtgcaggcacagctagacgaactaaaaactatgttccaatgcatggctggatagagaaacaatgatctcaagctggaccgagcacgtggaactcctttctctccagagatcaatcttctggcgttgccccacaggtttaaaatgccaacatggaaaatgtacacaggaagagaagatcctctttccgtcctcaagtatttcaagatgcaaatggatttgcaggggatacgaggggatgtgtgttgcagaatctttcctgctaccctttcggaagccatccagcaatggtatttcaagttggcccctggaaagttcaactcatggaaagccatctcttcgaaattccacacaattctcctcctctcgccagcttctattgcatctgggagacttggtcgaagtcaaccaaagaccaggcgaacctctctgagaacacatcagtagattcatgacgaaggcgaccaaagtttcacgggtaactgaagatggaaagttgtccgcgatactagggggcattgaagtcctcggtgaactttggaaggacataaggaagaacggcccagtagactcaatgagtgatcttctcgaccgtgtggaaggcttcatcaaacttgaagaggctattcagcaagcagaaggtgagcaaaagcctggcaagtcaaaagctccttccactggaacgtccgcccaacttcctcattacccaaataattcgagctcaaatggtaaatgttccaacaacaacaacaacaacaggtaagggaatgggaagaagagaaagttcaccgacaaaaccgagcagactccccgggagaatcaagcaaagtacacagcatttaccatcttgactaaagatataaaaagtgtttac

SEQ ID NO: 62508 - DNA, 5071 bp, Cannabis sativa
tgagagtaaattccaccaatattatggatccaactatgtaatctaaccagtgtgataggtgacttgtcaacattacattggtgattgttataaaatctctttgggctggtttagttcaccaaatgtaatatgacaaactcacatgccacatctttgatgatcagtagtttgcaatgtatttgatgctttttttatatttaaaggtgaagttggagtgtgaatataaaggtgtccttcccaaggtgctgctacaggtgcaacaggtaatcatttgttactatcttgcattaatatctgaatgtcagcatttcttgtatttgaatttcagatatgtaatctcttgtgaggtaatctatcttttttaattgtaacatttcgaccatacagatttaccagagatttggtgcagactcagtagaagatattgatgatgctcgtcttgagtattttacgaagaaggtatgttgtactcagattataatttatatttcataatgtattatttctctctctaagtgagtatttgactgctaacagcagtaatatatttgtgcctagctttaggataaacattttggtagaactttctctatatttgatctataaaaatgtaaattaataagatagttatagatttatgatgtatctctctctagccagtcatttacataatttgaagccttgtgtcaacaagtgaagcagttgggtgttataagataattttacaagcctcaaatgagtccctattaaagagaccacgaattttatgtttctgccaaacttttcttctttattatttttggtggatatttttggttgcatctaaagctcgtgaatttgtcacaaaaaatatcagtttggtagggattatacctcatcaacagcttttgggaatcgtgccttcaatgtgaatatcttttgacaagagatcatctagcctacttagtggggaaatccttgacttgaacccccccgcttatgtaacatgtaccaggttttccacaagtttgttttccctctttgtagaaaggtttctgcttaggttgagcttcataatgagtagatgccaacctagctacactattggtgaagcaaaacagaatgagataaattctgtgtcgtgatggttgggattttaactggaatttacacctaatcaggtatctaaacaatagaaagaccataaactgtgccaagacatggaggatagtagtggccaagtgacccctctgaagtttttttcttgtaaatcggctttgaacatgtcagtagatgccatattctgttgtgatgattgacacacttacacaaacttagcaaattattttaacaatgcattttctactattttacaacctggattaagcactggagacaagtagtgaaatatatttggatgatttacttagttgtttggttgatgcaatgaaatttctgtgctggattatagtatgttattccaataggcttgtaacaaatatttctctgaatgtgtgttgaaacagtgttggtgggaaggcaatccctagattttccttctaaaaactgaaaaatttctcttggcaattacttgcacaataaatatcctgctatccggaaactgatgaatataaattttgaaaattctcatatcattcttttctggttatatttaatagaacagccctgaacatgcgactatgtggacagttcttttcactttttttttttctctttctttctacagttgtactaattactttctttttcttttaagatttagctgtgtaattgacaacttgcagttgttcttgtggaagaagtggattcattttacgtgtgcttgtgtagatgtgattttcttgatatatattttattaaaattcaaatggaacacattctatgtattttccattgcatgtgtgtgtgtgtgtgttatgaaaagtgagttaatattcattttcttgctgcaggttttcccaaagattaaagattctagtgaggtagttgtagttgcaatggctaaactttccttaaatgcaatgtctattagttagtactaatttattttctttgatggaatattttatagggtggtgttatgatattcatcagttcttactttgagtttgttcgaattaggaacttcttaaagtcacagaatgcatccttttgtctactttcagagtaagaggctgctaatctatcatccctgttccctactgcccatgttgaatcacatatagtgtaactctttaatttctatctcttgctttgtggaaaatattataattcacaaaattttggcatttgtttatcaggtatacaaaacaaagtgatatttctcgtgctcgagtttggttttttgaagggaaaaggaaaatcatgctttatacagagagaatgcacttctaccacagatacaaggtccttgaactgctctttaagatcacttaatactttttatgcagtcatgtgtttgtttatatacatgtattgtgtatatgatatatacacatgcattacttttatttttagatattgtatctatctatgtttagatgcttgtattgggtgagtaattgatgtttaattgatgaaatcttcatgtttgtataatgcttccatgtggcgttttagataatgctcaatgttatagttctataaaatgttgtactgtagtctatttttcttaactattaacactttcttttatgtttttttcccttcctgctgagtagattcgtggtattaagaatttgatgttctattcactccctgagagaaaggagttttaccccgaggtaagtatcattagtggatatgtaccttttattcaatcgtattgttggaagagtatatatgtttaatactactcttttcacacgctcttttatttttcttatcagatcgttaacatggttgaggggtctgataaccttacgagcaccacactcttctctcgcttcgatcaattacgggtattttttttttcttttttcttttttctttttgaaagacgtggtactgtagttttcttgttttccatatgattttttgtttggactgaaaagaaccattagaaccaaattctcttagagggtgtatgctaactaaacccttccataatgtatgcaaaatgcaaatgatttaagctttatatacaagtacatgggaaagggtaaccaaattaattgagcagcagataactacaacatggtactatgatctcactcgaagtttgctatgtctatctagattattaggtaatattttcactagcaaccccaatccccaatcgacaactataccagaacataattatagctaaataccattcaactataccagaacatatacatagcataaaacatcagtagtaattgacgatgcatttaattagaaatgtatcccaagcttgggtttagtattgtgatttgggtgaattttaatttcaaaagcactccaagtttttgtttataatcttatatttccttgagagttgtgtttaattcggttgatgttgttccatattagttactcattttctttcatctttgtttttctgctttaaatactcatagctggagagaatcgttggaacatcaaatgcaaagagaatggtgaaatcggaaaaggaggtgtttgtattctgttgatgtgacaactttgacctcaaaaattttgcaaaatgttttatattctaagagcaaatatattttacatctatatgttaaagtgccttgagaaatgatcgagcatttttttatttttgatgtagtgttgccaaaaacaagcgcaagtttttatttgttacagtaggaattgggtaaaatagtttttatttaatttaatgactcaaattaactcttaaaaattacatcataattaatatatttatgtatttataatttttttttttttgataaatcaggacattatattgctcaaaacaatatttacaactaattagcacccaattcgggccttaacaatctatacatcaacaaatttttctatactttttacattatagctcattgaaccactctttatttacagccttggtcttttttggtataaacattgcaactctcattttaacactccatttagtgtgatttataattaattttgaacattattaattagggatttaactaacaaaactccaaatctaacttcaaattataattttttttactttgtattttatgtctattaaaaatttatatttgattatatatattttttaatttcaaattaatgtaaaaaaaatattttaattaaatttatttttacaataataattatactaatagaaaactctatcttgttcaacttataataattaatataagtgttctacccaatttttgaaaaatcgaaagaacatcttttttaagggcctcatggcacttctagagagctcgaaaacgtcaatcaaccatttggcgttgggactcacacacccaagtgtgcccaaacgaggattcatggcctacgcaagcgtttttaccctaaagaccttaatctaccaaggaaatcaataaggacttgacttgtataggcatgaaaatgacttaggtttatgtataaagtcaaaatagcactaaaaccacaagagaagaacgataagtgaccactgccataagaaaatggtagtgctctccagttttggagacctgtgttatatgagaatggcataggtcactcctcgcaaaccatggaagcacacgtgtttgaacgagttccctcgatgtcaagggcacgagacaagtgagaaagtcatttccgacctaggagtcgccttaggtgacctgtgccataaggaaatggcagtgctctccagttttggagacctcttccatggtagaatggcacaggtcactcctcgcgaaccatggagggaaatgtgttcgaacggattccctcgacatcaaggagcacggggcaagtgagaaaagtcatttccgacctaagagttaccttaggtgacctgtgccatgaggaaatgggagtgctctccaattttggagacctatgccatggtagaatggcacaggtcactcctcgcgaaccatggagggaa

SEQ ID NO: 62509 - DNA, 1938 bp, Cannabis sativa
  modified_base (41)..(49): a, c, t, g, unknown or other
  modified_base (103)..(111): a, c, t, g, unknown or other
  modified_base (1674)..(1677): a, c, t, g, unknown or other
  modified_base (1878)..(1885): a, c, t, g, unknown or other
gggcacaaaacccaacataaacataatcatgaaataaatcnnnnnnnnnatgcaacataaaagcgatttctgatcttatattaattagtaaatatgattatannnnnnnnngttttatttaggacacaaaacccaccataaagctcagctagatctgaaccaaaaaaatatagtaatcaacacaggcgagattagaacatatgactagaatgccaattgtagtttgctcaagaagctcacaaaagaactcaactagagatctgaacacttaagtcgtcattagtgtgtaaaagtatcctcatgtgagccaccaagaggtgaatcaaggcagctcactcttctcaaagcaatatttttatttttcacaattttaaaaatacatgatctcttttgcaacaacactcaatgagttttcccaaccaattgtggctttcacaccccatagagatgtagtcgtcgccttatttatttttcaaaataaataacaagagaaggagtaaactccccaagccatacattggtccaaaaaaagctcttcccattacttctatgggaggtagccttttcaactgggacgactaaatgttcaaaccacaactaggaaaaccatgtgaagctcatatgtgattagacttgaaacaaaagccaacaccaaatgaaacacaagccaaaagaaatcatagaaacaaaaatgtgttgaataccagatgcaactgcgagcagattagatggtgcacacaccagtacaatttttgagatgagaaaaagtgtgggcatctaatgcctttataaacaagtcaacaagttgagtacctgtagacactttagaattagtcaaatgatatcgtatatcaatgtatttagtacaagagtgttgtactagatttttgaaatattaatggcactagagctatataaaaaaatgacacttgggaaaaaaacacaatttgttgaaatttcattgaactaaatcagctgagtacaatagctattaaaaactaagaaataagacaaacacaagataaccaagacccaaactcctatttaccacacaaataaaatgacaatgattggaattaacacgagaacaaaaataaagacccacaactaaccaaaaaatgcaaacaaagacaaagtgatgcctaaaatccttctcaacacaactcgatctgtagagttattaaatacaattttaatgcctatgggtgtgaaaaatcaacaagaatgatgacaacaaaatctaccaagcccacccaccctatccttggatacttaaagctcaagaaggccactgatttggtttgtccaagatatgttcgatgacaaaccactttattgtaaggagcataacaatggtcaaaagttttgttacttgtaaccacaaaacactcattagatgaaactaaacattggatattagaaaaacttacatcaaagttagcatcacagagttgactgacacttaggaggttggctttgagcccttgtacatctgttagttatggatgccatttaacttaaggcctctttttcctatgatttgtgatttacttccatctccaaaaagtattattctttcctttgcctccttatagttcgtcaaaacttcaaaatttctagtaatatgtctcgaacaaatgctatcaaggtaccctgttataggcgacggttttnnnncgtcgggaatgtaaaaaaaaagaagaaaaaaatatattttcccctattttttttctccattagcttcataattttacctaaattaaaataaaacaactaattaattttgtcataataacaactaactttaagacacattaaatgtatacaataacaaaaaaaaaatatacataataaataaaaaaaaagtatataaataannnnnnnnatttataccgagctcggagagagaaaaagagacggacgggaggtggtggtggt

SEQ ID NO: 62510 - DNA, 1779 bp, Cannabis sativa
gggcataaaacccaacagtcttcgagaacaccgtttctctgaaacgaactactgcaagcatcgactattatttctagaaaaggtactgagatgaggcatgtcctcatcgagcatgacagaaacatgcatgtcctttgcgatcaatttaataggaatatggagatgctaaagactgatggtttcgtcaatatttggatgctaaacatcctgtctcgctaacatctcccatccataataatctgggtactccatttgataacatgtatgaagtttccatgttctctggagatcatgcagcaagagtcgggccgtctatcacactagaatgaattatatgacccctatttttatgtacttagttttttttttgttttttctttaaaatatatgtaccatgcatgttttttgtaatagtagcacgtaatttgctactttgtatcacttttctcttttttttttgtttgtttgaatctatgtaatatatgtataatatttatcattttccttttatcagtatatgtttgtaacatatatgtaatattatatatttccctttttttagcaatgtgtggactctaagtaaaagtatcttcgtgtactcttcttcttttttttaatatataaatcctcttgttctatcaactcaatctattctcacgtctcaggtctatatgtatatatttattcttgacagatttatcagctgacgtttcaattttatgtttttctcaaatattcttcttgctccactataaatagaagtttagccaggcatacttttactatagtgatatgtctccttctatgagttcaagaaagaaaatcatgggtgataatacacttgcctacaattcccttaacaaagattcattcttgtccttcacatgatgctaataaaaagaatatcttttccaaactgatgcctcggcatggcgtagcagacttgtcctctccgagaaatagagaggtgatcgtgttgttgatgacttaaagaatattctcgcatattcatggagagcatcgagaggcttagttctctcccccttttttctctttgttttttttactgtattagttagttttttttttagatccaatttatattggatagtttgtacgaagatttgcacaccatgccctttgataattatcccccagcattcgagaatgatgccaataccctttttctagtaggtaattatcatgtaatatcgatcttcaccataatatttatggttttttttttgttttttataattaatatttaatagttttgtaccaaggtcagatattagtttaattgttgttatatataaaaaaaaactttaaaataatctactatacatatatgtacacacatattttttttaattatttaaaataataatataatcttattgtaaaaaaaaattaaggtgtaaaagcaccttgttaatatgcatgatgcttataaacaacctatttgtatgatgcataaggtatagactcttgtcttttttcttttactcatctatgaataataataaaaaaaaaatagtaaaagtgtacactgccatgttttttttttttttttttgggcaaatgagggttgtgaaagcacattacacacgcaccgtcttagcagatataatgcatcgcttcaatagttaaggataagaggtttctctttttggtgccattaatgataataataataacaataataaaagcttactgccacggtttttcttttttattttgccaagtggttgttgaacacataacacttgcaccccctta

SEQ ID NO: 62511 - DNA, 1841 bp, Cannabis sativa
ttttgcactaaaaaaaagtatgggaaatttgatgggtatttttgggttttagataaagtggtcatatattatcaatggtgacatgtatcagtttaggaataaaatattaagtatacataaatatgaaaaatcaaatttcccttttaaagagtgttatacattgaagtgtttgtagaagtaagagtgtcaaaaatgatgtgaaagagagataaaataaaatattatatttttttttttgaaaataattttattaaggaatagcttcagccattacaatgttctttagaaagataggagcattccgctcgttaaagaaacaacctgacaaagaacaagacgcccgcgcaagagaatgggcagccttgttagcagatcgatacacaaaggaaataaaaacattctttaaagaggacaaaatcaagcgacaatcctccaccaataagccaaagttagaaggcatatggacagagctgtttattgcttgaacaaccattagcgaatccgtctctatgaacacatcctcccatcctttcctcttaatccagcttagtgcttctttcattccaacaacttctgcaatttcgggcagcaccactccaattctttaatctgagattgcttctaaaagctgacccatatgattacgcgctacacaaccaaaaccgaacattcgttgagtttcaaagatagcaccgtcaacatttaccttgatctttccacccaatggtttgcaccaaatgttgctgttagaaagtacaccagtagcaaatgtagctgatgtgttcttgtttgcaacgcgccattgatcaagagccttcctagccgactgaactactcccaatgctgtacagtttttgttctgccagaagacttcatttctagtcttccatatactccaagagatcattgctgcatctacgataacctccggttgcttgctgtccaaaatgctgaaaaaccagctgctgaaatcgtccacaccagtagcagcagcagtggccgagaggtgccaacaagcttgggcaaaccgacaaccaacaagcacatggaaaatcgtctcataaaagacattacaaagagggcaaataagatcgacattcacatgcttagtgctaagttgaactttcgttggtagagaacccgaacaagccttccacaagaaatgaagaaccttcgaaggagcatcaattttccaaagccttttccagtaactatcatcatcaaaatgtagccaattgccgctagaagatcgaagataattataggcacttttgacagtataaaaccccgattgttccatcatccaatgccacgagtccactgttgttgaatcactcagctgtatactcagaatcagctgagcatctcgagcttcaaacatatcttcaatgatctcagcatcccaccctttctcttccatcaacatcaggttggaaaccaaagtgcctttgagaccttggttgaccgtgagaacataaggccaactatcatgaggcagccatagatcatgtaatacactcacagaggagccatctccaatagaccttctagcaccctgccgtacaagggattgagcctcccaaatactgcgccaaataaaactaggattttgtcctagttcagcattgaggtaagaccctctcgggtagtatctagccttataaatccttccaacaagtgagtcttcctttgtgagtaatctccacccttgtttacccaaaaaagaaagattatactttctaaggtctctaaatcccaaacccccaacatgtttgtgttgacataacttcttccaactaacccaactaatccctttatgagaagaattagcttgagtattc

SEQ ID NO: 62512 - DNA, 602 bp, Cannabis sativa
ctggcctgaacccacaatattatcatctattccactcgcgagaccagtatttttagttgaagtcactgttgctttttcaccaggtgaccttgggtttgacattatgtctcctaagactcgtaaatcaaagacccacaggatcctagtgtcaccttcgaggatgaactcatcgaatctaaggttaggtcaattggggcatacgttggcggcatactaaagtcctgcggtatcaagcagggaaagggtatcatatggttcgtggcccctgggtaattcaattattttcctcctgaaagggtaatccatgaggagtgcagtggacctggcacgagcaattcctcgggcattggtgcctagagcctcgagcacatcacggctggggtggttcttccctttacggattactttaaggagttctgcaactatctcgggttgcccccttccatatgaaccccatctcatataggatctttggaagcttgaaggtcctattcactacaagaaaaatatcttttagctaccatgcttttagctaccaaattttattggtagcaaaatgtagcttattgctaccaaattttagtagcaaaatttcttagtag

SEQ ID NO: 62513 - DNA, 1575 bp, Cannabis sativa
aggcataggacagttgtgaaaacttcacaacagaatggagttatcaagcgtatgaatataacctttttgaacaaagtgaggtgtttacttcttagtttaggtttgggaaagccttattggggagaggctttagctactgcttgttaccttgttaataggagtcctaatagattcatagacttgaagaaatcttatgagatgtggtatgacaagataccaaacccgaaacacttgagagtgttcggatgtgcagcatatgtacatcaatccaatgataagcttgatgctagatctgtcaaaggcatttctaagatatcctatagacacaaaatgttatagaatctgcataaactagaatgagaaactcaaggtgatcagttttagaaatgttgtgtttaataaaaatgattttcctcacttgaaagctgagaaggtcagtgtgttacctgatgcagtttcatctggcaagagggaaggtttggtagaatttgaaatcgagcttaaagaatttaaacaaagtgagaagagtgacagcataaacacaactccagatgagactgaggaacaaccagatctgtttgactactagcttgctagagatagaactagaagagaaatccatataccagcaaggtttgcagaagttgatctgatggcctatgctttctcaataaatcattcatgtgacacaccaaaaccattgagtatggaagaggctttaaataaaaattacaaaaaagagtggtcgtgggctatggatgatgaatcaagctttcttagaaagaacagcacatgggtcttggttccaagacctgaggacaagaaggtggtctcatgcaaatagattctaaagattaaagaaggtgtaacagataatgagccagtaagatttaaggcaagattagttgccaaagatttcactcaggtagaagggatagattgcaccgaggtgttctcacctgtggtgaagtataagaccattagacttttgttgtcaatggaaacttatcaaggtttagaagtggatcagcttgatgttaaaattgcatttctaaatggctatctagaagaagagatatacatggaacaactacctggatttcaagtggaacaagatggaaaagagatggtttttaagttgaaaaattccctatacgaccttaagcaatcaccacgataatagaacaaaagatttaacaactatgttcaggagattggtttcacaaggtctaagtttgatcattgtttgtattttaagaacctaaaagagtcaacagttgtgtatcttctactctatgtagatgatatgttaataatgggaaaagacaaggcaataatcaaaggagttaaagataaactcaaggcaaaatttgacatgaaagaattaggacaagtaaagaagatactaggtttagaagttcataaattcaagagtgatggagtcatgcatctaaagcaaaagaactacattgagaatatcctaataaagttcatgatgcaagattctaagagcactttagtacctcttggaggacagtttgtattaaccaaggaagaaagtgttgggttttatgc

SEQ ID NO: 62514 - DNA, 832 bp, Cannabis sativa
agtttttactgtggatgctattggtctatctgggggcctcgctcttttatggaagaataaggaagatggtagtttattgggctactcaaataaccacattgacatcatagtgcattcggcccaagctggtgattggagacttacgggtctctatggcgaacccaaccgtagccgtagacacgagacgtggaatttgttaagaactttggccactcgttcgacactcccgtggtgcataatcggtgatacaaacaacattgttcgtcatgaagaaaagagaggcggcaaaccttatcctcaacgacttctcacgggctttaacgaagcacttcaacagtgcaatctgcacgatgttgagctccaagggcacccatttacatgggagaaggggagaggctcaaacaactggatcgaagttcgattggacagggcattagccacctcggcttggtttcaggtattccctcaagctactcttttgaatcttgactattcgtgctccgatcatgcggctcttttccttgaaccaatggttccacctgttttcactcctaaccatcggtttaggttcgagaacacttggttaaaggagcctttgtgtgctgaaattgttaaagaatgttgggagaatgggcatcatttagacctcacaggtaagctaaagttgtgtgccgagaagcttaaggtgtggggcaaagaaattactggcactcttaaccatataattaaagattacaagaaacaattgaaaaagttgcaaggaaggagagatgataattatgtgcaagtttataatgaagtgaagaaaaagcttttcaaagctattgaccaa

SEQ ID NO: 62515 - DNA, 2731 bp, Cannabis sativa
aaaaattgaacctttaaattaaattcattatgatatatgtgagcttcatggaactctaaccacaaatggtaaatgttattttattacatttattgatgattgtgtttggctttacttatgtgtacctgataaaaaataaaaatgatacacttaacatgttcaaattatttgtggctgaaattgaaaatcaacaagaaaataaaaatgtttcatagtggtagaggaactgaatatgattcaaacttgtttattgaattttattatttacatggcacaatatgcaaaaaaaaaaaaaaaacagcgccatatttacctaaaatgaacggtaaagttggaaaaaatagaacttttattgaattagttgtggctattttgttgaattctggtgttgcatctcattgatggagagaaattttattaactgtttgctatgttcataatagagttcctaaatctaaaagtaaaattttaccttatgagatcttgaaaaataggcatatggatgtgtcttattttagaacctgggttgtttagcttatgttagaattattgatcctaagaaaattaagctagctagtagagcatatgaatgtgtatttattggatatgcgatgaatagcaaagcgtataaattctatgatcttaatgtacatgtaatagtgggatctaatgatactaatttttatgaacatagatttccttttgaattgagaaatagtagaagcgcatctactagagatattcttacgattgggaataatgaacatattgagagtactaggatagaacctagaagaagaaagggagctagagtagcaaaagattttagttcaaactattgtgcctacaccttagagaagatctaacctccaagaagctttgtcttccctagatgctgacctgtggtaagaggtcattgatgatgaaatggaatctcttgtgactaacaaaacctggcatgtaacatacttactactttgctacaatactataggttgtaagtggatcgtgaaaaaaaaaaattaaactaaatggatgagttagctttcccttaagttttcttgttcattgaccatgctaaaatttagttgttggacttggctagtggtctttagttgtttggactaatctttgtttaattatattggctttttgaatgaaaatcctttcaattaaagaaaaaaaatgagctctaaaaaacttatttaacaaaactcaattttagaaagagtttcctaaaaagctaaaaatagaactagaagcctaaccatatatcaagctttaagtaactctaactcatctctaattttgatatttaaaatgcaaaatgatttacattataaatatagagttttttacttaatattcacaattcactcatatacaattttgacctcaatttaccatgtgtaatataatttatttttttttataatattttttattattacatgaaaataaaaatataactaaacctttgaaaagttgtcttgaaagaaaagaaaaaaaaaacttgatggtatagtttttcaaaaaaaaaaatctatatatatattttagtaattaattaagatggtggcatagttctaatatatttttttccttttttttttgtctaaataataaaatacttctggattaaaataataaatttcttctatttttttttttccattttgtcagatacaatatatcaatctaatagaataaataaataaatagaagtgtccttgttcacatgcaatgcaaatggatccgaaagaaaaacaaaattaattaataaataatattttcttacagatctctttaggaacatctgtctttcttaatccattttcttctggacttgtcaaatttatttaaataataataatctaaactctagattaataaattaatatcatattaatccaagattaattgtcacttagtataaatttaattttctacctttgggtttccactttcactcttggttaagatttgaagaatttacatgaattattatttttttgtatatttttaaacttaaagattttttgttatatttttacagtgtttataaaaataatacaaaagcaatcacataaaaataataagaaaataatataaataaaataataaaaaattaataacaaaataataaaaatataacataaaaatacataaaaatattttatataaataaaattttaaaaacggtaaaaatatttaaaattttcgtacagccgtaattgtatttttgtaattttttttgattttttttttttttgaaataatccctctaatatatgatatattttgttatttattataatatttaatatatacacaataaatctctcatttatataataataatagtttaattaataaagatcttatgcatagacacttctcccaccaatacgtcaacaacacatgcatttttatattttattactctttagaaaattttactgacaaacatgcattccttttttataatttatttatttatttatttaaaagattctctaatatctacaataaaatatataataataatataaataaataaaaaaatagagtaaaaaagcttttagatcttggcttggtgaatggaattatgtttaattaattattatgagtaattaaaatgaaataaaagtgttgtgtgaggtggaacttgaaataaaatcacattaatatatgtagttgaagatgctttaattgaccactttatatttta

SEQ ID NO: 62516 - DNA, 787 bp, Cannabis sativa
caaaatgttattttctgttttaaataacaatacacttttaatcaatattgtttgagaaatttacatggtatactgacttttgctattttttttacaaaaatactaccacacgacagaaagaaatttctaccgtgtggcagtatttttgtaaagttaggggaaaaagtcagtatttttgtaaatttccctaatatttttaaaaaacactaaccaaacgtgatttgtgttttgaaaacttcaaaaactattttttgttatcatttctaaaaatacttttttgaaaacaattaaaaaaaaacatgctcttagactcttgtttctatttttaacaatttttcatggacatatgattaagtttgcaaaaataccatattatgtaataatttgtgtttttaagtgttaagagctgcagattctaacaataatgaatcagattattgtaatatattatttttctttcctacatcaagctcagctatttcaactgataaactcaattaatatacttataactaaatggacaacttcaaatatacttccaaaaatgatttttttaaaactaagatacataattatatatacttactaaatggactatttggctctagcgctagctagaaaaatatatattatgtacttttttaattgagtaaatattgtattttggtgagattaatatatatatatatatatatatttacattagttacttttagtgataattttttagtcacaatacaaattttttgtgactaaatgtgacttttggtcacaacaaaaaactact

SEQ ID NO: 62517 - DNA, 2219 bp, Cannabis sativa
  modified_base (26)..(48): a, c, t, g, unknown or other
caagtaattttttgttgtgactaaannnnnnnnnnnnnnnnnnnnnnnttatgttgtgactaaaagattgtcactaaaaatatcagttttttgtagtgcacacccaacctctataaagaacctgggagccctggccatagaagaggagaatacccactcgatggctagagaggatatcgagagagaaacccctaaatgtagtttttctccttacatttttttatttccttaaacaatttattaatgtactagtatattattaagccgacataatttaagagttcaaaaaaaaaaaaagataaatgtataaatattagtctaatgataaattataacaataagtatatatgtattttcagaactaatttatatgtttaatgttaataaataagatttggggtagtttaaatttttttaaataattataatgcaactatattagtatagcaaattgtttttaaaaaaatattcataatgtatttaaaagcatatatttgttataatattccaaacttagaggaattttttataacaaaaaaaattaaaggataaaattctacaagaatgatatttcagaataaacaatcatatatatatatatattctaatacttaatgttagttttgttttgacaaaactctctcctatagtagaacaagttagcaatttttattttttttttgaatagaagatgaacttcattaacacataacagccaaattagctattatagaggaatgtacagcactaagaatattgttgacattaaaggaacaatctgaccaataataagaaccgcgagcaagacaatgagcagttttttagcagaccgcgtaacaaaagaaacagacacattaactagacagtccaacaactgtttacaattagatatcaaaagaccaaaaacagaaggcatagaaaaaaaaaacttgtaatagcctgaactgcaacaagtgaatcagattcaacaatcacattagatcactttttcatcttgatcgaactcaaagcctctttgatttcgaaagcttcaacaaaggtcggttgaacattgccatatctcagcgcagtaagtgcttctatcaactgaccatcagagcctcgagccaccaccccatgccatatgtaccatcactttgaaaaattgcaccattcacgtttacctttattttattgatttctagtttagaccactgctcttccttgctgtgttttgcaacaggttacaacaagggctcaaatcgatgagattgagcataactccattgatcaaggacaaaacgggcactagtgacaacttcagcagcagcagtacgcactctactacctttccataacagctcatttcgggcttcccaaagggaccatgaaatcattaagctttcctcaaaaagactcgaccgcccattatgaagaagattctcaaactagagattaaaatcactgcgaacagcagctgcagagctcacaccagaccaaacccaacagctttgagcaaaccagcaatcaaccagaacatggtaaattgattcttcttgtgtttggcagaagacacacgacaccggaactaggacatgcttggactgaagttgcaacctcgtgggcaagcaacttgtaagggctttccacataaagtgtagtactttggcaggaactttgatttttcacaatcttttccacacttcatcttccatagcagcactccaacttcctttgagcagttgcaaatatttatatgtactctttataatatcctgaatgttcatacttccaaaaataattgtctgttgcactatcatttattgttttccttttaatttgtatttagttgaactcttttgtaagtgtagagatttcaccaaaactacacgtagttactaacatacattactaaaaaagtaacctttatatctattgtctcaaaatattcttaaatatttatttaattaattattaaagatgaaatgaacgacacttcgtttactaaattactcaaaattaggaagattttttgtttattttcgtttacttcgtttggtacatatttgtctgaagtcattagtgattttatttttgtaggaaatttaaatttctttttacaatttcgctctacaccaacattaagtaatcagtactaatattaaggtcaatttcgacctttccctgttcacttgacttttcaaagtcagaacacgaaaacgacttcgttttgtgtttga

SEQ ID NO: 62518 - DNA, 1220 bp, Cannabis sativa
  modified_base (726)..(726): a, c, t, g, unknown or other
ttcacaatataaacaactatatttcgatcaaatgtaaagtacttttgggtttttcattgctcgtaattttcttgtttaaatagttagttatctacgaaacttttgattttcgagcaattgtcgattctacctcgcaatgacagttataatctgccttaagcaaacttgaatatacttttaatgattttataactttgtatatttttggttgcttgtatgaatagttatattatctatccatttactaggtttaagtacgtttgtcaagacgtcgcgatgtctcatttagtactttcctatcttgcacgaacagttaatatttagctttgtatgcaagttataactttttaattttcctttctcgtcaaacaggtttaaaccaaaaattaatggtggtttgatccctttctcatcagaaaggtttgatctgatccctttctcgtccgaaaggtttgatcaaaaactttaatttgttttttctttttaagttatgggtttgcattatatcatgtatttctagatgaatcccagttaatcatacacaaatgccccttaagtaattttaaagagtaaagcattgcttccgagttgaatgctagcgagaagggagtgtgtcccgttgtcgtcttctcggtagttttgtgagcccagagtacttgaggtagctcgtcgacccacctgcctttggcggcgtctaacttcttcttgatagtatccttcaaggtnttattaacagcttccacttgtccattcgcctgaggcctggatactgacgagaagctcttaattattttgttcctcttgtagaattcagtgaacaagtcaccaacaaactgggttccgttatcagatactatcttcatggaaattccaaacctacagacaatgttcttggtgacaaagttgaggacattcttccaggttatggaaacaagaggctcaacctcagtccatttagtgaagaagttaactgccactaccgcgtacttagctcatcctcgcccagcgggtaatgccccaattagatcaattccccatatagcaaatgggtaaggtgaggtcatcatcctcagttccattggtggcacgcgaggtatatgtgaaaacctctgacacttatcatatttcttgacaaactcgtgggtgtccttgttgatcattgggcagtaatagccttgcctaatgatctttttagataggctttgccaacctgcatgatc

SEQ ID NO: 62519 - DNA, 978 bp, Cannabis sativa
agtatacagtataattttctctaaataaataggctattgggccacttggattgggcctaaattcttataattttttttaaaaaaaatacaagggtaatatatatgtctgttgagtttttaggccctgtttgggtgtaccctaagcatggacttagcctaccttaggcctgctcgtgtgcattcctacgtgtaactcaaaaaatatatttataaaaacggttctataaaaaaaaaaaaaaaaaatcaaacatttactgtatacatgctattatagagatcctagctaagaattaaaatatcagtataatatctttgtcaaaataatttgtatgcagagttaatttcttaattaacaattaggagtacctgttggtatgagtggtaatttaggtcacaataataggactcaaaatctacacgaaatatttacacctaaaaatttaaaacataaattataaaataataattgtatcttgaatcatgtggcaatatttacacctaaaaaattgaaacataaattataaaataataattgtaaattgacatatcatcgtgatacaatatcatgatagattttcatgatatagatcattttcctaatgatataatcataatataatatagattttttgttacaaagataaggtcttaaattcgaattctctcaaccaagaaaaaacatatatataaatattttgtaactaaatgtatcatttttgttgggtcgtggcaaaggactatcccctttaagagaggtgtaccttattatttgtgttgcctgcttttgttcatcatgtttggatagtgtgcaataagaaatttgtagttaaattctcttatgttttaatttatacacacttaactctcctattttttttttcttttttagtggcaaaatcacattaagtttacttttatttataaatttgaaatatcagttaaattttactgtaggttaactgccaactaagactgcca

SEQ ID NO: 62520 - DNA, 1361 bp, Cannabis sativa
acgggatcgtcggtggtcttcattcagggcttcagggtgttgtcttgggcgtggttgaggggcggcgactggtagggcagctgagcaatggtcgtcgcacaaagaaacgaggagagaaaaggtaaggtggctgcctcacctgtgccgagagagaggaaagaagacaaagggaagaggtagctggagagatataatgctacggttttttttttcatttgagatttaaatatggtttgttttttaaaaaaaaaaaaataggtagagtgtatttaaaataccatctgtctcactattttttttcaaaaaaataaacatttgtaaataaaaaaaaaattaataacaatagtattttttttaatttggattatgatatgacacgttaagtggattgggacacattaatcagtgacacttaacgcgtcactataattggatggccaattacttaccaattcacacactttacacaaaacataaaaaacccactgtttattctctcgtattatgtcaatatttacttacctttcactacattggatatgttaaaaatacacaaaagactatagtttagtcctcaatcctcactgtttaaatcacttaatttgctttgactagctggtcgttactgctacttttcacgccctagcaaccgatacgtgaaattgggtgtaacaggtaaaaataagcatgactgaccacatggccatgtaatatgcaaaataatattcagtggtaggaacccacacatcatactatattattaatattattattattatcatattaaatcggtgtgcgtgtgatgcgttatataatatgcaatttaccctactacatcataattctataaattgaatactataatcggtgtcactcgaatctatacgtttaaaaaaacaattttttttttcaaagaaacaattatatgaatggtaaatatattctttctattaatttgtaggtattgtacttatgtgtaaatctcctttggattcaaccatggcctaggattcggctcttgtgtatgtaaatggagtgcaaatttaaatagtcagatatactttgactataaatatgaaaagaataatcaatttatttactaaaactattttaattattcaagcaaccaattaacccttaattaggtcaagtctgccggcattattaataccctcgtggaacacaccccacactttttatcttgtggtgattacggaaaatgttatttttttttttttgaaaaatgttagaagacactaatagtgtctagttattttttatatgttaatattcttattagttaaattaagtacagtagaacttctatttaagaataccctattcaagaataacctctaatt

SEQ ID NO: 62521 - DNA, 1290 bp, Cannabis sativa
  modified_base (999)..(999): a, c, t, g, unknown or other
tgcctttactaatccaaattactaaagcagtcattacaataattgagactataaccatcatatcattaaccataaacggtgcttaacgcttttcttacctcagtccaaaaatcatgcgtgcaggccaatcccgggtcccctcaacttagagaacttcaattcttgatcaaactttctagaaactgaatgaaattgatggaacaaattttcgattgttgctgctcctaagctttcgaagggtagagggagaaagaaaaggattttgctatcttttgttactttatttctttttttccaagtcttattcactcttttttaataaaatatctatctaaaatttataataaaacccatattattaatcagcccacacctactagaaaacaacaaaaaaataaactaggttaaaaggacaattttacccctcttccaacaacataagctatagaataacctacgacataatggtctttctagcgaaacccaccaaatcaataacttagaaccttaaactagttcgatatatttctaattcaatccatttaatgttgtcgtgacatctgtgatcactccgtcgagctcccacagtcaccgggcccaaaaatattttatttcaaaactggtatctactatacccacttaatccaataaaatctccgtaattagtaaattacgctttatttttcacatattaaattttcactaattctcacacaattaacctaagtaagatcatgatcgtaccccaacattaattcaatcacatatttaataaaataagcccaattaattatcataataatttttcgggatattacacctaccctagtacttctcaacacttgagttttgccagtaattattcataccttgtaatcctaagggtactataacagatcccacctatagcgatctggatagtaattcccttagtataaatacaattaaaaggggagtaggtcattacccggtatcacaagggggtcgaacctctatcanaaatcttattgtctattgcttttcattcttatttgtgcaaacatgtggaaagcatcagatctgtacaaccctactgtcggttgatcacattttaaggtcaacagttttctgctttcattgagaaagtggatattatgatcaaacgttatggtgaacacaagatgaactcctatcacaccatctgcatctttgggtcttcctcaagacccatagattgcagatataagcactcaagttctaatcacaactggaatccccatgaataccgcagatgtggtgaatcctgtcacc

SEQ ID NO: 62522 - DNA, 1494 bp, Cannabis sativa
gttgtgttatttttagttgttagccttactcgagggcaagtaagcatttagtttgagggaatttgttaggatttttttagcttattatttatgttatttttagagttaattttcttctttattgtcactttttggaatataattattcttgttttctataatttcaggtttcgatacttggaatgtataaattggtcgaatctaaaaaaaaaagatgatctataaaatagagaaaattgtccaaaaaaataaaactgaaacttcaagtctgaattctactatgatctgatcagatttgggaaaaagtcaaaacatcaaagttctagatctttctttcagcttttcagaacatcttgaatcgtccaattctgagtaatatcaagatagttatggcataaatactatcagtcatcgtagtaggaaatttctaaaaaaataaataaaaagatagcgaaaaaaaaagatagagctgcgatttttatcttgtttaagtttaaattttaaatctttttagtatcttttaggtatctttgttagcctatataaaaacattattattagtatttttagtagactttcagagctaaaaaaactcagaaactcttaattagaggcagttgaggagtacaaaaattagagagcaaattcaatcacgaaggtttttttaatggagttttcaatattcttttcttctctattttttcttctattctgaattaatatgtgtgattttgctacgatgaacatgagtagctaaacattttattaggatttatatgaatattgtttgacattgatttatggttttaacgtgatttagttttaccctaatttttatgtattctatttcattcgtacttaattacttttaattgtttgatcaccaattaaatatttatgattttgatgcgaaatgtgaaaagtgggtgtcaattatgctatagtgaaatagaatcaaatttcgatagaggacgagagtacctatctggtttggatagcttataggatttctgtgtttaatgcatttatttaacatgtttaatttatcacgagagtagaaaatttgcatgtaattgagctttatatatctgagaagactataaattacataaataaacatgctattattgcatatagtttggtaataggaattgaatcatgttaaacaataatcaatagatataattaaaattgaaaaactctaacttttaatcattgtcaatttacatattaattacttgcttcctatttttactatttctttattgttttttaattttaaattttctcttaatttagatatagccaaatagaagcaaaaatttaattttaaagtacttaactacaattcttgtgggatcaaccccactctttgtgagtctataacttgataacaatacgtatacttgcgtgttgaaaatatcacaataattacagtgtgcactcaactcatgagatactgtaatgagttagggttgtttaatctcacacaca

SEQ ID NO: 62523 - DNA, 870 bp, Cannabis sativa
caggggccaaaagaaagaagacctcgcatgatactacaaaaatcgatccctttgttgatgaaagtgatggattgagttgtttggtgggagtggataaatctggaattaaggatgtttttgctgaggaaagtggtgtcaatcatctcgaactctctaacagtagtgaaggctacatagatcctaacaagaaatctagattgctcattaatagtttgcgctccaatgaaggttcgtttgggtttactaaggagcaaggaggtaaggttaatgataagcccccaagtgctgatgctacgatggttaatccttctccaaggtgcaagagtgggacgatacaagttaatgatcagagtgtgtcaattgcgtctgatgccagagtggggggagagtcctctgttaagattgttgatggagataatgtgaatcgggattttctacaggccgaggaggcgggccgaatcatgccccccaaggacccatgaaggtgctttcgtggaattgccgcgggctcggaagcccggcggctaagaaagctctcagagccttggttttgagagaagacccggatgtgctatttctaatggaaacaaaattgaacagtagacgtatgaattctatctggcgtagtttgggatttggtggggcttcttgtgtggaggcgtcgggtagtgcggggggcttgtgtctttgttggaaggctggtgttgatgtccttataagctcagctgaagctggggtgatctctggagttttttcaaacgtgcttaatggccccgattggactggtcttttcatttatggtcctccagttcggtcagacagggctgtgttctgggaggctagaatcttggaaatcttggccttaaatca

SEQ ID NO: 62524 - DNA, 3632 bp, Cannabis sativa
  modified_base (3583)..(3586): a, c, t, g, unknown or other
aaatgtttgttggagcttcatctaaacggtgcgatattttgcgagaaaaacaaggtgttagaatagctgaggcacttgataatggtgagatccttaatggacgaggactaaatcaagagatttctattaaacgtccgggtgacaccagatggggatcccattatggtactttacttaactaagttactttcttctcatctatgattgatgttcttgggatagttgcatatgttggagcaaattctgaacaaagatctgaagcaaataacttattacgcttgaagctctcatttgactttgcattcagtctccatttgatgagaactttactaggaattacaaatgaattatcaatagcattgcaaaggaaagaccaagatattgttaatgccatgaatttagtaaaattatgcaagtaatgacaacaatttatgagggatgatggatgggattctacttttaatcaagtgtctactttttgtacaaaatactatataatgattccaaacatggatgatagatttgtagctcttggtcaaccacgacgtaactctcaagagattacaaatttgcataattttcaagtggagttattttataatatcattgatatgcagattcaagagttgaatgatcgtttcaacgagttgaatactgatttacttctctgtcttgcatgtttatttccagttgattcatttttcgcttttgacaaaagaaaattgattcactttgctgagtattatcctaaagatttttctacaattgagcttttggctcttgaaacttacattattgatatgcgctctagtgatgaatttatgggattgaaaggtattggtgatcttgcacaaatgatggttcacactagaagaaatggtgtatatccattggtttatcggcttgagactttatcattactttttcctgtggttacaagaaatgtggagagagtattttcagccatgaatattgtaaaaaataggcttcggaatcgaatgggagatcaattgatgaacgatatcttacttgtttacattgagaaagatattttcagtatggtagataacgagcctattatgaaacattttcaacccatgaaaaaacgtcgaggacaactgtagttttctttttaagttgatgattgtataattttaaaggatcattataacttgttttattgagcttcaagcgacaatcatatcttatatgctttgatgtcaatcatatatatatatatatattaatgtatacatttttaatttgaagcccccactaaacgaaaaattttgggtccgtcactagagaagagaatagagaaaatgtactcattgtaatccttttggcttttctagcccaatagataataaaactaactcgtggcctaaggctctttaacaccccaaccacgtaaaaactctgagtgttctattttgatttgtttcttttgataatttttccttagttcttatattaaataattcgttttttaaaaatcttagtaatattttggtgctttcactgagaactgaaggaaccagtgataccatcatagattacgttcagtaattacggtactcacccaaaacaagtgtggtcttcactatattgatcctaatgctaaggcaggagatacagaagatctaactgaggtgaccagtcaccacaagaaggatcaacacagtaaagaccgaaatcctgacgatcctataatcaaagacaatgaattaggagaaaatagttctaatgatcttgaagatgatcaccaagagacacctaaagatgattaccaagacatgcctactaatggtggcaaaaatatggacaacccagacgagttagatcatgtggtcatcatggccaagaagttacaaatagctgaaaaacaatttaacttggcaaaaagaattttctttgctaatgcttaagaaaatgtcgagaatggaagctgtaatgacatcattgactgctggaagcaaaactaaacaaatagctctaacgaacaatgccaccgtgaaggttgatcctaaaaatcttggaacttatgaccctcataaggataaagggaaagaaaaagtagacgaaactttaaggaaagctcttcaaactaaacatcaaaagaaatctaaatttaccagcaaacttcaacagaaaaagaaaggaaactatgcctcaaggcaggtaaccaaactaattctagaggcagagctgcgcaaaaagataaacctgatgccaaagccaaaaagcctactgttgggaaggatgcaaatcagtacgatgattcactcaaacaaagtgacaatgttgaagaggtgcatccgttatcagatcacaacaatagagtctccccataaatgatttttggagaagattaaatcaaaaaaagaaaaagccaaacctcgcagagatgacttgagaaaccacatcaatgatcgagttcgcggaagggaatctttagctgacaaaactcaatgcctggaacataaggtcaacgagttaatgaaactcacggagaagatctctcgaaaataaaatggaattgtgtctgattcagaagaagaggacacagatccatgtgtgaaaagaatcatagacgcaccactgtcagagcactttagagtgcctcaaatgtaattgtatgaaagaagaacggaccttagggattatctatccaaatacaactgaataatgtaagttgttaaggctagtgatggtgcaaaatgtctctccctttctcttactctaacaaaatctatggaagattagtggaagaggttgtctcccgaatcagcccataattggagagatctacaagcgattcatagcagcaaaggactttgatctggaagttagctccctaaccaacatcaagcaacaattcggagaaaacctcaaaagatacatccaacatatgatggattttgcttcaaagacaaaggttactgatggtataaagatggtagttttttaacatcatgaatatccactagatctttactatgggttgagctttagagaaagagggcagatccgctatctgacttcttatctagggcctaaagatttattaacctggaagatgcttatgctcaagcttattgagtacttccaacaccatcaaaaaacacttctataactcagacaactacttcgactattttgccttcaatatctacgttcataacgcctactgtttacggacctgatacttccatacaaccaactagacatgcaagtttctctggctttggagtggcacaaactggatatagtgttgctcccagacaaatgaagaaatgaaaaactcgagaaccaagatactcctagtatgttgtataccgaagggatatctatctctatgaattcttacatttgggtcactgataatggcggctctcccatagtgagtgggagttcaatggtgccaaggctcacaacactatccactgtgaagcaacataagttcaccatgcacgatcttagtttagcttcttccaaacccatcttcttcagtgtttctttataaggaatattaacagagctctcgtcatcgatgagaatgttagaaatattttaccaggannnngatttactaccatgtatgttttaataacaacctaatatgaattcta

SEQ ID NO: 62525 - DNA, 1062 bp, Cannabis sativa
ccatggacaacaaattgtgttcttgagtagagaacgataatgaggtttttggatgcacaatctcccagttagatagagtttgtccactttgtttgctatgaagctttaatatccaaactatctttgtcgaaggcagtcatctctcgagtatgttccaagagattatccatggaggaggcaggcaaggcttcaagagcaagacatctgtaaagactctttcgaagagagcatgcgagaggaagcttaaagaagaagaggaaaccctagtagagcttgagtcaataaaaggcaattaatccaacaatactttccgaatcactctcattatttatatcccatgtctaacattatttaggttcatcagtggaatatgagtaaatgaaatggtagattttactcttcactaaaattgtgatataaataaaaataaaatgagaaaaatgagaattacacactaattacataattaatttcaaatatctccatttaaaagtatcataattaaaattaaattaaaaaagtatgtcataaaacatagcattatcaaaatctgacgtggcacaaccttactgcttcatagtcagaaaaaaaaaatctggactcttctcactagaaaacagactgacctgttcataaatttcatcaacactaaaataaaaaaaaaaataaaaaaaaaatctccataaaaaataatataatataaataaaaaaactatacacgggtgtgggtcccgccctctctaccttcactcgaaaacgacactcaaaattaatcgcccgtcatgggtcccgcaccacacaaccacatgcctactccgtcactatttacatcaaaataaataaataattaataattaaggcaaatccccaaaacacctgaaatgacaatattacccttccccgtcttctataaatgacaaccttttctccgtttcataatcccattccatgtccgggctcttctttcttacttagctagctacctagacagagaattttctcgtagcagagagaattttctagtcactttttcattgctactatcatatatatatatatata

SEQ ID NO: 62526 - DNA, 3082 bp, Cannabis sativa
aaaaaaaaagagagatgcaatattaaattaccatagctgagtgaaccagtgcagtatatggaacatgattatcaaattaaagtaccaatatcatgtaataattgttatgagaactggttttttttttttagaacaagtagcatttagtttccgatattaagaatattaagtttaataataaaataaaaataaatgtaatgcatctgaattctccacatatttacgagttaacggaaatagtagtaacggtgtaagagaattgtaacattaagtatttttgcctccaaaaataaacgttaggtatttaagtgtataaaatctaaaacattagttatttatgccgcaatttaccttattaataataataatgaatctataaaaatgccatgccagctattgatattcttctatccaattgaaattttattcatttacataaactttgaaaaacaaataaattaaacaattagaaaggaattattaaaaacataataacttagtattacaaataaaaaaaattgtaaagaatggattctattaatcgacctatacacaagaatatggagaaagaaaaaaataatttataattaatctaatctcatgttctaggaggtccttcgaatctaatataatcgtacataagtccatcgaaagcggtcaaatgtcttgtttgagaaagataaataacattgttgccgtggaggagtagagtgcttggtacatttatgctgtaaaaccagtacaatccatggattccatgccttgcaatggcattgtctctgcctattaggccggttgtgaagatggcttctgatttcaggtcgttgaatcgaacctacagtaacattaattagttagtctcaaaaaatattaaccatatgatatatgttagtttcattactatttttcctcaatattaatgattgacagttatatatttcgattgtaggtagtgtagtttttgcattggttatgccgttatttttagagtaattattaaatttaaagatttttgtctaattttattcaattttattaatccagtgattgtttatgtactaaatcatgtcctccaaactttgacatctactatgctcctcgaaatttgagatgtaccaaaccatgtccctaaacttttatctattttagagtttctttactaaaattagataaaaatctttaaatccaacaatctcatcaatagtttaggtagatttttaataattaactttaaaaattcaggaatattatttgctatatgttaaaatttgagggtaaaaattctagttaaccggaatattgaagctgtaattaattgagtatttatattatgattgaagtaattaaattaaagtacctgcaactccatgttgctagttgaagccaatgctaattggagtgtgtaattcgctggccttattacgttttcaagttgaaatacaatctgccatgtggttccttcatacgtttcgttccccacatttctacaaaaattacatcatacaagccaaatttagtttctcatatgatcaaagaaatatgcatatttttataaataatatatttgtctcatctattctaaactaaactcaatctcgctacaatgtgtgtacctgacgacttgggcaaaaaaccaatccgatttataatcactatcaccaacagtgtaaactaaatcattattaggatataaatccgcataacgatcccacaacccatattgcctaaacctgataaaagattgagattagtagttaatcaattgtatatattttttcataattaagtgattaaaatgtatgtgaacctacttgtccgggtgattgctatataattggttcatgagagttggataagggtcaggtacgtaaaattcagcagcactacgatcaggggtaccaatttcccatagtgttggaccatttcttgggggttcatagactaaatttcccaagggaatatgtgattctgcaatgccaaaattacattaattattattattattattagataagaatgtattttaagtactactaattaaattttttaattacctggttcaactgtaacaagtatgttatacatataatctccaacaacaccaggaacccatgcatatagactgtagttgccaggtcgaacatttcttatagagaaaaaaccccgtctgtctgttttagtccaaaattgatacccctgaaagtgtaacaatattcaaacaagtattacatatttgagaatataatttaattaagatcatgtcttattataataataaataccttttctatttattaaaataaataattatttgcatataccttactttccttctgccatgatccaacctcaccaggtgcagccaatcccacatgagcatagcgagcaaagaaaggaaatcgagaaaggtatctaaaacagaaacagtgtattatatatttttatttatttattataatttttaaattaataattaaagaaaaacgaataaaattatggctatggctatatatgcttcaaaataaaaatgaaatattccgtacctatcacgaactaataatctgcctccaacactgcctcgttgattagagacaaggtaatctttggattgagggaaattgtatggccatgctctaacttcttcttgcatctataatttattgtaacaaaattaagagttaaattattacaaataatatataaaaaaatttagtgttattataaactttaattttatagtaccttttgtttagcattatcccaaagtgaaagaggatcttcatcggtggaaattgagttaagataaatagaaactggcccataaacctttttccatggctccccttcttcaaatgtcattgctatatcctttccagcatagtgagcacttgtaaacatctatatacaaattttattagatacccaaaaagagaagagaaaaaaaaaatctactattacatctcacagttttaatgtgagtccacattgtaatttgaattaataatcaatcatttttttttaatgatccttttaggtgttttgaactatttttcatgtcatagtactaaagcataccatgtga

SEQ ID NO: 62527 - DNA, 623 bp, Cannabis sativa
aaaaaatcccaacataagggtagagttttagaaggtcagccctgacattttgtacaaagtatcactatctttgccgctccagatagttctttcccccttactcttgacaatctgcattatgttcctttttgcattcaagtgtatggaatcctgtttatgtgtaagtcttataatcttgctaaatttatagccatggaaataggtgaccttattgaggtagataaggataccattaaggagggcactggcccttacatgcgtcttcgtattctcctagatgttaattttccaataagaagaggtatgaatatcaaattcattaggatgggaagagagtttattaattggctagactttaagtatgagagactcctggacttttattttttctgtgggaaactagatcacaccaaaaaatattgccttgctttcttgcaaaagtgtgatgaacttttatctgaacctttatgctcctataatatcctgctcagaggtaaagagaagatttctgaaaaagcctcagccttttcaatatccccatcctcctgtaatcaccatggtgaattttcatcctgtgaatcttaacttaccacctcaacacctatctacccatttaattacat

SEQ ID NO: 62528 - DNA, 1605 bp, Cannabis sativa
ttatgtactaaatcatactccagactttgatatctaccaaatcatgcctctgacatgtactaaattatgccctttgaattttcatttagactttagacttttttactaaaattggaaaaaaagtcattaaatctaacaatctaaatagttcagtaggcatttttaatgacttttaaagttcaaggggcatgatttggtacatgtaaaaattcaaggggcaaaaatcctaattagcctttttttaaatggtaaaaataggacatgagtttaatttttgacaatttatttttgtaatataaccaatttgaagatattttctggtacgaacacatgtaaaaatgaaatcaattttgttgtaacatttctagatcgagttattattaagttttattttgataaaaaataaatttaaggtcttatttgtaccattttagaaaatacagagtttattttgtcatttaacaaaaacaaaatatcaaatcaataacttttacaaaatacatagttcaaaatggtatttacacaaaaagatatggcaaatttctttaccaaactattacacatgaaaagataaaaataaaaataaaaatgagaatgagaatgaaaataggaatatgaagggaagggaatgggatggaataaaatttatttattttttaatcaagaaagaaaaaccttcattaatcatagcaaaaatacaaccaaacaaaactaaaattgatctaactgccaacccttacatagagcaaatcctcatcaaaaagctcatttcactctccttcatttttctatgtataagactataggctttataatatatatctatttttatcatatctacctttacatgagaataaaattcgaaaatacaagtatttttattgtgctaaacatagtaagccattgttgcaaacacaaccgcaacagtcacaacctttatcccttttttcattccttttatccacttgattcagtccgaaaacttctcagaccaaccacaaccaatctaggcctgaatttgtttaatgacttgttgagaaaacatactattaactcagattttagttaacataaatgagatttggtaattaatgaatttgtaataaaaatttaaggggaattaaatgttgggattttatgccctaaataaaactcaattttattgtaatcttattactttcaataaagatcagaaattatatattgactttgtcatatgctttgttcacttgttttatacatgattatatgtttaatgtataagttctattaaatcccaaacatatagttattcatagttacagtgatgtcatcacagtgaaaagtaattttgattacatgcttcaaattatttagtctcatgatttatcagtaaactgggtttacactgacattataatcagcgataaggtttacttacacttggataagtggaatctcttttttggggcattagtaaagtaaactagtatcgtatgtatcagctatacattgactggaccgatagtgactgtggaaaagatttcataaacttactgttatatcttttctaagtcaatgtcacttagttcatcatagattatttgatctcaatcttgagatggt

SEQ ID NO: 62529 - DNA, 2209 bp, Cannabis sativa
cgttggcagaatgctaacaataaagctcgataccttatgctatctagcatggttgataccttgaagagaaggtttgccaacactctcacagttgcagaaatcatgaactacttaactgaactattcaggatggcgttagatcaagctcgtttcgaggcgaccaagaattttataaatgcacggatgaagcctcataaaaatgtccgtgatcacctgctccagttggctagttacttctaggaagctgagaatcatggatctattatagatcaggaaactcatgtgagtttgatcttaaatagtttgactccaaatttctgccctttacttcaaattatgtcacgaataagttgactttgacttccacgagttaatcaacaaccttcagacatttgaaaatttgattggaggtccatagataggaggaaataaagcttctagttctaatattgctacaaatggtacgaccaagcctgaggaaaacattgcctctacttcaaagtctggtaagaagaagaaatataagaatagcaagaagcctcttaaagctattaacacagctaataagaataagaaggctactaatccaaaatcaaaggaaaaaggaaagtgcttctattgcaacaaaaagggtcactggaaactccagtgtcctaagtttttggcaaagaaacaaggtatatctaactttgttataaattcatgtgttttagagaattattatctccttgggttattaattatggatctactaaccatgtttattttttttccttatttcagctccagctgcttaaacttggattgctatcctagtgagttgagtcggatggttggacagaatggtggaaattgtctaagttgaagatgaagctcgtcttttatttaatatttaaattaattattttagttaatgaacaatttagtttcaattattagtatgagattttactccctatttcatattaataagattttctctttaagaaattttcattatgaattgcttttatgaaattgagctttatttttctttaacttgtatgccaataccatattatatttatatatttatcatattttatgtgtttttgtatttattaatgatataaaatctatggtattttaatctttgcaaagagatagtaccacataaatatttagaatttaaattcaatgtttatgaataattgtcatttcttaaacaattattaagattttgtttaataaaaagatcttttgatctgataggggtagaagaagtcaagaaataatatatgcagttcaaagatcttttatatctattgaactctagattatattcgaaactctacagaatctctataacacttaggggtggaagaagttattgatatatgtagttcgactctttgaactgtagactatactcaatacaccaaagtatctctatgtcacgcatattttgattagacaaggatagaatataataaaataactagcaaactagtagaacttattcttgatcatgtatatatattccagtatttctcactatagtaatagatgccagtaaaagtccttggacataaaatcacaataccttatcttagtgggagaattttaaaattctattccattattatttggatgatactagtgatagcctactatgttatgttcaagataggaactttaatttaaaactaagaaagtaaatctaaccatttatatggatagtaataacgtatcagaattatgaggataagatagaatttttttgcaatgtctatttgaatgacttaagcgaaatccctagtccttataaaaagctttaaggtatctctaatgattacttaatcttaagcaagtattttatattaatactagaatattgtgttgatgacttagtctagaaggaacttaatgttccatactaagataaaatgtcacaacaagaggtccctacacaccaatagtaagaggttaaatgcacacatgtgtataaatttaaccagactcctactgttgagtgaatgccatctaagatgtaatcaaacaaggaacattgagagacaatcaagaaagaatctctaaaagtgacctatatgtaagatgatatgggtgtatattagaataattttatctacaccaactcagtacttaatattagagatggtggttactctgggggtggaagaattattctagaaggatgtaaaaactcatc

SEQ ID NO: 62530 - DNA, 684 bp, Cannabis sativa
  modified_base (171)..(174): a, c, t, g, unknown or other
agatcttgataatgctatgcgacagaaaggaatcaagggctagagatcttgaacaaaaggagtcatattattccgctgcaaccaatataaggctttctaatcctttatgtgtttattttcattgtttcagagatattcatattgaagatattaatttaacatacttgttannnnatctagatcttggtaaaatattcccaacactttcctcaacacttggctgagtgactttcctcaacacttggttgagtgactttcctcaaatcttggtcgagtgactttcctcaaagcttggtcgagtgacttttctcaacactttgttgagtgactttcctcatgctatggctgagtgactttcctcaacacttgatcgagggactttcctcaagccatggccaagtgaccttcctcaagccaaggtcgagtggcctttctcattccatggtcgatcctcaatccaaggccaagagaccttcctcatgccatggtcgagtggccttcctcatgctaaggtcgattgacttttcccgaggcatgctgggacacatgtggccatgcaagatcacacatttggggtacctctttgagagtgtctttgctagcctccaggttaattgttggtttataatttttgaaattaataggtaccacttgtacctttaccttttagtatttcttttaaca

SEQ ID NO: 62531 - DNA, 1234 bp, Cannabis sativa
tttaagaaatcaaagagagaaaattggagagaaatccactgagaacattctctgtaataattactctcattaataaaaaaaaaagactcgtggactaaggctcattaatgcccaaaccacgtaaaaatctcatgcattaaattttctacgactcttcttatacattattaaattggttgccgaaaacctcagttaacattatttttgttaaaaaaaatttatggtatataattatattattataatatattaattttttgtgctatgatatattaaatattattatatatacaatatttatttaataatataatatatttccttgtaattataataaattaatatgacatataattaaaaagtttatataatatgattatatccattatgtaaaaaaataataaaaaaaaaattaacgtgaaatgaagattttttttaatatgattttaattatctaatttgttatatttgaatattttattatttttttaaatcaatgtttacctaactaatctttttatttgagactattttcaattttccaacttaacccaatctaatattcaaatttaagatttagtaagtagcataaaattaaattaggcctatgtgaaatttgacatataacgagaagttgaagaatacccaattttttttttttatttttttatatatatattaatcaaatttatcttcaaataaaatttaattcaaatataactctttttataagtattgtactcaaattatcctcacacactcacataattaagacataacttcaagcataataaatttgtgttctttgtagatgaatgtgcaagtttatgagaaagttgggacaaaattttgattagagaggaataaaaactattataaagtgatatgagtaaaattggtaaaatgattaaaaaaagaagtaaataagagattttgaaagagagggcaaaaattaaaaataattaaaaatatcaaataaaaatatcaaattaaaaaatcaaattaaaaaaatatatatatatatatgtaatataattttctctattatatattataccatatataacaacaatattatcattggccaattccaaattatagaattcttaaatttgacctcccaaccctattactttcgatgtaaatatatatctattttatataaagtgtgcctatataatagaaattctttgtttatgagaaattcataggtgactttttatttatattaaaa

SEQ ID NO: 62532 - DNA, 793 bp, Cannabis sativa
atatacataataacaacaacaacaacaaattagaattatatatataaacacactaagaaattattaatatataatttatagtgtcgaaaatgatgaaacacaataactatagatgttatgatttcgttgattatattatttgcatcagtttattgtaaaagttgaattcaagttatattaaaaaaattagtaaagaaagttaaatagctcggggtataattttttttttataagatctgaattatcaatcaacaaaataaaaaatctaatcgataatttacgaaacacaaagtttaatttttatatatttatatatacctcgttatttgaaagcttgaagattcgatgctcaaagtatatgcgagttggtgtcaatccagagattcttactttcaccacaaatttatccccactctaaccaaccacaaaatcataataattaatttaatacagttgtataagtattgaaacatcttccatatatacggtactttataacatattatatatataaacaattacaacaacaacaaacaagagaggagtgaaagaattaggaattatttcataaatacccaaaaatgataaaaaaaaaaaaaaaatctacaaaaatatagatttacagtttttttttttttactttttcacgcattatatttttatttttacaaaaatatggattgaaaaaaatattgttttcactttgttgctacatgaaaacagcattgtttttttttaaaaaaaaaaaaaaatgtaagtagaagaacaactgtgagaaaaaatccttaaaaaa

SEQ ID NO: 62533 - DNA, 711 bp, Cannabis sativa
taacttccatgaagcaattagtaaacaaaaggaaaaattctcaatcataggatatctagactttgcgcccaacagtctcttgcttacatgatatactagaagttatacctttccttcttctcgcactaaggcggcgcttatagcgtgatctgaaattgccaggtatagaaacaacgactctccatcagctggtttgaatagtattggagccttcactagatgttcttttagttgttggaaggctgcttcacattcagctgtccattcaaatttgttatttccttgaagtacattgaagaacggtatgcacttatctgtggatttggagatgaatttgctatgtgctactattcttcctgtcaacttctagacatctttgtattttctaggtgaaggcatgtatagaatagctttaattttctctgggttttcctcgattcctcaagaactgactatgaaactcaagaacttccctgaagagactctgaaagtgcatttctttgggttcagcttcatttcatactcttgaattatggaaaaggcctcttctagatctttgtggtggctctcggaggttttcaattttaccaacatgtcatcaacgtaaacctccatattctttctcagaacattcttgaacattttattcaccattcactggtaagtggctccagtatttttcaatcggaatggcatgaccttgtagcaata

SEQ ID NO: 62534 - DNA, 1480 bp, Cannabis sativa
ttattcctcgtccatcccactatctaagaaaactaattaagcaaaagaaaaaagaagagatgtgatcaggataaggattagatatttgagaaagatgaagtttttttgttttttttttctctatatttttatgaaatttagagataaggatggagtatgcgatagaaaaaaaagagatacgggtggtggtgggtggtgggttttggtggccgattctttgaactcgactttggttcaaagtttacatagacaatttttttttaaggtggcccctctagctaatggaaattgaagagttttagtagagcagatcaagtctgggtatgttgggctgggagtgaacgagaagaagaagaagaaataaagaaaaaacaatagtaaagataaaaaaaaaaaaagtaaagttaattaattagttttagaaattaattattcatttgtatttattttaaattgaaattatgatttggaccaataaaatatcaacacatgtattttttggagaaacaaaaagagcaattaaattgggtacctacggacaaacgaaaatcttgagcttgaggctattactacaatttttaaagattgaaaacttatttgcatcaaagtgaattttttaagaactttcactgcaatttaatatcaacatgtgaaatttttagagcaactaatggatctctcaaaatgaagactgaagaacttacaagaatcttgagcttgggaactattaccgctatttttcaaggttaaggacttatctatatcaaagttaatgttttgagaatttaactgcaattttaatacacaaagaatttatttatctttacataaaaggagtgcaaaattacattaaataattcaaaaaaacatgccattatacatatcataaacttataattttgtaccataaaaatatgaatttgtaccataaatatatctattttgattaatgtttattgatataattagaatgccaaaaaaatgtatataattaatttaatttttttatagtagagtttaacattatataagtcttgtcttttgacatgatttgagttgtgcctgtttcttgttcgtgtgtgaatgtgcttgttgttcgttctggtgggttgtcgagctctctcagtatggaataaggcgacagaaatattatgatagatgatattccaatgggaagactggtgtatgatgatgaggatcaggatttatcagagatagatgacaaatggtgccttgttggaatgttccttaaatgcagtattaattttcaagaaatgcaaaacaagatggtttgtctttagcaactgggtaggggtgtttatgttaaagagcttagtttatatttttcaattctaacatatggtggatattgaacgcgttatagaggggagccagtggacctttgatcgcgcacctttaatctttgaaagagttaaatatggaaaaaaaaaaactgcatttgatacctctggtgtaatgc

SEQ ID NO: 62535 - DNA, 1534 bp, Cannabis sativa
aaattaaaaaagttatttaaaaaaccatttaaatatataagaaatcgtggggtttatttacatatcacgtaatataaatgcagttaatatttgaatatctcacaactgtaattagctcgcttttactgggtcaaagtaaacgtgtattaaacacgttataaatcataatattctgggatgtctcgataggaactcagtaccaatgaccttgaaagcgaggtggagcttttccatatctttccgaggttgataatataaatctcgtcgcttctactttgaagacataatgctccatctgtcaattgcagttctcggtgacgaggtaaacttcaacagcgaataccatttgaatgttagcttctatctgagagaactgactcgtaaagactataaatctcactaaaagatgcctaaagctgattggtgagagcacaacgagtgtgctttcctatagcgagatgggcgcctcgctattagttgcttgggtttactcaactgttttacttagtttgtatactatatattatacgctaagtgtcttcacagtcattatacctcacttacgtctactcatgcgtaacgagggttgatgtctcgccttgtacatccaatgccgtatggtttctcgttaatgcatgaggtaatagtttgtatatttttatctcgcataagaccttatagtcagtaagttgtaaatatacgttgtcacgtccgcatttaatgagttattctattataattaccgctacacacagtgatccatattcttcctactttgacacgtgtcttccattaaaatggtagccgaatttcgggtataacaaatatttaaaaattattttaaaattaaaaaagttatttaaaaaatcatttaaatatataagaatttaaacatagtttattaaaaacaacataattaaaataaaattaaacatgatttattaaacatattttaatattcatttaacttcattcattaactcaacaaaatgaaaaaaaataatcatcgacaatttgaattctttttctaacccaaaaaatttcaaagcaaaactctataaaatccatcttcaatcctcttccctaagtccttccaacatgaaagtaagagaaaaaaaatcaaaattgaagaacacaaacccatctcttcctcgcttattagactccaacctaaaaacctaagaacaaactcccaaaaaattattttgggttcaaaatagcattcaaatctgtagtgaaagaaggtaatttagagagagaaagagttaccatccgatcaaaagagttatggtttcataacccccatcatttacagatttgtacctaaaaaaaggagaagatgaataccaaaagataatgaaggtcatgcgtagatgaagagagacgtctagctgtgcttacggtggcagaggggtttgcctggtggtggtttccgtccaccgttgatgtcaacgaagagaagggagactggcagaggaagacacgcaagagaaggaaagggggtcagggattctaaggatctctcaagctcgtg

SEQ ID NO: 62536 - DNA, 719 bp, Cannabis sativa
ttggggggggggggtggaaatacatagtgagttaaaaggatagaagaaagaaatcttgtgtgattgagaaaggtgaaagaaaaattgtaaactcagcatcactttaaaaaaaaaggaaaaataaatgtgaatgaaatgaaaaaaagaagtatagaagaaaatttcagtgatgtcgggtgaatgaaaagaaaaaaaaattcaatcatggttaattgtgggaacacttcgggaaattgtaacttatgggaagcttggggttataaaggtgcttatgatatctttcgccaagaacccttttcagttaccaaatacttaagcccgaaaattttaccctggaagacctattgattatgaaaaggatgttttcaacattagtggaggaaggtaagcaagcaaacatattggctatcgatatttttccaattagaggcacaacctaattcctatataaaggactcgactcagatgatgaaaagatcataaatcggccccgaaatgtcaatgaaggaggagaggaagctatcttgatgatccggagcgaaatcaccatctagtttctttcttcaactctttaaatttctttaagtctatttttgttttagatttaaccatggaagttaattttattttcatgaactaaattcctaattggggaagatgatgaatgttgtttaaagttttgcctagttaatgtcaattgccattcctttaatcttgat

SEQ ID NO: 62537 - DNA, 635 bp, Cannabis sativa
attaattcttattgaagaaagggtaaacgagtccctactagattaggcacgttatcgtgatttcaaattacgatgcactcctttgctaatcaaagtgtttactgaaaagcgtgaaatttataccgatcacaagagcctcaaatatatctttactcagaaagatttgaatatgagacagaggcggttgttgtagttagttaaagattacgattatgaaattctctatcatcccgggatggccaatgttgtggtggatgccctaagcaggaaagggtccgggtaggtttttcagcacgattatgatttcctctcagttagcagtggacatggtcatatcaggtattgagtttgtggttggcggacgtaacaatttgacactacaatcagacttgttagaaaggattaaaagttctcaactagtggctccagaattagtgaagattcgagaagaaatcttaactggccaagttaaagacttcaaaatgtcaggtaacagagtttactttataaaatccatgtttgcatttcgggtagtactgagcttagaaaggagattcttgatgaagctcatactactccctattcattacatcccggtaccaccaagatgtaccaagatttaaaaccctattatt

SEQ ID NO: 62538 - DNA, 609 bp, Cannabis sativa
actgatactgcaccacatttgaactgagtaatctacaaaaaaaaaaaaaaaaaatttacctatttcgattaacaatttactatttttttcgatcattaagtgtctgtataaaaacatgtatgtagtgatatattattggatcacctattaaataagttaaagaagtatatggctacgtgtttttaagctaacacttaagagacttaatttacacttaacagtaaagtaaaaaaaaagtatgactgtaatcaaatcgtaagatatagtatttttaatgttattttttttattaaggtcatatgtgtaacaattacaaaatgttaaggagatttcatgtaaatatcccttattattattgttgttaattttctactatttaattactaaaggtttaaatataaagaatttaatatatgataatgtaaatatatgagataaaataaaataaaaaaaagtgagtgtcttagtgagctattttaaagtataaagaagagtagctaattagaatgctcttacattcgggatttagttccttcgattcaaatactctaattaatgattggattgatctagcagttgttgaattttattatgtttagggttacattt

SEQ ID NO: 62539 - DNA, 814 bp, Cannabis sativa
tatctgtaaaaataaaagataaaatgtagtatgctccaaacacgattaaaactaaatcaaaaatatactaaagtaaatctaaatttaatactaaaaataacctagcatatatccaaaaaaaaaattacataaataaagtctacgcggattttaataaattttttatggcttttagattttatttacataaaagacgttcttttatgtaattttatgttatatttttgttattttattgttgacttttttgttatttgtataattaatattttttatgttgttttaatattattttgttgttgtttgatgttgttttcttgttacttttttgtggttgttttgtagttctcttgtattaattattatagaatacggtaaaatgtgaggaaaaattaaacgtaaaattataagaaatttataaaaatttgtattttatgtattaattatcactaaattatatagcatatttactataaaatgaccaaaatggattttataatatttcttattataaacgtaaacatatttataatatttattttagtttgagcattaatatttgtttttctttgttttcttcaaacccaattttttgttttttttcaattgaacttcttttttaactatttatttgttaatagttttatttcatactattttcactttaaaatatttatcgatttttgttttgccattaataaaaaaattataaataatgtaataataaatgaataaaaatataattaagtgcagaggtttttgccatctgagtttggaactgacccagcaagaatgaagaataatgcaatgggtg

SEQ ID NO: 62540 - DNA, 1034 bp, Cannabis sativa
agatccatgaagtcagagaagtaaataaattcacaactttgcatttctcatttccaacatgggaaactcactcaaaaatgaagagttttgaatatctcatttccacaaaacaacaaccaagaactggtgatcagatttgccagaacacagaaacatactaagtgatgttaaaatatcacttaggcatcatgaagtacatcccctggacgtcttttcacttaggcgctatgttatgaactacattcagtaaaatagtcatagctcactcaatattaatctgatgcgattaaacttgtgttttgaagctaattaaatgctctatcaagtcatgtctcacactttaattgtaattataaagttatcgactccaaatttcacccctaagagagttataaaaataagctcgtccgcgactcgaactctgaaaattgaagatcaacctcataagttatttttgacccttatatcatcatctacagtcaaaattaaccaatttagattttttttcatattttgaattattttttttctattttcaaaggtctccttaacctataaaaggagagctcttctagttcatttttcatattcagaaaactactcacaaggtcagagctttttctctctagaaactagagctttgacacttagccattagtctgtaatcatctcgtgagaataaaaacttgaagtagacgtatctctattactgtcgtgatacatatggagtgaaactactataaattgttgtgtctctctttacttttacttaacaaatatttcattctttctaatctagcaagcaagtgtgtcttagaagtttgtgtctagctagacttctaagtcaacagatatgaaatttgatttacgaagaaatttttatttattttaaatattattaattgataaaatttattttaaatatttgttacaaaacgataataattattgtatcaaatattacataatattaatttagtatgtaattaccaactgtcttgccatatatgacaatagaaattcacatgtaatta

SEQ ID NO: 62541 - DNA, 1213 bp, Cannabis sativa
tgtcgaatccctactttctttcgaatggagataatccaggtgttgttcttgttccttaaattctcaaaggcagtgagaattatagcacctggagaagatcgatgttgattgctttggctgctagaaataaagtcaagttcgttaatggaaggttaccatagcctaatgaagatcacgatgactatgatagctggtgtcgatgcaatagcaccgtgatttcttggatcttgcacgcgatttctgatgagatcgctgatagcatcatgtatcatgataacgcagttgaaatttgggctgagctgcacgaacgattcaatgagaagaacgctccttgcatcttcgaagtgaagaagatgatgcaaagtcttactcaaggatctaattctgttacaacctactatactcgcttgaagtctctttgggatcaaataagagagtttcatccacaacctgtttgttcttgtggcgcaatgaaggtgatacaagagtatcaagaagagggcaggttgcttgaatttctggttggattaaatgactcatacagcttggttagatcacagattctaatgcgtgatcctcttccaagtgttaacaaggcgtatgctgctgttgtacaagaagaaagacagagaaacctgactagtggattcagcaattccactgatattgataaaggagcatcaggtggcaatggacaatttgctggagctgttcaacctttcacatctaagtacaactgtactcattgtggaatgaatggtcactcgattgagagatgttacaagctgaatggatatcctcctggacataagtaccatgggaaatttcctaaccgtgatgcaaaaggaaatgctggaaaaccagcaggaggcaaattttcaggagctgatgaaggaaaggctgaggaaccttcaatggaaagagatcttatctctagcttgtcgagtgtccagtgccaaaagttgatagctattcttactcaaaaggccactgagaacagcactcaaaatgcctctgaagatcagcctgttgtttcccacttttttggtatgaaaaactctacccatagctctttttggattattgacacaggagcaacacatcatgtgtgctatgatattcatttgttcaaaaataccactgtcaatgccaagttaaaaaatgttttaatgcctaatggattgcatgttgagatttcttgcataggaacagt

SEQ ID NO: 62542 - DNA, 1146 bp, Cannabis sativa
aagagggtaggaccgcaaacatcctttttcacagaggaaatagcttgcatggttagggagttaaaagaaccagtggtggttaaagtaagaggaagcgagtccaccgtatctgcccaaagttttatccatccaagggctatcccaaacagtgaaatcgaggaagttgaacaagacttcaacttacccactggcaaaaaagaagaagcgagtgacgatgaagaggttggggtatttgatgaggacgcaccctttgacatgcctttctcctggatggacctcgaattgagggtgaggctatcgagcctaatttctttttagaaactaaatctagttcaagttggttgcacaaatctagtggctaggcaatgaccacaccttccttttactaatcttgagatcatcaaatattatgtccatgttatcttaattcccataatttgctattgagtcccagttcctttccaccatttcttcaaagatatattgagccattacgatgtctctctattccaactagcccgaaataactatagaatcatactcgaattcttcgtaatgtataaagagttcgcacagggagcgcccattttcgaggattttagttatttctatgacattaaaaatgttggccacaataaaggtttctactgctttagaaaataggccaacttagagataaatggaattaaaggtggagtttccaatatgggtgattggaaataaaattttttatgcattcacattgctagggattaggatagactttgttgtccaagtacaacgcataatttcattcttgtattttttacttagtgaaatttctaatctttttattatactcgtagggaggccagctcgatcgaagctcttaagagatagattggaaattgtagaggtacttagcagcctacctattagggatcgtgattacaggatcttatgtacaattgctaagttgtgagagcactgtctaattttttgaggcgtcagactccaacgtgaacacacatgtaaagaaccttttgagaagcaaaaagtgaagattgagaaaagccttgccagactgaagcaaaaatagctgcaggtagtgatgcccctaacactcttaatctcaagtctttgattatgcgattactaacacttggt

SEQ ID NO: 62543 - DNA, 784 bp, Cannabis sativa
  modified_base (42)..(55): a, c, t, g, unknown or other
tagaattcatattaggttgttaattcaacatacttgttagtnnnnnnnnnnnnnngtaaaataatttccaacaatagcatgttgttctctcctgttacttcgcgatcaagtgaagctctaaatgctattctcctgctctataatcaagccactggccagctggttaatagagacaagtcttccatacttttctcccctaatatctctacagagtctcagcatgaattttgcgagtctttgcatcttactggggaaggttttattagcaaatatctgggtgtccctcattgtgtgggcagggttaccaattcggttttccattatctcctccaaagcgtttcttcccgtgtgaatatatggaatgataagattttttccagaactggtaaggaaactcttattaaggctgttgtccaagcctttccctccttctcaatgtcttgttttaagatccctaaaactatatgccttaaaattcagagtgctattagctagattttggtggggttcctcaggtgctaagaaaatccattggaaaagttggtctgcaatctcgatctccaagttttttgatggtttgggcttccgaactctctcttatcataaccaagcccttcttgccaagcaggcttggagagtttgggctgatactggctccctcctccattctattcttaaagctcggtattttaaaaactctgattttttgaatgctccttctggatataattcttctttcacctggagaagtcttatttaggggcgtcaactgctcaaaaaaggt

SEQ ID NO: 62544 - DNA, 1519 bp, Cannabis sativa
  modified_base (78)..(81): a, c, t, g, unknown or other
aatatgaaaaaaattagactaaaatttttttctaaatgccgaaacaagtagagggtacatcaatatatccattttaannnngtgcattgtagaatcaccctacattatttgtgcacatatatattcatattattatgtggcgtggtagtaagatggaaaacactatagattttgttctaatttatttaaacattattaataaattgataatatataagataaataatgatataaacaaaataaaactaatccatgaattattggccaataagaataaaccactcgaattaatatttcctttaaaccaccccggacactgcccgggggcagctagagcaaataaagcattattaatgacaaataattaattaatgttatcacaatagtaccaccaaagatcttaattgcttattctgcttattaatagtactactctccatcttcatatctgatttttgctttaattaattaaattgtacaagtaacttaagaagttgtggatttcatcttcttaattatagttaatttcatatgcaccaagtactatacgtaccactttgaaactaataattaacatgaaacaagtatttgcataaatcttaattaaactttgaccaagtcaaagattatacaactaagagagccaagttaattacaaaactcaaagaaagtgttttactttaattcttaagtaaatatatgatatatgactttctatgtataggaacttatcaatacaagctatgattggataataaatacaaagaacccaaaaatttgtaaaagttacagagcttaatagttaggcctttatttatagtagtagcagtacaaagaagagaaaagaaaatacagttggaaaacagagaacagttacaacagaaagagtaacagactcttaactacttgactgtatcatcccccctcaagcgaaagggtgttacacagactttaagcttggatttcaagtaggcaaatttgtcctttgataaggccttagtaagtatatcaacaacctgatcaacagaaggaacatatcgcacttccaattccttggcaagaatttggtctcgaacaaagtgtaaatcgatctcgatgtgtttggagcgtgcatgaaacacgggaatagcagcaagagatgcagcaccctgattgtcaacccaaattataggagctgttaaggccgagaagtgtaattcagaaagaacataggacaaccacttgacttcagcagcagtgttggcaagagatcgaaattcactttcggtgctacttcgggcaaccacatgttgctttttggcggaccaagagattaggttgtccccacgaaatacagcatattctcccgtggagcgtctgtcgtcggggcaacttgcccaatcggcgtcaaagtaggcatgaagattgagttggaggcaaggcttgatatgtagaccttcatgaatggtgcctttcagatatcgaaccagcctcttgcaagcctcccaatgaacatttgttggggcatgaataaactggc

SEQ ID NO: 62545 - DNA, 531 bp, Cannabis sativa
gcgagttgaaggtgtgaattagtattacaaaattgagctactaagaagtttcaaacaaatgattccatatattgttaaatgcttaccagctgaacatgtttggtgttgccgttgatggttcaataccaagatggacatctttgtataatgttgcatcaaaatacccagcaaatcctacacgtacagaaaaatagtctcttttctgaaaaaacaaaccattacaagcaatatatatatatataggagttaattcaggagcataccatgaaccatggctgagccagtatcactgggtatttcaaactgcagtttcgtgtaccgattattgcttttttcagtagaatgatttggatgtgtaaatgtaaacacctgtgaaattaacaagacacaaagatatgggttggaataaaaatagtccaagattaattgaagggaaaaatctatgagataaaatgacagttctataactctgatccaagtttgtagtaattgtaagagactaaataaacaagcatgtacaaaattatataa

SEQ ID NO: 62546 - DNA, 776 bp, Cannabis sativa
agatgctcttagcaaacatgtaaattgtttaaccatacatttgatgttttatttcgatcacacattcacgtaatcatgacatgttaagttgtttgttgctattatagatattatcttttttatttattttatttcagtacgaatagcatcttttattttgatcacacttacatttaagtattattaattaacaagttcacattatgatcattaaacaggattaagattcagaatttaaattgaacttacttcatttttttaaaatttatatttatatatatggagagatatgaaatggtgacatgacattttaaaatttattattttttctctcattaattttctcatttatttattttttattagatttatagatatttatttattttctcatatcttttattttttttattattttaacattattaattatattaattaataatttttattcaaaaaaaaaattaatagttttgtttaaattgtcttttcttttttctaaaaaaacgtgcctgttttctaataaaagaatctatataatgtttatgacaaagcaaaatgtgtggttgtctttctctcattcaatttcaatccaacatcttagatattaaattctctttccctaaacaaatttagagtgttttggttggcttttcaaatcaaatgtccttatgtccaaactcaaaactcaaaagcataattctaaattgtttttgctacaacggatagcacaaagttttttttttttttttaaaagatgaaatatcaacttcatt

SEQ ID NO: 62547 - DNA, 965 bp, Cannabis sativa
agtgtttgaaagaacactgatactacttacaattctcttgtgtcaagtttttaaattttgtttatttctagtttgtttctgtaaaactgtgttccacactctgcagtgacagaattacattatgctactacagactgtgacaattaaatattttactaattttctgttataattattggcatttgtaaaaactcatttttctaaataaaagagggaaaaactaacatatggttgtgttatgtgtgtgtggccatttctgtgtatgccaattaaggtcaaagaccaggtttgaccttcttagtgtctgaattatattttgttgtgttatgttaagttttattcacaaggtatcgctttttgttaagttatattttctgtgagtttatgaaaatttagagacttcgaaatttttgttgaaggatcgttaaatcttacaattaagtttttcttcttcttccaatactttatcaaacttttactttttcaatttaatatatttagtttaaaaatattaattcttacctcaattttctctttttttttttttttttgtgatataggttgttcatcatgttgcttaatgctagaattagagaaaaactttgtggtggcccttattgtcagagagttccacattgttaatgtgtgaaaagataatagaatatataagatgaatgagctactcctcacattgctaattggtttgaagatggaattccattcaccttatcacaaattctaacatggtatcagagcaaaaacaaacaaaaaaatcctctaatgattatccgccaaaaaaaggagccaccaaaaatccaaaaataactgatccaagaaccaaagctaaaaaagccacttgtgattcaagaataatgagccaaaaaaaagggccaccaacccaaaaataccgatccaaaaagtagagcaaaagagtcacttgtgatcagggatagtgagctaaaaaa

SEQ ID NO: 62548 - DNA, 793 bp, Cannabis sativa
  modified_base (41)..(46): a, c, t, g, unknown or other
aagaaaactcactttaactctcaatatatatatatatatannnnnntatatatatttatataaaaaaataaaaccttacgatcctaagctaattctcaaaaaaatttggtctgacgataacttcatcacctgaagtcacctatgctcatctcatcacctactattactctctctcacacacactatatatatatatgtatgcatatgcttacactcatcaattatgaatttaggaaaattcaatcccatcatatatatgaatttatttatagctatgttgataaaaataaaagactaaattaaactctcactgaatttaaactaatatttatttttattgtgtattctactaataaatttgttttcaacatttgcttattaatctttattgtactttttttttcaattttcaaactttgtctctttatttttagatttgttacatatatataatgtatacaataatattatacataaacataactctatatatatgatgaaggagtatttgcagtgcaagaattacttccagaatcagcgaaaggggatcttgcatcagtatgctcgtggccagatgatgagagagaaacaatgatcaagtttattgagattaaaagggtaattttaaaaatttaaattgagttgtgactcgcaggtaatacaatcaagattttaaaaaaataaaaaaggaagtaaatagtaattttttttgtggttgatttagttaaattgtatagaaatttttattctttcatttgtagtggttgttttttttattattatttatttgttt

SEQ ID NO: 62549 - DNA, 1061 bp, Cannabis sativa
attgaggctcttgaacgtgggtggagcaactgcccttttgggcttgctaaaagacacaggcccatttgttgaattggacaattaggcctgttggttggttgtgtgaacacagacttgggcctaaacttaattgaaagaactgaaacgaacagtcttctcatccaagcccaatccaaatgtattttgcacatatgtttttttttttttttaatgaacctggagagagtgaaaatagattgactaaaccaaattagctgccacatggtggttagttacccccctaacaaacatggccctaattgaaactttggaaaaaatttatattattaaggtggcgtaataacacaatggaatgaagtaattgtttggtgactcttgtttagttgaatggctttaaactcagcttcaaggattgtaatggctcccccagaaataaatatacccactcttcactcttgtgatcataagttggttcgaaaatttattttaggccataacataagaattctacaaataaaccatcttctataatcaactctccatacattttcaactcaatataatatggaactaatcactaaatatgttctaatgataatgtaaaggaaaatttacacaaacaacttaaaattacactcttttttttaatggatatttggtttctttacattctgtttttttttttttaagtttttttacgtacattttattttttgaaaaataatattatttttacattgtagaaatataatataatgtagtaacaatatgaaaataatattttttaaagaacaacggtaaaacaatagtcaaaataaaaaataatccataaaaacacaaaaattcgtatttttctaaattttttattatttttgaatatttatagtaaaaccactttttacaccctttgtccatgatacacataaccaagtagtctcttattttatttattaatagagaaatgtaagtaaatgatcatatttctaactttataaatagttaatgttccttttttactttttaatacctaaaatactcttcattatataaaatgtattata

SEQ ID NO: 62550 - DNA, 1859 bp, Cannabis sativa
  modified_base (642)..(644): a, c, t, g, unknown or other
taaataaattgcatgttttgtggacttactgcttagataaaagagttaattattcagtgcttcaccttgattacatgtaatagggagattgggataatgactgcttctgcgggattagtagtttgattggaaattgaaattacattcattaataagaattaggaatgattgtagagggtggtgaataacctttaactagtttctcatatcgtagtctcttttttaatttatttttatttttatttatgttattttcttctaaacataaaaacctcattttctaactattgtcactaatttttgagtaattaaataaacatagccctcgtgggatcgacccttacttacaattatactaaaataattggaggtattagagataaatcttagtaaatttgttgtggcttacgacacgcatcaaatttttgggactgttgttgttttattttattattcatatttaatttttttctttactaacttgttcttctagttgtggttttaattttcagatctttctttagaaacatgatgatgtataatcaacaatattgtgatctatattatatctcaccacaagtgtatcaatatgatacctactacgacacttacacatgcaatcaacaatagggagattattcnnncacttcctagagtgggatcaatcaatatgttcaaccaacttcttactattctcctgtagcaccacaagatcaagatcattctcttactgatctgctcaacactttggtcacttttactactcagatggaacagaataatgcatagtttcaacaacctactcatgttgcaccatacagtaaaaagccaactagtgttgagctgattgaaatattagcagctaataccttgccatttcagcaaaacgttcatgaaactatgcagagccttcaacaatctctacaaaagttagagaatcttgcgaagtcaatggaaacatctatgatgaaattcaaagttcaaatactttacctgcacaaatagaatgtaatccaatggagaatgtcaaggccataacacttcaaagtagtgcacaacttgaattaccatcacacaaagaagtacatatgttgattccaactaaaggagtcaacaattcatcccttgaagagttatctccaccaaaatttgaatctcctactttagttggtccaccaccactaaaaaagccaaacaaactaattgtaccaacttatgtcactcctccaccttttccaagtagattgaaaaaatctaagaaagaggagcccatcaaggagatccctacaactcttttaaaatttgaggtaaaaattccatgtcttagaggtaatcaaagaagagtctcattgtgctaacattcttaaggagttgtgtccaaatgagaaaaacttgaatggaggtgaaaataagtgtgggggagaatgtttctgttgttctccaacgaaagttgttgcctaagacaagtacaatttaatgcacaattagtaaaaccaggtttaatcattgcatgatagatttaggagcagttcttaataatatgtcttattctaattttacttctttaaatcttggtccattaagagaaactcaggttttaattcaactgactaatcaaactaatgcttatcctttagggatagttgaagatatttttgtgtagacttatggacttgtcattccaggtgatttccacataattgagatggaagatgagggtgatcacaatcctacattaactttatttgggaaacccttcttactcactgcaagtaagaagttggatacgaaagcatggatacttagaatgaaatttgatggtgaaacactcaaattcaatgtgttagattccattgata

SEQ ID NO: 62551 - DNA, 1183 bp, Cannabis sativa
gagttaagaagaatttggtaaaaaatatctttggctctatcttctttaatgtaccctcctttaagttgagtgatgcaagcaatattatcttcatagagaactgttgaagttaatactgtttattgagtgtaatccatatgtttttggaatatattatgtcaatgatctcactcccacacattctctacttgcttcataaagtgcaagtatgttaacatgatgtaaagttggctcatcaaaaacgttgtcaagaaaattcagtgggacaaaacctgagctaagaaaaaaagagtgcaatatatatatttcatattcatcattatttgcaagttttctcgttaaaatccttgttaggaaaactcagtgggataaaacatgagctaaggaaaaagagtgcaacatgaatatgtctccccctcatgcacatatgattcataattatttttgtgataatatatatctcataagattattattatcaattttgaaatatcgtatattatctatgaccatatttactattactcttttagagtatgtgaagacttctaaattatgaatgaggggttccgagaacatcaatatttatccaacgaattgattaattcatgcatgtgtatgtacaatattgttcataccaaaatttgaaattttaagtgatatgaacataacacatatatgataatataaatttttatttttcgataattatggtactccaagaccatttatttgttccattcttgttgtatgatcttaattttcatatcaaatgatcatatatctataattattaatacgcatatgaagtacttcagggcttctctactaatgaacaaactatatacatttactatttcttaatacaaaaaaaaaaaaaaaaaagtttgtttttaaatcatttataatataatcaaaaactttttaagagtctatcacaacatataatttacgaatttatattacataggcaactatacatatttttcaaattataatttacttacatatttttatttcaaagatctttgtcatatagtatgcgcatttttaaatttatatcacttaatacatgtattcaatttttttagaatttttaaataaggcatacttcaaattatcaatatattaggagttctaaataaataattttttgttataatatttatgtgacacttataaa

SEQ ID NO: 62552 - DNA, 850 bp, Cannabis sativa
ccataaatcactatgtatataatctagtgttcccttcattcttctttcaccagttacaaatttgaccctgcaagatttactgaacacgtaatattcatagaaattaagttgttgaagttttaccttctaagaaaaccctattttattaatttatttagccctctttcactcacatggccaagtctcttgtaccatacttcagtttctgagttcagttgtttgctagacacacatgctttggtgttgaggataataacaccctcaagaggataaattccattatactttcgtactttcataaccaacatttaacctatgcacgctttgatcatgatcccattttcaatccttccaagaagttcttgatcatctaaaatccctgcaaagatcaaattccttttaagatttggtaccaatgtaaccctttcaatgccatcatgaagtttcagcctaatagttccaattctaacaatttagcaagacttgttatcaccaatgtaaatttagcaaagtctctaggctttaattccttgaaccaagaattgtttggtgtcatatcatatgaacacctagactccaagatccattcagagtctgaatttttagtggtaaccaacaatgtcccacttaattcataactatcactcatcacaggtgcatctccctgtgatcggccatcacgacacttctatctttttagacaaagtcttctgatatgtacctctttcttgcagtggtaacatctcacattcttcttgccatttgattgtgtccgagactgagactttgatatttatctcccgtttacacctttgctattttctctctttaacttcttcctctagtgaat

SEQ ID NO: 62553 - DNA, 1340 bp, Cannabis sativa
ggccatagcaattccatgggaggactggtagaccagtgttatggtattgacactgatgttattttattattttattttcatgagctcaacccgtgatggctctcgggggtcctcggatgctcttcaagagtgggtgaggaccttggaggagctgaaggatttcctaaaggagagatagagaatggtttctggcctggagaccatgcttggcgctagaaacacaaagaacatcgcataagccgccttcatcactgggctgcagtctgaccttaatgatcacaagcaaaagctacatgaggctcatgatggccatcatgccattagggaggagtacgccgacctatcttttgaacttacttatgagttccaatcgtgcaacccttgagctaatttattgtacatgggcagtgaggcttttgtggggaaaatgttggcccatgtaaaggcactttttgagatctagatggaggcaaaccaggtcgctgcctatcgagaggggtcatcagggactcatgaggaggagctggccgatccacctgtggagaaggtggccggccatggctcttaccactaggttggctagcatgttgatgatggggctgacctagactctgtcgatctcgatcatctcacgactttggatttagctccttctgcccctacacacatttagacagttttttcattagtagtatttgatattatgtttgtataatataaagagtaatttcatgttctgcacagcctgtggccttttatggtcagtggccttttagctttagaacactacttacttttatgtcctatgtggcctgtggcctttttagagcatttttttattttcatgttcattgtagcctaaggccttttaagaacagtacttcattttgagccccagggccttcatgttcgtatctttggccgtaagctctctgttttttaacactactattgtttggccctgatgcttttttatcatggattgtgtgaccgactaggcggtctttaatcctgactatctttttatggccttgacaagtaagggttcgaatttactttgccaagctgaagtatgtctagacgacttagaggtaggtttagtagcttatactaagcattaaaatttctctacataagttctttttgctagttcgatgcgttgtacagagggaccatgcagaaaagtctcttggtcacttgctattcaccaagattcagagactttgcgtaggttctgtcttttgagggtaccatagtacgcatgtggaactaaaagaataactttaagaagttaatttgtgaggaagtggtttagacataataaacagaatataaacatt

SEQ ID NO: 62554 - DNA, 1309 bp, Cannabis sativa
cataaaacccaacacaaacttcaataatttttccggcatcagtgacaaataaaactacctaaacaaataaaaatattaaatatgggatttgaaaacctaatttgcatatatatggcatattaaataccataaaaagacctaaaaacaaaaaaatatcatatgaattggtcaaacttaaaagtatcatatttaacataagaacttttaaaatctcatagtaagtgtaattttctcccatataatattgtgttaaatttggcacacaataaatgctactttttaattacaattttgtcattaatcattgaattactttaatacatacattttatttataatattgtgaatagtaatttttttaatttttaatttattgtttgtcattaatgatattttgtgttttttagactaatttacttcttaaaatgttactgtgcattggagcaacatagcaaatattatggtagatataaaatttgttcattttttgtgtcaaatttagcacaatatttatattttacattgaagatggtctaactaaaaacttaaatcacaatctacatagcaacctaagtagaaactactaaaatacaacccaaaccattaaaaaaaaaataataaaataaaagttatatatagaataatatcccaaaattaatggaatggtaatgtgaaatattaacatgtttattatgagattttaactttagaatattattctctaagtaatatataattaataaataaacttaaataacattaatatatattatgatttattatataaaaaaattattgtgatatatccttagtttgtgagaactttttttaaaaaaaaatgaattatttttatgttattataataatatatatatgttatacataaattttatgtagataaatataaataaatatgataaggaacacaaagaaatgacatactaataaaatatatgaaaatattcatttaaattaataaaaaatataataaaatttaatatttactaattaataaatatatttctttagcaaataaatatttgatttttatgtataattaacattaaatacatataataaaatatttttattttaaaatattaaataatatataagatttatgtgctcaactaaataatataattcaattaactctaatatgattacatattaccctacacaaccaaacacaatttacacattttcctacaattatattctcctttataatattccctataatcaaattaatttcaatacctcataacaaaggacccctttttttctatttatttatttattatttttt

SEQ ID NO: 62555 - DNA, 1233 bp, Cannabis sativa
caataacttgctttaggccaacaagtgaggccatgtggaatttgtcagactgtgggacaggctactgatacctatcctacactatttgaaaaggagactgaagagtgaatgaagtaggtaattttcctagtcaattaaaccagctttatgacccacactccaaacttatagatctaattggtagattaatccaaatttttgctacagcaatcaatttaatttccagcaacctacacctacaaaatctagtttcaattatcaaaaatggacacctacaagacagaatcaagcaccacaagctgcccaaccagcaacttgcaacctaccactgaagaacttattaataccattgttgctagttctttaaggttccagcagacaactgaagcagcattgaaatctttagtgaccaagtgggctaactctcagaatcttataaccgattgaaagctcagttttacaatcaatcgccatcccaacctgagaaaaatgataaggagaatgctagtgtagtgaccttgcaaagttgtaaacaatatgacccacctatcatcccaaaacaaaatacagtgccacccaaaccacaagattataggccagatgatgaaagggaggcaaccaagccaaacaatcctgtcccaccaaagcctacctttgtcatgccaccacctttcttaagtagattgaagaagactaagaaggaagaagctggcaaggaaattcttaagacattacgcaaggtggaagtgaacattcctcttcttgatgacattaaacaagtgccacaatatagcaaatttctaaaggatctttgcaccaataagagcaagttgaggttaatgataaagtaagtgtgggggaaaatgtgtcggcagttctccaaaagaagcttcctccaaagtgtaaggatcctagaactttcaccattccttgcactattggtaatactgggattgagcgttgtatgttaaaattgggggcctccattaatgtcatgccattctctatctatcactccttgaatctgggtccacatgaagaaactgggacaatcatgcatgtaatgatcgctttagtaatttagattagtaaaggcaattagcactaatttctgatattttataattagtgatgaatttaattatctgtgggccccattgttagaaatgggcattacagttataatttctcaattctggagattttattaaactttaggggtattatttgatt

SEQ ID NO: 62556 - DNA, 1206 bp, Cannabis sativa
atttagtttttagacatgattgagtgtataaagatcctattaaacaaaatcctgtttcaatttataaggcaaggtattattctatatgtagctttattactgctactttgggacaaaacccaagctttatttggagaagtatctttgaagcccaagagttagtgaaagctggtgcaagaagatcaattggttgtgggaattcggttagtattttgttggatccttggttgcctgatatgcagaacccttatgttagctctaatcatcctgcattggaggggcatttggtgtcaaatctgctatcggtagggtcgaaacagtgggatgctgaagtggtgaatgatctttttaatgatagagataaagaactcatattctctatccagctaagtgatagtgtggtcatcgattcttggttctggaataagtcttcaactggtttttactcggttaagactgcttacaatgcattgcagcagtctaataacaccgtgactttagaagctgacagagatggtataagaggttgtggcagcttgatattcctcctaaggtacatcattttttatggcgtgctacttcgggatgtctttcaactaaggttcaattgaacacaaaacatgttaatgttgagattatgtgcccatcgtgtaacttagccgaggagactatcttccatatacttattggctgcggttttagtagagcatgcgggaacctttcttgtgtcaatgctgctgctataagtggtattgacttaacttgtagttttttagcttgtttgattcgcagtccaatgatgttattcgagaagctgcaatggtgagttggaaaatctgggctgttcgaaatgatattgtgtggaatggaaaaacttcttctgctgtagaagtgatgcgatcaattagaactactcttgaccaatggattagtgctcaatcacaaaaaataggagcatcgttagtagatgatattaacaatgttagagagcactggaagaaaccaatgttacatatggttaaggttaatgttgatgacgctatctttcaaccagagaacaagtttggttatggttgtgtggcccgagattccaatggtcatcttattgaaactatttcgggaagccgttttggcttggtgtaaccagaagtagcggagataattggcattaaggaggctttaagttggataaagaaaaagcaatgg

SEQ ID NO: 62557 - DNA, 3318 bp, Cannabis sativa
tctctctctctctctcaatttttcactctaacttctttttctactgtgttgtgtctctcttgctattgctcttactattctcttatgaaaataagatgagtagtcctctttatatagaccaaagaaccccatatacttgctgtcatattttacagttaagttagttaatgaacaactaactagctaaccgaatcttaattgagggtttaaggaacaatacttatttttctacaacctttctgatcttgttatttgaattacatgtgagtgaaggcatcttttctcctgcgtttcaatcggtttatgggctggccttgttattggatatatcactgagtactataccagcaatgcatacaggttcatcatcttcttcatgatcttttaacatgttcatatgtgttgtttttcttcgcttataataataacaatgcaaattactatgttgatcttgcagcccggtgcaagacgtggcagactcttgcaggactggagccgcgaccaatgtgatctttggcttggcacttggatacaaatctgtgatcatcccaatatttgcaattgcaattgccatttatgttagctttagcttggctgcaatgtatggaattgcagtggctgcacttggaatgctcagcaccattgccactggccttgcaatagatgcttatggccccataagtgacaatgctggaggaatcgctgaaatggctggaatgagccatgagatacgcgaaagaacagacgctcttgatgctgctggcaacactactgctgctattggcaaggtgacttaaaatgaagacttctttgccttcttatcacaaaactaaatcgaacataatcatgttgtttttccttttcagggatttgctattggatcagctgctcttgtttcacttgccttgtttggagcctatgtgagcagagcaggcatacaatctgttgatgtcttaaccccaaaagttttcataggactaattgttggggccatgcttccatactggttctcggctatgacaatgaagagtgtaggaagcgcagcactgaagatggtcgaagaggttcgtcgacaattcaatacaattccagggctcatggaaggcacagcgaaaccagactacgccacatgtgttaagatttcaactgatgcctcattaagagagatgataccacctggtgccttggttatgctcactcctctcattgctggtaccttctttggtgttgaaactttggctggaattcttgctggctcacttgtttctggtgtccaggtactattcctaacataagcaacaatatattaccaaaactcgaaattttcttaggttgcgtttgattgggggtatgaaatgaattggatggaatagaaagaaaacaatatttattctatttctttatttggttgaatttttcaatacaatgaaaaataatttaataaattttttattgattattttttatacatattaaattctattctattctaatacttatttttattcgtgtgttttcatttctcctgaccaaaagtaactttaagatacgtttgattggaaggaacgaaaatataagatttcagaacaaaaatgagaatgggaatgaaattaaatttaatatgcatataaaaaatagataaaaataatattattttttctttttcattttgcattgaaatgacattttcatccattttgaaatgaaaagtcattcttatttcattcaaacacattaagatgtagccaaacaaaaaattagaatgaaatttgaaatttaatcttttctcttattcccaattaatatttggttttgtataatatgattttcctctcaggttgctatctcagcttcaaacacaggtggggcttgggataatgcaaagaaatacatagaggtaaagttcttctttctttttttggttcttctaacactttttaagttgtaacatgtgaatataagtgtgaagattttcatgtaatgtaaaattgtaggctggagtttctgaacatgcaaaagcattagggccaaaagggtcagatgcccacaaagcagctgtaataggggacacaattggggatccccttaaggacacttctggtccttcacttaatattctcatcaaacttatggcagttgagtctttggtgtttgctccattctttgctgctcatgggggcttaatcttcaaatggctttgagtagaagaagcaaccaaacaattagcaatataataataataataataatattaatactataatctgttttaacttagagtgtacattaatgttcactagtaaccaagttaaatctcaaatggagttcttttttccactgttgtactaatagtattatttaatttaagatgtaaaatatatatatatattttttaaatttgcaaattttagtatgatgagaaaataatatatattttaatatgctgtcttgcactgaattctttaacttaaattacactacttatgatgatgaggcctatgtatgtatgtgtgtctatataatgagtttacagcttcatatttcttagttatatatattattatatatttaatatcctatatatggtgactgagaagatcatcatatggatatacagcttacaaatatattattatatattaatgtattttcaagtcttatcttatgtgaatagtgaatcacacacttgcaaacctaatacactacaaaaaaaaaaaggaaaaaaagaaaaagaaaagggtattgagtttttgttttgttctaatttaaaacaattgatttattaatagataccattattgatttttcatggccaagtttggatctacaaaaaacgtggagtaacatttgtagctagttatgggctatgcccattggccacttgccaccactaaacaatactttagaagaggatggtccactacccacacactcaaaagtactcaactttcatttaaagtaacatttcactttaaaagagaaaatgcatttatttgcatacttttctctttctttatttctttgagtaactccaaccaaaaatacaataattgtgttgaaccaacacatgaattaagtaattttaacactgtattttttgaatggtgatggctgattttattaaatcataatctacgtcataaaaaacagatagcaaatcagttaaaacagactctaaactaaaattacgactatagtataaaattcatactctaataaaactatgaacaattacgttagctgatcgtttaacaaaaagaataaaaatatttctcaaagaaccaagcaattgtttacagtctttaatagcttgaccaa

SEQ ID NO: 62558 - DNA, 898 bp, Cannabis sativa
gtgccttaaaatgccccaatcagtagaccgattcccaactagaaaactggttctatgggggtctgctagggaaggaactagaattccagttcctataggtccatactaaaccagtcgacgggttcagtgcaggttccccaaaaaactttctaaacaaatcaaatcaaccccaaatgaagccaaatcttccaaaccacctatttaaaccacaacaagtattactcaagcaataaaacctaataacacccactgaaatacaaatcaccattgaagagcaaagtttgagctctaaaaatcaaaccttgttcaaacacaacaccaagtatcaattgtaacttaaatcagctcaataaacctcaatttaacttcagaatacacaaataattccaaacaatacctacaacaaccttaaactcaatttcatgcacaaaacccaactccaaacatgaaaattaaaggagaagagaataaagaggcttaccttgagttgaatccctaaagttccaagtaaatttctacttaaactctcaacaatctgagctgaaacccctacttgctactggtcttcctaagggatcaagagagagagtgttttggagagagaaagtttatttctaactttaattatgtaaaatgataaatcttacgttttatctaatactaaacctaataaatcagattattatctaatactaatcttctaagtcactaaaagataaagaacaattcaaggcaaaagaccaaattaccttgcctaagccaaaaagcatccttgccacctaagggtatttttgtcaaatctaatacctcgaatattcctacattcctaatatctatttaaatttccccgctgttactaaaatactaaaccataaaaaaaatgtgactctatcggcca

SEQ ID NO: 62559 - DNA, 778 bp, Cannabis sativa
ggatcctccctgataaccaaaccccgcagggcattaactgcccgaacttgccccaagccccgacagttccaagacaaaagcttaatggggatttggggggcatgataaggcccgcctcctcgaccgtctgaaaatcctcattccgaaccacactatagtgtgtcactcgtcccttctgaacattagcatccgagatatgagaggtggaacccgagatttccaccaggacctcccctgtgacttgatcagaattttgcataaaggatttgtcattagacacccccactgaaacctcatagagaccatcatcatgttccaaggccaataagctctctgatttaccagcgttcttcttgattttcctcggacgagcaagttattggaactttatactatcatcactttttctttcctaactcttctcgccaagatccctcgagccataagaggtgggatcagcagtacccccttgattactaggattcccaatagtactcacttcggcaaaagcatctgggacgcccacctggttcaccaccgcaatatcagatggagcaatagaattgtctcctaaaaacggataacctccatccgaagtcccagatttcttgtatttagatccaacctgctcaatgagttgttccgaattaaccccaaaaataggatttttaggaataccccggggccccgtcatctttagaggaccaaatctagtcttgttgcgggtctgaaaagacccagacaaacgattacacttatccccctttgcccgagaatg

SEQ ID NO: 62560 - DNA, 545 bp, Cannabis sativa
ttattattatttaattatacttactattactacaaaaatagtcagccaagacaaaataaaaaaaagtcaaaccctaagcctaaagatgacaaatttatccttccttaagtaaccctaaacctaaatcacatctagggtaatttagtaattccaactaattcgccaaaccgacaacctgaaattctaaactagtccgaaacatttctaaaataatccattcctttattgtcgtgacatttctaaccactccgccgaacttccaccatgacttggcccgaaaatattttatttcaaaaatagttttcatgacacccacacattataaaataatctccgtaattaataaattacgtttatttaatcaataattaaattcactctaattacaccaagtaagatcataatcttactccattactaaaataattacatattttataaaatatgcctatttatatactatattaatttccaggatattacaactttccactgtgttgacaacacaataagcaagaatatcaatgtgataagaatttggatga

SEQ ID NO: 62561 - DNA, 897 bp, Cannabis sativa
tttttttccctaatttataacatccacttaaataatctttagaagttaattactctttttttttttttttttgaataaaatcaggagatttattaatgaataaactaattcaaaacaatataacgtacttcatcagaacagtccttcaacttaagcacacaacttgtagagaaacaagagtctcttgccaagtaatgagccaacttgtttgcagatcgtttaacaaaacataactcaacaaaagataaaaccaaaagtaaattcctaacatcttgaacaataagaccaaactaaaaatgaaaaaaaaattcatgaaaatgaaagtagtgtggccataaagatatactttttctcttaataagaaagtccttttgtatatatagtaatttgaactcgtgaactttattttgtgagaaaaaaagtgccaaactataaattataaattataatcaccaaaaaattctaaatttaaacactctaatgtcaataataataataataataataacaacaacaacaacaaaagaagcgtcccatctaatacaacatgaggaacaagaaggttgattgagagggcttcggtttgggagggggggcttgtcggtgtcccatttgttttttgctgatgatagtttgatctttatggatgctgatatggggagttgccagcagtttcagggacttcttgacttatactcggcggcatctggacaattggttaactttcataagtctgaagtatgttttgggaggaatgtggataggggggtgaggcaacaacttgctgctttcttaggggtccgagaggttgaacatcatggtaagtatttggggttgccttcttttgttggacgcaacaagaaggaatttctagatcaaatcaagaacaaagtgtgg

SEQ ID NO: 62562 - DNA, 1800 bp, Cannabis sativa
gatctttattgaataggaatagtcagtagtacacaatagaatgagtccaaaattacaactcaacacagtaaagtattacaaaaaaaatgtttcacattgagggaaatcactttaagagtgatactcccattacatccctccacacacactcactaactatgatcttggactctctctctctaaactaaatctaaagtatgggcttttggagattagagatcagaactcttctcccctttgagaatagaggaacacctatttatagttattggcggggtcccttttaagttgatattaaagacaattgttataactagcaccagctttcttcagattcatctgatgagcaaatagatggacatacagacttgacaagttaagtgagtgttatcccaacaactccacttgattagactcacttaaactccgatccaaaagaaatgagtgggaacattaaatgtcctgaatgcacaagtttagacaatgcctaaacttgtctctagttacacttttagtgaaaatatcagcagtgttatcatgtgtgcttattttcttcacttgcaccttcttagatgacacaatatcccttatgaagtgtaacttgatatcaatgtgctttgacttttcatgaaacattggattttttatgagatgtaaagcattttgattgtcacaataaactgtgatatccttacatttgaaacctaactcctttgtcccttaagctatatagcctctttgatggcttctgtagcaactatgtattcaacttttgtagatgacaaggctactactttctgtaggttagatttccaactgatgcagcccccaagagcagtgaacaaaaaccctgttaggctccttcttgtgtctaggtttgctgcaaaatctgagtctacaaaaccagtgatttcttccttgaattgtttcttactaaacacaatactagtgtccagagtacctttcaggtacctcattatccatttcagtgcttcccaatgttctgggcctgggtctgaaatgtaccaatggaccacactcattgcatgagctaagtcaggtttggaacacaccatggagtacatgagactcccaacacaaccttcataggaaacattgctcaacttggctctttctgcatctgtttttggtgattgagatgcaaaaaacttgacgtgttgagcaagcgctgttgcaactagtttgtacttgaccatgccaaacttgttcaatactttctgtaggtaggcagcttgagaaagtactatcatgtcaggcttaggtctctttatgtctatcccaagaattctctttgctttacccagagctttcatctcaaagtcatcactgagtttcctttttagcttgtcaatctctgactttgctttgctaaagatcagtatatcatcaacataaagtagcaaataggtttgataattgaaatacacacatgagtcatacttacttttagtgtatccaatattctgcatataagtgtcaaacctcaagttccattgcctaggtgtctgcttgaggccataaagagacttcttgagtaagcttacctcatctgggttcccattgccaaagccctcaggttgttgcatatagatttcctcttctaactcaccatgcaagaaagctattcttacatccgtttcttcaatctctaggtccatgcttgctgcctttgccatcatggcattgattaaagcttgcttaaccactggagagaaaatctcattgtaatcgatgccttctttctgagtgaaccccttggcaactaaccttgccttgaat

SEQ ID NO: 62563 - DNA, 1028 bp, Cannabis sativa
agggtgacctgtgccattctaccatggcagagatctccaaaactagagagcacagccatttccttatggcacaagtcacttaaggcgactcctaagtcgaaaatgacttttctcacttctcctgtgctccatgatgtcgagggaacccgtttgaacatatttccttccatggtttgcaaggagtgacctatgccattctcttatggcacaggtcacctaaggcgactcctaggtcagaaatgacttttctcacttgtcccgtgctccttgatgtcaagggaactcgttcgaacatagttccttccatggttcgcgaggagtgacatgtgccattctcttatggtatgggtctccaaaactagagagcactgccattttcttgtggcagtggtcaatttattccctcttttcttgtggttttagtgctattttgactttatacataaatccatgtcattttcatgctcaaacaagtcaagtccttattggtttccttggcgaattgaggtctctagagcaaaaacactcgcgcagcccatgaaccctagtttgggcacacttgggtgtgtgagtttcagcgctaaatgattaattgacgtttttaagccctctagaagtgtcatggggccctcaagaaggatgccttgatttatttgacatttatgagtcttggtcaaagtcacaaagttgactttagtgtcttcaaggtactcttagcatgtgggccattgtgcaagagtagccattttattttattttttttgcaaaaattaagtatagcagatgtatttttaaatttgcaaatttgctaataaaacaatatgaagatcaaccgggataaaacccccatcaaaccgacgacctaaaaagaataaccagtacgaggcaaataattgtccgtcttatttacatattatttaacaaagataatataagtaaacacttacaattaaaaatattcaacctaaacagtaaattcattcgaagtgtataacgaattgcacgtacaagtacatgacggtccgttt

SEQ ID NO: 62564 - DNA, 3500 bp, Cannabis sativa
caaaacctactatatcacttcacctcaaaatatgtaaatatatatattatatgaaagtgcaagaccaatcaattatagtgggcttcctctacctgaacatttccatgaagatcagttgtagtacgagaaaatatgacctcaattatgtaaagaacaggcttcaatgcaaatgtaagctcatcagagtgatgagtttcaataattttgtcctccaacaaccttgcattgtttgagataatagaatgagttgaaactccctctcctttggactgcttaattaccattttggttgctttctcaaaactagaatcccttgcatctgccattacatgttatttcattcagaaaaaactagtgatgctgtattttcagaataattaaataaataaactgtggggctttaactcaatctcttttgtgtagaagaaattttgccaatgaaaaaagaaaaattaaaaacactaaaagatagagtcttttacacaatcagtgacaacccatttgattggttgttttagaactttctgaaattgttctcagcaagcaaagtaatatgaatatattcactcttggcagagacatttgtttaatagtaacaacaagtttgcacactgttaaatgtagtcaaatataaaaaaattcatttacgatgaagctgaatgagaatccaaaaaacaaaccgtgtttaaagcttccataaatgaatatatatgagaattgaagaacaagatatgctttttgtattttattgaagaacaagatatgctttaaaaggaaaatgaaaagcaacgtaccctgttagagtcaattgaagcgtaaaacatgtgaggaaaatgaaaaggaaaatcctttgggaaacctatcagaaaaggtgtattgtaggcctgaagaaacctatttgccatggacgccatgtccccaatgttggctctcgattccccgcaaaatagttggaatagctgtacgagaagccagttaaggttgagagtttgagtagaaaaaaaaaataatcgtctttgaagattgacccatgatgaagatgggtgtgtgtaaattgtaaacacaatcgaatagtttcttcacagttgtgtgtgtgttttttttttaagataaaaacacagtaaaatgaagaatttgaacctaatttggaccccaaaaaaaattgattattgttgaacctcatgtccaatcattggaggttaaaaaagatgttgtaattaataagaattatttgtgaaagaaaaaaatagatgagattattactaactcaaaaatagtaaataatattagagaattcttaaataatttacactgccaaaaaatatacgattatgaaaaaatcaataattaaaatagattattttggttatagcaataatattttgggagaaagaaaggtgtatgataaaagatatggattgcattaacatatcagttcacacattatcaaaactgtctaacagaattatattcattgcattctagaagaattatttatggctgaaatgcagtacagaaagagcctgaaaatattaaagcaggattagatgagtgtacagtatggtgtaccagattttatttcaaaattaattgataatagaaagaatagtctattcattttatatataataatttatttttatacattattaatgtgaaactaactctaatatatattttttttgagcttgaaaagtatgtatataatgaacgacctttaaaaaattacagggccgaacgtgacattttaaagaatcacacaaaatttgtgagtgtacacatcatgaaatttgtaaattttaaaataggtcaaaaactcaatactgaaaactgacaaattgcttgaactcacaacgagaagttaaaggggaagcaaccaaagttttttttagtttggctcgttttttattttttttttttggactagcggtattttgaactcacaacggatcacaaacgactactagaaattagaataaaagcggctatagtgaatggtaactctaatagtgatcaccacattaataactatgtaaatacttattatttaagtgtgtagtagtaatactcagtactcaatgtcataattgtatgaaccaaaaattacgttaacaaaacaaattattctgtttcgagagtcagaaattagagcggcctaaattaacaactcttaactgactttatttataaatgacaaacttcttccatggtagcttgcacttttcacaagctctcatgtcttccaccaattcttcttcttccccataaggaatggttttggattcatgaccacaaggctcatcacttagtggagggtcaatggctgttctaagtgcacctaaaaatcccaactttcccacttttgcttcccactccagaaacctatttaagcactccatcattttgctttcttcaactctaacaatgtcgtttgaagatcctctccctatagccacccaactcttgttgctattttcattattgaccagagctgaagcctcttgtagagcttgatctgtatcaagtgagtaaccaagcttgagttttgatcttattatactttctaaccgaagccagaaagaccttcttttggttaaacataaagaaaataatgagtctctcagatctccctcttgaattaaagatagaaatttctgtatcttttcactttcattccttgtccccacgtagaccatctccagctgaagacctgagtttataatcttcttaagctttgagttaaattctagtatccaatcaatgtcttcacttccataaatgcagatgtatctgttttcattcacctgaaaatgaagtcaaaggtttaatctttaagcatctatttatatagctttggtaaatacatgaaaaaaacagagttgggaaagttgaatattacccaattagtaagtaggggatcaatttcatctaccagaagttgaagattccagctctgttcttcccaaagctctttttctcttgaatttgaaaaagggtatgctttagcaccccagataaagatcaaatctaatgcatttaagtttgagaggtttccttgtgtgtctagaacaaccataattgggtcatctctgtagttccattcttgtttgataaatgtcaccactcctgagttgagtgaccatggctgctttattgaccaccaaggaatagactgtgacagaactctgaaacttctcttctcagcatcagtccaagaattagaatctggaattggaatccacacaatttcatatctttcctctagtatttcgttgtaaggattatcacatgtttgctgaaccaataagagtaactcttctataggtaaaagctctggctttgtgatcagaagtaagaccaccttgtttttaagttctggcaaaccaagctgtcaatggacagaaataagaaggttaaagtagttaagcaaaaaatgaaactgacatagtcatctcaaaccaagttttcaaatcttggaaaaagaaaaagcatacctttac

SEQ ID NO: 62565 - DNA, 1144 bp, Cannabis sativa
tgcacttggaaccagcttcaatgatccttccagcacagtccctggctacaaaaccgaccctaaaagaattgattgctgcaaatatagctccatccacattaaccttaatcgtaccattaactggtttagtccaatgctcaacattcaacccttggttattctgtacaaggattggatccaatcggtttttctaagcatataaccattgattaaggtaagatcttgcttcaagaacaatattagcagctgttttgactctatctttccataaaacatcatttcttgcactccatatttgccaagcaatcattagaacttcagcaaaaaaattgttggtactgctacgggtgacagcagcataccagtctcgaaaagttgttgttgttgccggtgtgatgtcaattgcatatctattccagcacgaaattgcaaaggggcagaggacaaggacatggagaatagattcttctgtattgttgcaaacatggcatgaattgttgacataaacatgcttagtttgaagttgtgtacgagttggaaggcttcctgaaatagctctccaatcaaaatgtaaaacttttggtggaacttttatccttcagtaactcttccaaaagtctccagcctgtagagtgtcatggtcaaattgatgcaagtgcgtatatgcactcttcactgagtagtaacccgagctttcaaaattctaactccgtcgattattcaagtttgtatcaggaagggaaattcccaggatgagtgcatgatccctttcattgaataagtcattaactgcatcagcatcccaacttgattgatccacttgcagcaaacttgcaaccctgttgtcagttaaggcaagatgtgaagaagtaatgtgcggttgattcatgtcagggagccaagggttgttggtgatatatgtatttaaaccatcgccaatccgaattcttgcaccagcaacaattagatccttggattcatagatgctcttccaaataaatgaaggattatgaccaagagatacagataggaaagagccattatagaaataccttgctttgtagattttgcaaaccaaagaatcttccttagttaacaatctccacgcttgctttcccagcaaagctaagttgtactccctaaa

SEQ ID NO: 62566 - DNA, 669 bp, Cannabis sativa
ataatgatgagagcttaggggtaattgatggaggtgatttttacgtgctttaggcattaatgagtcgtagtccacgagtctctgttattaatgagagtatttcttacagagaatctttgtgttccttttgtttttccatccccctccttattttttatgaggggtatttatagagattggtgggaagaagaaaatgagtaacttgtctttaagtgccaattatgggcatgcacaattttccagaaggtacaaaatagggcatgcataacctacgtagtaggctgcgtaggtgtgggatgggattagccctcatttcttcttgattaatgtgattctttatgatggagccgtcattagctccattagctcctttgattatcgtgtaatcgccctaaattaggtttatgatttctgacgcgtcatcatatgggcgttcctagacattttcttcatgctgcattaaatgcaaagtgactgttcaaataattcctttctagcccagagatgcctatctatgtcttgactctcagaggagaagatgggtcttttgttcatgtccgagaactagcatcacgaaccatacttgttgtttctttaattaaacttaactcttctccgggtggcctgtctatgtcaatcacatgccacacacaacagctgccacgtata

SEQ ID NO: 62567 - DNA, 767 bp, Cannabis sativa
gagaagaaagaaattgatggtggaatgaatctgggctgtcactctgctctttctgtcttccttgactgcttgtaggactaaaattctcttctgcctctctttttctcgcagtctatcttttatcccttcaggtaaatctaatattaaaattagttttatttaggcacaaaagctaacacattacccactaactaagggggtcgaacctctataaaagtccttgttttcatttacttttgagttctaattgtgtaacacatgacaagcatcagtttaatatgaccgctatgttaattagccaattttcgaggtctacacataacatagacgccattagggacaatattgcaaaatattgctatctgtcaataaatatggagaaaatttttttacatcaaattgccaccacaaaattcaagcccaaacacataaaaaccaaaaattgaacaaatttccttaatctcaatcatattcaacaaaaccaatacaaaattccaatgcaaaatctaaaaattagaagaatcactaaaaaaaataaacttaccaaaaactatgagaatcgtgggtgggtgaaaatgggtcatcatggggtcatgggtcattgtgggttgtcttggatgcttctcgtgggtcatcgtcggtcatgggtcatcttggtgcttctcatcctgcgtggcggtcgaagttcgtgagaagggagagggttagggattttgatgctaggttggggattttacaggtaggaattttgagagagagagagagag

SEQ ID NO: 62568 - DNA, 1643 bp, Cannabis sativa
  modified_base (347)..(356): a, c, t, g, unknown or other
taaagtttctcagagaatatggtccttacaacttttattttaagaatctaataatgtggatggctagaaacatgatttacaattatggaatcctaacatccctaatagatcgattggtgttccctttaagtgttaattctagaattaaaatgctgtgcacaaatttagatgggatctaaattatacttccactagtgaattaatggtactaaatgataaataagtaactagatgggtaaaacggtaatttgaccaaaactacttacgaactaatacatggaggctaatcactagaattgattatatcaatgacactacaatgaaactcagtaaatataattctatannnnnnnnnngttcaattccatatttatagtggagtaatcatagaattaataaataatgattatttagttgatgagattcaataaataatctagcttattggagcttagaattataggtccatgattcccaaatcaccaccttgaaacactatcaagggtagtgctatacccgaaatttggctatcggttcaaaggaggacacgtgttgaactgggcagaatatgaattaacaaatgtaatgataattatatttgaaaattgaataactcattaatgctgaattgatagagtatatttacaatttactgactataaggtcttatgtgagataaagatacaccaactattgcctcattcattaacgagaaaccatatgacttcggatgtacaaggcgaggtatcaacctcgctacgcgttaggagacgagacctggtgactggtaaaacacttaatgtataatacaccttatacaggccaagtataatagtcgggtaaatccaaacagctaatagcgaggcacccatctcgttataggaaggcacgctcatgatatcttcactaatcagctccagatacctttcactggggttcatggcctcgtcgagtcaactttcttagacaaaagctgacatacaaatgatgttgactactgaggtccaccctgtcaactagaactgtgattttcagatgaagcattatgtcttcaagcgcaggaacgacgagacttacatcatccacctcggaaagatatgggaaaagctccagctcgctaccaaggttattattgctgtgttcccagcgagacatcccagaatattacgatttataacgtatttaatacatgtttatattgacccggtaatagcggacccatcacaactgtgcgatttttaaatattaaccacatttattttacgtggtatgtaatcgaactccacgatttcaaggaataattgttgtaggatatcagtcaactatgtaattaactacccattaattataaataggagcaagttacactgaaaaggggacaaaaaaaatattagagaaaaatggcctgagagctgtatcagaaatctaataagattgactcgtgaactatgcaaaattttaactgcaaaatcacgtaaaaaccttcgtgttcatatctttcttttgctacttttgttttctgtgcaaatctatcactacttgggctcaaatatagttaacgaaaatctacattaataactaggaataaagagtagtataatgatgttcgaaaaaatctattttgaattggaaaaatagtaatt

SEQ ID NO: 62569 - DNA, 779 bp, Cannabis sativa
cagaatgaacgcggtcaagtggacgtgtggtctgagaagtgtcttccaccaggaactgtgcatttaaggttgccaagagtattttccattgccaaggagctggaaatcgattatgcacctgccatggttggctttgaattcagaaatggtcaatcttatcctgtctttgatggtattgtagtttgtgccgagttcagggatgtgatactagaggtaaccacattgtcacattaagagtgaattctggttcttgttttatataatatatatatgtatatatattctcatgatccgtcaatgtaattaattgttaagtttctttttcctcttttgcattctttaaatcttagtgccatccattagggaatattaaacttacagccggttaactatgtatttttggtgaatgttttttgtttttaatgtgaaattctgatatcagtgtctgtatattgaaatagttttgaatgcaattcctttcacatagaagaacaaattctgaaactaaactagtttatttcctgttcaggcatacaggggagaacaagaaagaaaagaggctgaagaaaagaaaaggaatgaaagggaggctatatctcactggtatcagcttctttcgtccattgttacccggaaaaggattaaggaccgttatgggaaaagtttgtcgtcacaagcatctacagacatcaaaactgcaagtaatatctcaaatgtgcatgtcagtgcagatcaggctgttaaccagtcttttagatgccaggaaggagacatggaca

SEQ ID NO: 62570 - DNA, 980 bp, Cannabis sativa
caacccctttttgccaacacatcacaagtaaattctaaaagtgacatttcttgtagtgttggcaatagtatcttctcctcctcgagaatattatatttgttgttagaattagttatgctttgttttatgtaatgccactttggaacagtctaaatggctcctattgtattatactatacctatataatctaaatcaatcttataatctaaacctcaaccagtgagggtcaaatttatgacttcacatatatataaatatatatatttatatatatatttgtgatagtattattaggttatgcaaagagttaatgagggtgtttggtataagagtattttggtggattttataagttgagaaattaagggagagtctcaaactcatgtatgaaatagtttgagattagtcaaaaataaaaataaacaaataaacttaaagatggaccccgcaaatataaaccctcctctaaaatcgtacttaaggtttggtttcatattatcatattttcaacactcaaacctcaacttaattataataaagagcacatatatattaaaattatttatagcaaataattatatataggttatatatatatatacatactgagagccaagtctttccccaagaaggtatgtatgttgcaccaccatgattaagaatccattgtcttgctttttcacaagtattgtcttcaccattattggatttttctcctaataatattctcatacaaatatagttgagaactgtgctaaacataatacttttaccttcaacatgcaagccccatccaccatcttcattctacacatgaaaacaatgagtttttatagtataagaccattgaatttaaaaacataatctcagcttataacttaatatatgcaatcaaaaaattatataatgtaactacctgatgataatatgtataacgaagaatttctttgcaatgctcagggcttaaaatgatatttag

SEQ ID NO: 62571 - DNA, 1033 bp, Cannabis sativa
accaagtgtaacatttacctaccacgtattgtgtggtgttgtggtagggattacttttattggcatcctcccttgcttgggtcaagggttcgaaatctaccccagccccctttggaaagggatttaagaaaggcttggtccttgttggaggtagtgttatctgtgttatgggaacccttaaagtgactaccgatgacccaattaaagaaggctgagatataagaccttattgctaacacatggtccccaaaattgccaaaaatgactaaaagagtgggaaaagaatctgcaccacgtgatccccttcttttcccaacaaaacaagtgtaacatttacttgactattatttttagttaagtgatataggttagagaaaaaacactaaaattgaagtaaagagattctttccataaaaaataataataaggcttttgatatggggtttaaattggatgaaaatgtgaatgtcaaataaaattaaattttaatgattggggtttgtatttttaatttagttctattttttaaattaaaatggcagtaatattaattttccaacacttgaatttcatatttcatatttcatataagtttactcccttaaatttaaactcacataacaaacaaagttagaatagggataagaatgaaaataaaaataagaataaaattaaattaaatttattcatcacattaatcatcttactttttgattgtatatgatatagttatttaaaattaattataaatttttaaaatttttttcaaaaatctaccataagatgtacaacgtatgctcataaaaaaaaattagactaaaaagctcttgtcatagtttagaaaattactaagctcaatagcttttgataattggaaaaaaatcaattatcgtttcgaaattttaaatattttaagtttgtaaagaatattacaatagttctaggggtgttcatctgatccaatccgcacttttttggtcaaacattttggatcaaatccaatccgcataatagtttaaattcaatccaatcc

SEQ ID NO: 62572 - DNA, 1927 bp, Cannabis sativa
  modified_base (270)..(282): a, c, t, g, unknown or other
  modified_base (362)..(369): a, c, t, g, unknown or other
tggtatttttcaacttaccccttccgtaattggccatttagccaaagtcagcccagcccaagggcccaaccctgtctcatttccttacaaaaagaggcccaatttgtttttcgaaaatatcatttgtaaattttttaggcccatttattttttctcaattcagaaaaaagtctttttaaaataccatattttaaaatagcattatttcacaaatacacagaaattaaaaaaaaaaaactataaaagtacggttgtacgaaattttaaatnnnnnnnnnnnnnttatgattttatttacagaaaatacagtctttaatatatttttatattgcactcctgttaatttattgttgattttttgnnnnnnnnatgttatttttttttttttgttcttctgatgctatattcatgttacttttatgtagttttcttgttattttggtgttgcctcgtatagaaaactataaaaatatagaaaaaaaattttaaacgtaaaaatatgaaaaaaattacaaaaaataatatattatataactattcagattaaaatcaaaaatatatttatgtatattatttttcttcaaaaaaatccaattattattttcccaagcgaatgagaaaaactagagaaaggattggacagttgaactaaaattagtgggatgcatgcaaatgcaatagtgcaaaacataagccacactcaaagctcaagtagaaagctattaaagaggctcttccccttaaaaaataaaagggattattttatataacgagtaaatgctattttggattttgtgttttgtatctgttttgttaaataacaaaataaactctgtattttctaaaattgtacaaatagaaccctaaactgatttttatcaaaataaaacttaataataatatgatctagagatgttatgacaaaattagttatcttttctcgtgttagaaattgtctcaaagtttgttatattaaaaaataaaattgttgacaattgagttcagggttctatttttactattttgaaaaatatagggtaaatttttatcatttaacaaaatagagggtccaatcgataactttcgcaaaacacagggtctaaaatggcatttactattttataaatacacacaaaataacaaaaaaaaaaaaatcacaaaatacaattgtatgaaattttaaatatttttttatggtttatttatttataaaatataaaatattttaatgtttttaaagttatattttttttttgtaattttattgttgatttttttattatttttatatttttagattggacttactttgatttggattcaaaggcttgaatatttctcttttctcagcctcataaatatataaataaataattatatataagggtttttatacataaatatgtataaacaaagttagtttacataaatatggtaagaaaatttaataggaaaaaatatgatatttagaataaaaatttaacatatatgagatatgctactttgaattatcataaaaaaattaaaattctcttcatattttttttttcaaaaaaataaaataaatgaaattatagtgatcgctggatctcgtcactggtgctggaaaagatatcggaaaagtcgtcgaagtagttatcagtgccgggaaaatcgttggagtcgctatcggcgccaaaaagtcatcggaattggcattgttgccgaaaaaatcaccgaaaaatttccaagaaactgtcatcaagaaactagtttctcgaaaaccagtttcttattcatttttctggcgacaatgccatttctaacgacttttttggagtttgctgtcagtactagaaaagtcgccggagttgttgccgatgttagaaaagtcgtcggagttactgtcggcactagaaaagttatcactgaaaaaatcactaaaaaa

SEQ ID NO: 62573 - DNA, 704 bp, Cannabis sativa
attatgattaattattcatttacttaataattcactaattaactcataattagcttaagtgagattataatgctactttaatgttcatacaattacatatttaataaaatatgtccaatttaacataataataattttagggatattatagtacttgccagagaatgtcattgtacaaggatgggtatcagggaagtgcagtctcaagtgaaattacttggacaaatattgagtcttaagttgaacatttgattataacagactcaccattaagtttcatatagagtttctaaggaaatctcacatgagactaaggttgtacatgcctacaaggccatgacaagattcttgtcgaggtcaaaagaggatagaaaactagccacccgcctggaacaaaggcctaagtcggctaggtttcccaagcttcgagagggtaggccaaggtcctatgacgtagccaagaactggtcagggttaccaaacccagacatgaacaatgtagctttgtagggtgaaaccctagggctggccaaccccatgattaagtcctagtaccgtctgaggctcaagtatgatccgtagggccatctagggttaattttgaatctaaatgtttggttttttcaaaactcaaagatgtgcctcgtgttctttatgactgaaagagtcaagaatcacaacgaaggccaaaattgaatcttttc

SEQ ID NO: 62574 - DNA, 696 bp, Cannabis sativa
ctctaaataaaactatttgtcattagaatgaaattattatatacataaaaattaagaaaaaaaacattataggatgagaatgtcagtcttttttttttctagaataaattgagaatgtcagtctttaacaaagtaaatagatcttttgtatttaccctatgttttatttttattttaaattaataagaaaaaacttaataatttattatttgaagcaattaattcagttatatttggaggtttttgtttttcttttttccgaaagatgctaaacaaatttttaaaatatggtgtaaataaattttgtttcaccattttaagtatgaatttaatgtgtcaaaaaaagtatgaatttactaattacaatctttcattattcagcacaaaaattataatatttcattatgacttttttcttaaaaaaaaatagaaatatgattttaagaaagaatatataacttttaggtaaagtataagagtcatttcagggaaaaaaaaaagaataagagtatttataagttgaggatttatttaaggaatataattttagtaagtttataattattattcctactaataaagaatatggggaatatatttatttgacatttagtattttaaaaaatagttttttttttttggcaaatttagtattttatgttctccataatatattaaaggataaagatcacattt

SEQ ID NO: 62575 - DNA, 515 bp, Cannabis sativa
taccaatggtgcattggtgcaaatttccttcaccttgtctgacaatgatagatcccactattaatatggtgaggtaacaaataagagagaaagtaaagaaagaatggatatgcaatgtattgagtattccctcttttgatcaaaaggggcatacgcataaggactcccatagcttgtaattgtttttctcatatattcaatatacattggatattattcttggtgctgtgtttatgctatttgctactggctttgatacttttctactgttatttcttggctctggctgtattggctaatagttgattaatctacagccagaatagattttcgacataacacatctttgattttcttcttaaactgattgctctagtaaagagtagactgaagatgtacacaaatcctatgagttccatccgattaaatatcacatttgctcgtttgaaacgccgtattaaatcgtattgtattgtattatattgaattgtattttatgcaatatttttatgtaa

SEQ ID NO: 62576 - DNA, 1642 bp, Cannabis sativa
gtgtgttctgacaagttggcgcgacagtcacaaccgggtatttcaggccggaccgggttcggggccaaaatgcaattttagattaattattggcattttaattatatgtgaataatctaaatttttatttgagaagatttatcttggaaatgacatttttacccttgtttgatgagtatgctttattttggccctaggggcatttttgtcctttggcattaatagttgatttttagcaaaaggggaatgttgacaaataaagattgaattttctggttttcctctcatgaaaaccgatccttctctctctccctatacctagctttgatttgtgatttttgcttggagtagcttggattcaagcttgaattatgttattctttggagctagtgtgatttgagatcttgaggtagttttcatctctttttgcttttaatttgtagctgaaattgtagtaattcaagcaggttttaggtgatgtcttgagatgcatgttggtgttttttgagatgttcttgttgttttgagcatgctttgtgcttggatcttttgagtttgttttaggttaggtttggacagaatttaaaggattttacttgtgtttttattctgttattgagctctaaaatttgttgtttgaggcttgagttcttggcttgagtatgtaagaatttaaggtaggattttgtggaatttagctctatgatggagcttaatctttgtgttatttaatttgagttttgagagttttattgatggatttgatgcatgaaatttgtattttaactctctatataattattggaaaatctatttggtggttttaagttttggttaagatttgggttgatttgaaggtgattttagggctgaaattcgaagtttttgttggtttttctgggtttggaacccaggggtcgcggcccgcccttttctttctgaccagatccaaatgcaaaattcgaatagcaataactttgtgatccagactctgttttgggaaatctatataccgttggaaatcttgtttcgagctctatgtgaatatttgtgttttgaatgccaagtatatattttataaatgtggaattaaggattaattctatatgtgtaaatcccagaatttgtgactaggattaccagcacttggtcaggagcacccggggatttagaatctctactattgttggacatcaggtaagacagtagcacgtagagtatgcgcagtggcgcttatattagaaatgatatatgtgagcaattagtaaccgcggttattaccctaacatgagtggttaaacagcctagggttattaccctagtgatatatgatgtgtatatgctatgtcatgttaattatatgaatatgttaagatttagggttatgtgtgcaaggcataaccgggttggactcggtaactaaaaccgagatgaaccattctaaggccttattgtaattagatgtgtgagcgtaacacgtgggtctatgccacatagacatagataggcgtgtgagcgtaacacgtaggtctgtgtcatacagacaaatatgaaatgaccttttttttattattatgagatgagttaattataattactgatatattgtactatcttgctgggcttggctcacgggtgctc

SEQ ID NO: 62577 - DNA, 697 bp, Cannabis sativa
  modified_base (48)..(66): a, c, t, g, unknown or other
ctcattcactttctctttctcttttcatcttcttcttctttcttctcnnnnnnnnnnnnnnnnnnnatattattttataacaataatataatatttggattaataatatgtgcacatataaatcaaacacaaatctacctatgtggcaagtctcttaagtttgtgaccttgaatgtgtgtgtaattctatgtggcaagtctcttaagtttgtgacgttaaatcagtgtgtaatttatatgtacacatatcaatgtactttttaactttcttccccaattctcttgggctgtttgacttgctttcatattttgcttattttgctgttacgtaaagttttctttttcatggtaaaagctttagcttgggagatttcctctctaaaattaaatgttaacacaataaaatacacaaatacttgttgaattaaaacacgacacaacaataataatcatgtttatatttgacgtaatggtattacaataacactacgttatacaaatgtacttttttcaatcaaatataaacatgaatatacaacgtgactgtgtttagcaaataaaaattcgtatttattgataagcgtatagtatagtattggagtcatctaacggtcacatgcatgatgcatttcatagtattcatactcttacagcccatttggtttactttgtaaaattaggtggtctttggttggaa

SEQ ID NO: 62578 - DNA, 884 bp, Cannabis sativa
ttatttaaattaaatagcattatctgaaatattatattaaaattatttgataagagacattaaataattataaattttgaaattacattagatttttttatagacatcctaaccataatatttttaaattcaaaaatatgctatttagttaaatattttattgtttataaattataagttagaaaaatgacatttatgactatattatatcattttacgtatcaaaaatatataaatgtttgtagaaatttgagaaagagttaatttgagatattttgacatataatttaaataattattatttgtttattgttttattattaaaataataattgactaaccatatttattttataattactttatgttgtaattttaattttattaaattacaagattagaaaatgatattaaaaatatctatttgtttatttttaaggaattattacatagaaaatataaattgacactttatttataaaaatacctccataaggtggggacaatatttataccttttatgtgattttaattactaaaataccttttacactatcacttacacaatcagacgatggttgcagggtggttgttgtgtgattgcattagacaaaggtttcaatcagatgatggttgcaaggtggttgcaaggtggttggccgaaggttgcatctgatgaaggtttcaatcagatgaaaatttctgggtggttggccaaaggttgcctcaagcaaaatatttatgcaactgttaagaaacgtctctctttttatgatttaatatgaaaaaattcactattagaaatttagaaaacaatgaaaatacaccaagataaacattttactatagtatggacgtaactttttctggattatacttgagtt

SEQ ID NO: 62579 - DNA, 786 bp, Cannabis sativa
  modified_base (579)..(579): a, c, t, g, unknown or other
agccacaggaccggctaggggtggctagccaactctcgagagcgagctagactgtcacttgatccccgtttgagtgttggggtcttcgttggctcggatgctgacttagccttttttttgggtgagttgtactgccacgtggcacagaatctgtctccataagcatgccacgtcataaagataaaaattgggaatatatatatatattaaaacataaaacatgttaataattagtgataacttagaaaattcacatataaatattgcataacttcgttagataacttttccttattttgttttctttgaataattttatttataaaattgagaatcagtaatagaaaaaaaaaaaacataaagagtaactaccaaatatgaaaatataatttttaagcttaggctattattaattttatataaaaagaagggtaaatggcggcaaaatccccaatactttagttttggtttcactaaacccccacaacccaaatttctgcgggttaacccccaaaaccactattctgttagcaaaaacacacttccgtcgaaatttagctgttaactgccaggttagantggaccgaggacacgtggcacaattttattggtccacgtaaaaaattatttaaaaaattaaaaaattaaaatcaaattaatttaaatttttaaaaaaaaatctgtttttttcttttctttcttttctttttcttttttcttttttttctttttcactttctttcttttttttttttcaattttcattcttcttcttcttccttcttc

SEQ ID NO: 62580 - DNA, 1536 bp, Cannabis sativa
  modified_base (187)..(188): a, c, t, g, unknown or other
gtatttttgtaattttttttccttttttgtatttttttgtttttttcccttaaataaataatgtatggaaatacatataaatggaatttatataaattattttgagaaaattatattacatatctcttttaatttaatgtctttaatttttactctctcttatgattttgtcccgcgatgtactttnnatatatgtattccgtggtacattaaatgaatcttagggtacattaaatgagtgtcaggtacgtttttactttttaactgtaattactcctagattaatttcagccgtcagatcaaataatttcctcatctgacggctgtcatacatcacggattgtaatccgagaaagtacaataacggaataaaattatatcccttaaaatatattatgtttatatttttaaatgatatttgaaattatataggataatttaagtatagtatttagatatatttaaattaaattttatttagtgataaatttaataaatgtataataactaactgtggcagcagtgggtaacgataaactaagccaaaccagaaccagtaccagctttccatggagatgatgacgacgacgaccccaaccctccattgctccaacctccaattacactcgttgttgacccccattcaagtcgtcacttcttcccctttgaaattccagctccaacactccatttccatacccaatttcagaacacctcccttccaattccgaagacctctcccacctctttgctccgtcgccgatggcagcagcacttcatgtgagttcccaatattttttcttctgtaacgtctggaagctccgttgattgaaagtaaagggttttaattcttttatttttctctctgataaatttacagctccaagggtcgccgtacttgattcctctctcgaattaaaggtgactcaaagttcagttattttggaaaaaatttacatttttatgaaacccaattggagactgaagaattttcatttgttttcgtgtgatttgaatggagtgttgattttaactcttcagttttaatccagaagaaggcaatggatatatctcctgaactcaagggaacttccatatttcttgtgggtaagcaatcagttgttgatcaagaaatttcctgattttagatttcatggcaatttagcttcttaaatataatgtaaaatgggtgtgcttttctttttttttttttggtgaaattgaaaagggatgaacagccccatgaaaaccagtctgggaaaacttttagcaaaatcattaagatattattacttcgacaggtacctgtttaaatgattgaaagatcaagcttatattattacctacctaaaccaatcacttacattgttcattttgtccccatctgcagtgatagtttggttgaggaagctgctggtggtgaatctgctgtcaaatccttcagggagactgatgagcagggctttcgggcatctgaggtgattttctcaacatacttgatgttggttccccattttgttaggatctaaattgacc

SEQ ID NO: 62581 - DNA, 1004 bp, Cannabis sativa
aataaacaaggtaagaaatcagttatgaatgcacaagaatcttaccataaaagtaaaaaatattttgtcaattaacttgccaaaaaaggactttacacatatgcaaattcattaacatttacatcaatagtttaaatgattataaaagaattaaaaattaaataatttgattaaaaaatgtctataacgtattatatgaaattaaatttgcttagaaacacaattttatttattttctcactataattaatggattttatacaaacatatattattttagaaaatatattttaacaacttataaaatttacattaatttattcaaattatatatattttttgaaaataaaaataattatcttttcaaaaaaaaaaactaaaaataattaataaatccttaaaaaattaaaatttacaatatatattaatttttttttgagtaaaaaaatataaaagtttattaaaataattacccataatattattgaaaatattatataagaaaatatcaaaagttgatataacacatatattatattaaagttagaaatttgggtaagatacgatgatgacaaaggagaaaatataataagacaacaagtaagatacgataccctaatatttttctacatatattaccctatttatttattttcataacaatagttttctttaacaaatcaatttaaaatactatatataataaattttatacttcttaataaacaactccaaataataataataattattaataaaattgtgcatagagaagttttttttttcctttttagagagttttatttttttgacaaataaaattattaatctgagttaaataatataattttatttttattatatattagaattattatttaagtaaatatttattatattaatataaatgccgtttggtaatacttttttaatcagttttctatttttaaaaattgaaaaagtgaaaatattttttaaaaatatgttttataaaactgttttca

SEQ ID NO: 62582 - DNA, 894 bp, Cannabis sativa
gtaattaattttcttttaatgatatttaataacaaaatgatttattttttctactatttatttattttattttttttgaatagcctatttaattatttaaatcaggtttaattttattattttatgggagttttgacatttcattttgtcttaattaagttatacttttatggtattccaaatcttaggttttaatgtatttaatattgagctaattttggttaattaattttattaactctttattcatattaatgtcacattaaattggattgacttttatcttatattctttattttgttattaatcaataattattatatatatttaaagacttaattctattttatttgtcatcagactaattttatttattataattttaccttttagcgatctacgtttagaaaatcttttttctattttaatgtttggtaactctggtttgtgattagcttttttcaagaatcaaatttatttattttaattctcagtattaataatcttataattaatttttaagattattttagaaagtttttctcgtcttctaatttattttggtgtactaaatctttcaattagttttatgactatgatgatttttaacattaaatattttagtctaaatgtgagatttttagtattaataatttactatattgattaattagaatttcctttcttatattaattagcatttttactattgttttaatatttgttttttgaacttttgttatttatattttgtatattaaacattataaattaagattctttattaggattttttagcataagacattaatggttcatatattatttcaatttttataatattttccattttttactgcttatttgatggttcattagtattattttattat

SEQ ID NO: 62583 - DNA, 1472 bp, Cannabis sativa
tccaattctctctcattctcaattctcattcctatgttttcattcctcctaaccaaacgccactttagtattctaatttacttgataaataacccaaataacatataatacatgaattcaatttttttattctacaattaagttcagataaagtaattgcagcttaactaatagattttaaaaattattaattaaattttatcacatcaattatctatattaaatatatatatatttgaataaaggatgatttcactaaaattaattggcctcagccttaataatgtcgcacaaaaaagacggagcatttagatcattatacgtacaacctgacgagaaataggactccctagcaacacaatggacaaccctatttgcatatcgattaacaaaagaaacaaggacattattcaaattatataaggtaagacgacaatcctccaccaataacacaaattgagatggcatatgaattgagctattaattgcttgaaccacaactaaagcgtcagattcaacaaccaccttatccaatcctttgcgctttatccaaatcaaagcctccttgatgccaatgacctcagctacttcaggaagaacacagccccacctactctctgaaatagcttcaaggagcttaccctgactgttacaagcaacacaaccgaacccaaatttttgttgagcttcaaaagtagcaccatcgacatttaccttgaccgtaaaagtatctggtttatgtcaataattactgcttgaaatgtcacctatagcaaataaagcattaggcgactcaaacttagcaatttttcattggccaaggacatgtcttgccaacttaaccacctccaaaactgaccgagatttcttctgccattgcacttcctttcgggttttccatatgctctaactaaccatggcaacatcaatcaccacatcctcacggaagccttcaaaaagatcaaaaaaccagatgccaaattcggcctccacaccagcagccggctgtgtgatagcagaaatagacaagcaggaacgagagaaagggcagtccaaaagcacatgatatattgtctcaacatctatattacacaaaggacacaagagatcaacattaacatgtttagattggagttgtaccttagttggaaggcatcctgaacaagctttccataagaaatgatgcaccttaggcggaatgggaagctgccataatttcttccagcaattatcatcttgcatatataaccaatttcctcttgaagattgaagaaatttatatgcacttttaaccgagtaaaatcccgaagtctccatgttgcaacacgagccatcaacatcccgagaatgactaagttgaatgcttctaatcaaactaatatccctctccttaaatatatcatttagaagcttaatatcccaagacttttccccaaccaccagcaaactagaaacatgttgattaacaaggc

SEQ ID NO: 62584 - DNA, 1097 bp, Cannabis sativa
aaaagaaaattaaagacacttttgaaaaaataaaaaataaaaaaccttaaaatgttttaaaaattaaattaactaaaaatactattttttttaaaaaaaagaaagatatctcatgtgattctaatcccgaatattaatgttaattccgagtaaattgtcataaaaaaaaaaccaaattgttagaaaaaacaaagtttacatacctaaaatagacattgtagcactatcaaaatttcaactattaaacaaagtttaaccgaccaaatcaaaatttaaccaaccaaatcaatgttcaactgaccatatcaatcttcacatattaatacttacataacctaatcaacaacttgatctaatttctttaagaactctggccacaaaggcctctcgaatttctccgtctatagacttgaaggttgccacatattttggcttcttcaacatgtatgtcaacacatcaatcgatttcaacagaccacaacacataacactagcatggaatttatactcagacaccctttaaagagagctcatcaccattcctctgttgcctcttacttggcgggccttcacaccaatcttatttaagtaataagctgcaaatatccttgttgacatgcactccccaaatgagaccaaataatcttcatcataacaatccccttagtagttgttccaattcttctagcaaaacctgcaaaaagttgattcacaatatgcaaaaaagctaaaatagacaatagattaaagacaaaacaaatatcaagtggggagaacactcacttgttatgatagaactatctataccaagctcatccacagtcctgtgtagggcagactaagttaatgtgagagaaaaatcaaaagtactattttggttctctttgtattaacaaatgacctgaacaattacaaatcaaaaaatccttgtcttgcctgtgatgcaattcttggataaaactcaactctttgagatagctttttctccagcctaataaatgaaaaaccatattaagtcaagaatcactatgtaaacaatgaagaaagaaaataaacagaatctcaccagtaatagcctgttagtggttttccccatt

SEQ ID NO: 62585 - DNA, 814 bp, Cannabis sativa
gtgtgtagccctaatttcattgcacctttcttgaagacgagaggcataggcgatcaatgagtcgatctctactccaaagtctaggcttgtgatctcctctgttgtagccatcttgatcactagagaaggaacgtgaggggattctcgtgccctgattcttagtagtagacgaagacaaaagtccatggcattgtccagattgatagaaaaaagaattctcttcaaaggatatttgaagtttagtagagtgtagggagatttgtgcacttcgaagatttgaaaatttgaaaaaaagaagtaaaagttgtaactggaggttaccaagggtatttatacccaaaaaggtgatccacgttaaaaagatatggacaaccatgatcttttcttcagaaacgcatcttccatccaacaattagggagaccagcaatcaatgtgtatcctagcatttactgctctccggaataaaggcgtgatgcaatgaggaagatgctcctttttcaatattcacgctgaaaattgaatagccattgaaatatagccattcctgaaagatcactcctcgatagtcgcgccctatcacacgtgtgactgccacgtggacacaccatcatcacaggtagaagtcagctttcgtggtcgagtggcatgtgaaatatcactactttattctcaaatctccacatgtccaaataaagagattagagcaagcttccaccatgtgcaacatactaaaagtttggggataaatattatctgcgcttttggcattggaaatgtggattcaaggtcagtattcaagacccatcagtggga

SEQ ID NO: 62586 - DNA, 652 bp, Cannabis sativa
gtttattattcaaatattatcattaatacacaatcagaatcaaaccattacgcattgtaagatgaaatccaagtcactactggcatctgccatgaataagcattaatatactgatctcaggtaatacaaaatcataacattcaacagtaggtaatataaccaatcacagaaatagatatgttcatatatttacattgtcaaatcaagcaagccagtgtcataatgcaatatcatatataatgtcctaacgataacatttgatagtagatattataacttgccatatgcatagaaatagatatgcttatatttttacattgcataatcaagcaaacccgtgtcataatgtaatatcatataaaatagcattgcaccacttaatcagtgaacccgtgccacaaactagcactaatatatcgcatcgtctaatcagacgagtccgtacctacggctggtacttatcatatgtcactgatgcccgtacgtatgtctgatatgttgcaaggaatatcgcatcacctaatcaggtgagcccgtacctactctcggtgctcatcatatgtcattgatgtatgtacctacgcccgatacgtcactaggaatatcgcatcacctaattaggtaagcccgtacctatgctcggtactcatca

SEQ ID NO: 62587 - DNA, 759 bp, Cannabis sativa
ttaattttaagaataccaatttaagcacaattctttcaagtcatacatgataaatcccatattcctatgccatttacaaatcacacttttccaaggtgatattcatgcatcattcaagcaattccactaatcctattttttccaaaattaagattagcttgcaacttactaatgatgatcaagcaaaagtaagctattacacaataaacactcttgaatgaacaaaatcaattcactaaacatgacaacaaaatattaaatcacaatttttagccaacaaaataattctagcaaaaaaaaaaattagctcatacttaattgtgcaaaaattacaaaatccaaataagagaaggatgaaaagaaaaacccatattggagttgtcacaatactccaagctttctttgccaaaatcctcttcttcttcctgttgatcttttccaatcttaaaataaaaatactaaattaaaaccctaaataaaactctctctttttctttttctatttttcttcattttccttttttttttcttgcttttttttggcgtcccctggagcagccgcctactgcttctttcttctattctattaactcacgccttttaatcatatataaatatatatgataacaaaatctatgaacaaaacaaagccctccaccaccacgtgacttttgctaagcctaatgtttcttctcctctcatctcttcatgaagcttgccaagatcctttagagagaattgtgttggaatttattttac

SEQ ID NO: 62588 - DNA, 853 bp, Cannabis sativa
  modified_base (823)..(828): a, c, t, g, unknown or other
aattattttcaaaaaataattttctgtttttaaaaacaaaaaaaaatagttttttaattatgatgtcaaacatgcacttagtttccaagttttctcatggtcgaaccacatagtggtattgggctagtgttgtgctcttcattatctgaaagctcaataaacttaaataatgctttttttgtttatgtcataattactttaattcttacatttaaataatatttttaattaaataattatgttaagataattattttaataaaaatattatctaaatacttaattattattaattttttacaagaaaatgtctaattaataattaaacttttattatttctttcatctatattttcaccaactgagtgaaatattttcaaaattgtcaaaataataatgtgaacatcgattgattaaataatcaattaatgtaacctacagttaaacatttttataaatactacgaggaccatgagcccataaaatcaggctccaagataggtctgaaatttaacaaataagtttcccaacttattaatttatcatgtctccactatataggggtgttcatcaaaccactcaaaccatctgcaccgtaaaaattacaatttgaaattctttgcggtgcggtcgcagtttgaattttttttaaatcgcatagtgcggttttaaattgtaaatatgcgattcaaaccgcaccactgtgcactgcatattataaaaataccaatttttatatttatttagatgtgaatgtccagcccaaagcgcactaattattgtattgttaaaacttaattttttttcatatttattttcaagnnnnnnggtatttttgacaagtgttgctcaa

SEQ ID NO: 62589 - DNA, 588 bp, Cannabis sativa
atggttggatttcgatataaattcatttgaagtttcatgtttggctatttattctcgagaaaaacacaattgacaaagaattcaatgagttttctaaagagtaacaaactagtacgtacttgggtttcttttttaaaaaattgtttgaatttttctatacatcacaaatgtgtaataaaagaaatatcaaaatggtcaacgacaaaaagattaattacagtgccttcttaaactcaagaatttcattgccaaaaaataaaaaaatttcaaaattgtcaaacgttgacaattcgatgtgttcaatacaacaatcttgcatgagccccaattcgatgagctattcaatactataatttcacaattcaatggcctagtgtcccttaaagctcaaacccccacatttttgttaaatgttagtaactaacaaaagtaagacttggtacaattgacttttcgatttgattcactctttagggggattagatttcgaatcctaatacatatgatatatgatattaagtaatttgtggcgtaaatacttaaatttaacttccaattgcagataaatatttaagttttatttttgac

SEQ ID NO: 62590 - DNA, 1684 bp, Cannabis sativa
tgagataattatggtataattttttttttttttgagataattatggtataatttttggtcataagtaataaaaaatattatgtttattcgctcgaaaatgctaaaaacactagtggtgtttaacactatttttggagtcatattgttattggttctattaagtattatgtcttatataactatcgttaactaatcatagagcatcacttttaggtggtattaagcactactgatgcccaataacaatactcacattctttactaaattatagtttgtattttgatataatgtggtgattatttatgagtttttaatatattatttgacaaaatagttaatagttatacatataataataatttattgatacataatatttaaaatgcgattttttaataattacagtgaattctcgcaaggtatgataattataaagtataatggagatctcttaattatctccaattatacaattatattgtaatttcatttaattccaattctcttttaactttccaaaggagttctaaatattcttgtaatattaatgctcaattattatactaaaatttcactcatttgtattgaactcatgtggtgttaagcatcacacaccaatttgaagttgttttgctttttttttttcttgtctatggaggtggagatggtaatggtgaggttatgctcttgcttgaatgttatgttcatttttgttgtaataatggtgttctatcactctattttttattacgatttttcaaagacgatctactttgctatgtatcagtctaaggttaagatttatcgaatatacctattttgctcaaattatttatgtttatccttctaggggatgttattattatcgcgttgtatgttctctctttataattagcgtaatttattgtttgttcggttatctttatgagatttatgagattttatttttgtttaagttatagaactttaatggatatatttttttttattattaataaaaagaaaaacattaaacactaacataaatgtagttagaccataagagcacaaccaaaaaaacatatcaaaaccaaaacttagagaaagatcaaagaaccaactaagtgttgatatgctcacaaatttttcatactaaattattatacatacttatgtggcaatttttttttttccaataatcatattgatttgagatggatttactaaattaagaaaatctttctctaaatatttgtgaatctgtatttttgtaagattttatgtttttcatataatttttttttgaaaaagtttgagatttttttttaatgggggcccattccaagtttaagcccaatttttttagaggacttaaaaccaaagttaagaaaacttgaaacaaatgtgagagaataaataatacatagttttggttcaatttgtgataatagatattaattagcatgattgataactagcttcacatctaaagcttacattgaatagaaggatacattatattcaatttccatataattaaataaaaatattgttacacaaaatatcatttttggtttaacattatagggtcaaaataatttattttctttagatttttacaatttcaataatttttattttcaattataattttatagagtcttataaaagtactttgagaaatacataaaatctactagaaaa

SEQ ID NO: 62591 - DNA, 2218 bp, Cannabis sativa
atggttgctctgataccaagttgtaacgccctaatctatagagcattctttattagttttataataatttttttttattatttttgttagattttaaactcgtttgtatgtaatttttaaataaattattaaataaaaattaaatatttaggggtaataattttaaattaaggttataggtgtaataattttaaattataaggttattagttatatgtgaaattatttcaaattataagattatgtgttataattttaaattataaggatgtttgctacaaatatttaaaataatttaagtgcaaaaaaaaaaaattgctaaaagaacgttgtttggtaataaattacaaaaaaataattaataattataattaatcttaattaaagttttttaaggaaataaagtattaggttactataggttacaagttattttctatttaatttttaatttaatcacaatcattcaataataatcaaatggctaaaaataaatataaccattatagttacatatttgatgttactattgagacatcttccattcctataaatattcttattctaacttataatttttaaataataaattatataataaaaagataaattttaaatttcaaaattcatatcttaattaagatgtctataaaaatatttaagttagttttaaatttattgttatttaattaatcatataagataatttataatataatattttaaataaaaaaaataaatatatcttttgattataaaatatatataatattaaaatttttaatcttataattaaataatttgtaaaaattaagaaattaagaaattttcaaaatttaaccataattcaaatataaaataaataattttttaattcatacttcaaaatataaaaaattaataataaactactaaaataattaaattattaatttctaaaattaatatttaagttcaaatattaaaaataatattttatactgaattttagagttttgaaatggaaaaatttgtaatttgagtgaaaaatcacaaaaaaaaaaaaattggatccaaaagcaccctgtccaaactgacaggctaggtgcagcctatccgcgcacgcaagaggctactggcagcctcgttcgcacgcgtaggatgcttcttgcagcctgttggttcggacaaatagggaacaggcatgcttcaaacttcactgcgcgcggacaagaggattcttgtccgagaaacacacgcatgagaagggatgcctttcgagatgtgcaacgctcaaagggctgctcgcatggcagtcatggcaccgatttttaaaacaccataactttctcgttttttatcgaaatcgagttctgtaaaaaataaacttgcttaaaatttcacaaagatcatttttaaaataatttcaaaagaaaattaaagttatttatcatcaaatattttagatatttacataaactcattgaattcacataaaccaccataaacacatccaaatcaatcaaaaaatatacacaatcgttttaaatccatattttatgaaaataaatcattaccatggctctaataccagttgttgaaaatttattttaccaaatctagatttaccagcatgtatgttcattataattcaataatctaacatcctaaatatgaaattcctaaaaatgataaataaatacattagggattaagaaatccttacactaatattagtagaataatatgacttctttcattcagatctctaacccttgattcctgtctgtagtagagcattatcaagatctgaacttagattctccttctgatgacaattgaactacatagtcttcctcagtatgtgtgggcatattcttaacaccaaggagcacaaaattttgagtaagaaaccaagagaatttcgaaaataatgaatggaatagctttctttttattcagttttgttcagacaaaaagagagtcattaatcattcaatgaaatgtcataatgttctatttatagggagatactagggttagattttagaataaatgagctgaataaaagaataaaattgcttaaaaaattcaacccttggccaaactcaacatcaaggcccatgggtttgaattttacacttttgcttccaaaagtaagacaatatttttctttcttcaaaaatgtcatttatctattctaattacttacatgctaattttatttatttaataatta

SEQ ID NO: 62592 - DNA, 894 bp, Cannabis sativa
  modified_base (745)..(751): a, c, t, g, unknown or other
gctttccactattccatctattaatccagaaattttttctagtgacctgaacatcaatgtttaacatgtagcaatatatatgacatcttggacttgagtagtcctaagtcatagcagtcgacctaggatgggtcccttgccctacgcctaggactactacaaatctggactttagaggcggtttttaagacctttcaacgtcgattttggtaaaatttactactgacgctgatccaagcgacgatgtagggtctaaaacaaccgatactaaatgtacccctatggcgtcagttattataaaagaaccgaggccataggtagatatggcatcgattatatactactaaccgacactatatacccatataatcgacactatataccttaaaaaccaacgctaaatgaacaataattatttattttcagttaaaaatctatattgtaaatcaaaaaagttaatttatttaaattatatatttattaatttatatattgtattatttaatataaatttatattaaatatttatttttttgaaagataaattaaatattttatgattagccaatatacttaattttatttcatagaagtaattaattaaactacaattatatattacacaaatattgtaaaattagtctaagtattcacaagttaataaatctaattacaagttgacctaaaaaaataagctaaggaagaaaaattcttaggcctttcagtatcattcgtccaagccttnnnnnnnaccgccatcaaccgttctatccactgtcgctataatggttataattcggtttatggattttatgcttgcttttctccaaactgtaaaaaaagtaaaaatttatattagtttttatatttattattatttgttgttataataaa

SEQ ID NO: 62593 - DNA, 882 bp, Cannabis sativa
tagttttgaaattattttttaatattacctaaatgtattttgagttataatctaccaaaaaatataatttaaaaataactaactagttactaagatgtatatacatacgtttttaaagaataacaaaaatatatctcaacttataaatatgacataaaaataaagtttattatataaaggtcactaatttgttttttttatgtaattctattaataattaaaaagttaattggaaaaaaaaaaagaaaacataaaaaatgtcaaaaagtatcagaaaacaccaaatttaactgacgtgacaagtcaataaaaataataatggtattattgtaaattagatacaaataatgaaatattgtagacttctctattatttgagtactattaagtatttaaggaaaattttagcaaaaaaaatgtataatttgaggagtgttaattacaatctctttattataatttttaagctccaaaatcaatgtaagaatatgtttcatagtagtattggttatgtttataatattatcctataaatttttaaaaaatgtcgaatatttatatatattatcgaaaatagaactcttgatattctagtttactacgcatgtttaagaaatttcaaacttatttttgacactgtaaactattcgaaatttttcaaaaaattacatgaatagtgttgtaactatagcgaacactgccatgattttttttaaaagaaaataatatttcgacatgtattttcaaggaacagagaagttgtttaagagattgtaataaaacttttatgataacaatcctcttacaaattatatatttgaatttgatagctttattaataatttatgtgtaaaacattcatgaaaatagaattttgataag

SEQ ID NO: 62594 - DNA, 1502 bp, Cannabis sativa
aagagttcttgaaaataggaagtggtaattgttgtaatttcctccttagaactgtgagtaatacctgttcaatttgtgagtgatttaatggtgttattttgcttccttgaagtggcatgagcatgaacgaactttgtattttgatctcctctttgcatccaatttacccttgatctttgttgccaatatatatcttcttgtgctagtaagtcatcaaagattgactctgattttttttaaatctatcattgtttgttgcgtcccgatagcagaattcttgagtgctgcaatatctttctgcacttttgaaatttgctgcttcatgttcccaaacttgtgagcatgccaatgttgtaaggaagttgtacaagcttgcaggttatcaagaaaaagatcaatactttttgttgcacattgtgtgctccaattctgttgaatgatactagcaacttcaccatcattaagccacatcttttcaaatctgaatcatgttttcctctggacatgatcaggttgttggtttatttgttgaaccataactgatatagcacgatgggttagaactgtagaagtccaaatgggatgttgtaatcggctcgaaacttgttagtcatttatcattgacgaaacaccaatccaatctctccttgattgtatctgctttatgtctgttcttaagccaagtgaaaggatctccaatgtaaggcagctcagtcaaagagcaaaaatctaatgtttcacgaaagtcatcaatcttaatgcaccaccttgcttattattgttggaaagtatctcattaaaatcaccaatcacaagccaaggtaaaagaggggtaacatcttgcagcctctttaaagtcaaccaagagtgacaacgatttcctcgttctggagagccatagaaagcagtaaaatgaaagtaggaccattgccaaaagcgagatagtagtcaaacagattaaaattataattgaatagagttacaatcacatcatctttccataataaaagaaagccaccacctaaatctactctagggacttcaagtccattattaaaatttaaagcttgtctaaaatgagaaattacattaggacattgtttagtttccataataaataatacatgatgagattataagaatattttattttaggaaataattttttatttaaggaaataaaataaataattgattttctgataaatgaatattttatattcaatgaatctggaaaaaatcaattatctaatattctatatatggtcagatttgtatattcattacccgatttcatttcctaaattaattgtcaaaatattctgacaattaatgtggcacagatgctgatggagtatctcacctataaatataaggtctcggttcccgagctcctcactcattctgtttattcagtaaattccatctaaagagagttgagagagcgagaaagcccgaactctaataacgaagctatagtagggattgaagctcaaagatca

SEQ ID NO: 62595 - DNA, 909 bp, Cannabis sativa
gtggcactactagaggtgccggaagatcacgatttggatttagagcaggctgagctcgcttctccctcagctcttgtatttgattgccttattgctgaatggtctcttgcatcgcgacatataactcttcccaatttggtggtggtggaggattctcgccctcactgccaaccctgagcccagcaagctcgcagttaccccttccagatcgcctcgggtggatgatctatacacctgagaccataatcccattgtttaagatatcccaaatcatgacaatactaataagtatttccatgtattcacttacacatcaatctttactatacttttctaacaactaacatattccaaataagcaggcaatcaggtaattaacaaataatctagcaattaaaacttactgaaccatgagtcgaatgagtcttcgcagtcaatgtacatatcaagccagtcttcaagatctttaaaccttggtcagtctgataccatgttgtaacgtcccgttccacagggacaccacatgtgtgcttttacaaatttgttttaacctaatattaactcaaaaaaagtgcggtttaatttaaatttttaattaaaataaaatataacttaataaaagaaaaccacggttaggtatggggatcccatgtacataatgttcctaaagtaatattacaatattaggttatactttcaaatacaaacaaaagggtggatcatgtctactggagtcatggcaccgcgactgatatgtacactgttgtagagacctcaaagtcatggttgttcagctttgcccattcctttacatgcaccatgaagcactcgtgagtcatagagactcagcaagaaaagcgaaaaaattcaaagaaatgtacatttaggtaatcataccgcgacaaaata

SEQ ID NO: 62596 - DNA, 4651 bp, Cannabis sativa
tctctcagttttatttttgtgttcttactgagaatgttattatcacgagtaatttgtagtgtttatattacacgtagtagttactaagccataacccatgatagagttttggtaataggataaatgctatgtttagtgtgattttatcaaagaaaaaaaaaaaacttgtgtgtgtttttaatttgtggtgttgtttatattactcattgcacttagtagtgtcaagccatgagcatatgttaacgaaaaagagcacacaattgatcataatttacaagacaaatgcagacttcagttcaaagcacctgacgtccagtcgaagctgtgtctattcttctccttcgttgcgacactctgtcaccgtagtctaactctgttcccgagtcaaatccatctaccatgcttagtttggtggtgtgtacagaggacgactcaactctttgggtgtaatgatacttttataacaaacacgaaaaggagacctcttaaggagttggggtctccttatcgtggccactgctgccaacaagagccatccacccccaatatctttattgggggaggactctattgttcgtttgtttttattccccgagaattgaactatgctgcccataatattgtgggacgggtttcgttacttgatatgtttggtgatattcctactgagattttgtgtaaagaccgagcttggtctccataattttatggaatgaatgaaatttatgaatggttgggttttgtggtttgaatttgtacttgtgagctaatcaacaatttattcactatatagtttcattttgatgtatagtttatattgattgatgatttttgagcttgcagtagtatttatgtaaaatattatgtaagtgagagtatcaatatatacatagaatttttaaaaaattgtaattaactaactaactaaccataatccctttccaagaaagaaaaaacttgttaaatctttaatgtattaattaattattaatattcaatgctcaagttacaaatgaataattgtatgtataaccttcaaatttcattcatatcttatttttctttttctttttttctaaatcacaagactaaaaatgaacctaaagttaatggtaacactataaactactcaaaataaggtttgagcctataataaattcacttctaaataataaaataacaaagccataaataacaatagaaaaaagaatcacaatttggttcttaaagaaaagaagtgcctgcaagaccatgatgcaagagattatgagcaatggaatctctagccttcctagaactttccgatctcattgaattctcggggaccatctcatcatcaacgagatcgaatcggtgttcgggttccatttcttcattgctcaattcacaaatattatgcaaaacacaacaagcaccaagcacaacaggtaaatcttgtaatttcacttcagtccttttttgcaaacaagcccaccttcctttaagtcttgcaaatgcatccttacccactttttgaacctcaccaattttctcattaaaagcatgttgtgtccaagttaggttttgttgtgtgtaaggtaccaaaacccaatccatcaacgggtaacccgacccgccaactatccaaaccccttttaacgccccgccattcgccctttgataaagggctgacttttccaatacttgatcgtcgggcattgacccgggccacccgatacaaacatcagtaaaaacgcctctcggatcaacgacaccttgaacggtaatcgaatacgacgtcttttgattccgttcggtgtgtcgtttattaaaataagccgcgacgcttattttcggagcgataatgggtatatgggtggtatacatcgacccaactacattcggtatacccgaaaccgattcgaatgcctctttaattgacccgaccgaattcgaatcgggccactgaagatatttaggcataagaacgtttcgaatagctgaacaaacttccaacaccagcttatgacaggtggatattcctaacccgaaacgtttcgaaacgagtcgaagcgggtcacccgtagctaatctccataaacaaaccgcaacacgttgccgtacaggtatggcgtttcgtagagtcgtatcttctttagctattaccgaatttagctcttcacaaaccgtttcgaacgtttttttactcattcgaaacgcttttttgaattcctcgtctggaaaatcggctccgttacactcgtcccaccaagcctttgaccgatctttgacccacaatcgcctctgatgacccgatttagaacaagtcttctccgattcatcggcggcgcttgttacggcggctacagctacggctgcggcggctgagattgaagccgtggatgatttcttgagtgaatctgaaccgttgagatttgaagaggagtagtaatcgaacatggctttggtcttcttattgtgattgtcgtttaataaggatttatcgtcgtttgattgtcgttggagttgttgttggtcttgtttttcttgttcatcgattaagagaagagaagtaataataccgtttaagcttttcttcttcttcttctctttttctgccaattcattgtcgttttggtcttttcttcgtcgttttttgggtgtggggttattattgtttgtgtcgttcattgaatggggttgatatatcgaaggattgagtagtagtttgtagatgggggacaaatcttcttcttcaaatacttgttcttctgtttttgggtttggagaagaagaagaagaagtgtttaattgttttttcatatagaaaaaattatataataataaaaataaaaaataaattaggaaagtggagagagagaaagtgaggagagagagagagagagagagagagagaggagaaaatggaaaaggtttgagattgtagtgagaggattatatgttgtgtggagattgagattaaattttgggactagtgtgaacatgggtattgaaaattattgaaaaagatttgtctaaaataaataaataaataaaaataagagtcttacaagatgatagttagatatcctattaaatattaattgaattattattttatttttaaaattttatttttagtgattatataattattatttaacagtattatttaattgatgctgtatatttataagaaaaaataaatttaagagaattttgttaaaagtaaaaagaaataaaaagttaagagtgattctacaatgtactctttaaaagaaatctattgatatactttctacttattttggcattcaaaaaaattttttagtttaattttttttttatattcatgtacgttattgctatttaagatatcttacataattttaagaaatttaaaataatttacaatataaaaaataatattcaaactgtttattttacacgtgtataaagtaaaataatcatgcgtactacacattgtttgaatgtagttttcagcgtgttaaatttttttgaatttcttaaaattttacaaatagtttaaataactataatttacattatcatgaaaaaaatttaacttacaaattattttaaatactaaagtagataaaaatatatgcattataaaataaatttttctaaaagtgaaatgtataaaattaaaatgtgagatttctccaataaaaaatattagggaggttgcttctattgtatgcgtgtactaatttgcattcttttatttatttatttaatatatataagaaattggggaaatttgggggtatctacacttaagtcaaactttatattgttttattattaattttaacttattatttggggaaaaaaaaaaagcatgattactcccttaatttttttgtttgttatttaacaattgagaaaaagaaaggaattaacaataaatattttgtctaatttattaattattaagaaggaaagttattttatatattattttgtaattttttttaatttacagttttgattattttggtagttgattcagtaatttttatgtgggttgttatataaattttaataaaaatatataaaaagttactttaaaatgtaaaaatatatttgataaatagtctatagttcactttagttattgtattagtaatttttgttgaagttttttatggttaatttctaaattaaaaaaatgtgatatatacaaatatactaattgtgataaaaataaaaattaatataaaagtaggatatttatgaaaagcccttttttatatagaagaaaaaaaaaatctagtgctcattattaggagctatttaattttagtcagtattcatatttaatataatgtaacatttttcaaaaaacattaaatttactttggattgtagtcacttcaattaaattcccattgttgtttggggtaaattccttctttattataaataaattgaaatttattttcccattaataaatcccaaaaacataaaaaatgtaatttttttttaatgggaagaaatattatcacaattaatgggtcaaatcaaaatgagataaatagaaagaatgatgatgagtcaactacattggaaaagtggtgtgaacacaaaattgaagatggccaaacaattgttgactttttgtgaatagagaaagagaaaaagtgt

SEQ ID NO: 62597 - DNA, 2001 bp, Cannabis sativa
tatagttaaataaacttatctcctctttctctaatctttaaagtggtaataatctcattgaatatggagttcccttaatctaataccatcgcctcgatttccacgttattggtagagatttcaagcttttacgatgacattgatgatgatgctctataaattacaatttactactatctagtctccatccaacaagcaagctaaaagaaaaaaaaaatattaataatattaaattgtagttgtcgtgaaaagagaagagtcgaagcccaatcccatatttttggaaaacaaaatgtaactgtagttaattttttgtattactgtatatttaactgtagttaattttttgtaactgtaggcaaacaaggatggaggttaatgctacagccacactcattagtaatttccgtatatataaagctaagtattatcccgatggttttttcctttcagctgagatgggtgggagtccaaattttgcgtggagaagtatcatgaaagcacaatcgctgcttaaaaaaggagctgcaattcgtgtgggatcaggtgccaatgttagtattctgaataatccttggttttcagacggttcagacccttatgtgcacacagttagtgtctctcttgttgataaaaaggtttcccaactgatgtctatggagcatgatcaatgagatatggatatattgtatgacatctttgaagagagagatattaacttaattgttagtatccccattcaagttgcagaggcagatacttggtattggagaaaagagaatttgggaaattatattgtgaaaagtgcttatgctctcattcaagaaggcaagcaacagtttgctacatccgataactcgggtttttggaaaaagttttggcacttaaaagttcccccaaaattcaagaatttcctatggcatgcctcaaccgattgtatccccaaaagtgcaacttcaaacaacgcatgtggttgttaatgctttgtgccctttctgcaacctggagagtgaaaccatcagccacattttagtcacctgttcgttctctcaagtatgatgggcaactttagaaccaggtgtttcaacagacgtggtggggactttctcgaactggctaagttcgatctttgacaggtggagtggaatgagtagacagcttgtggttatgttgtgttgggcactttggagagtaggaatgatctggtgtggaatcaaaaacatgttgaagtcacggatgttgtaattttggcacgtacggttcttaatcaatggctttatgctcaagacaaaacctttgacccatctttaggtttgttgtttcctgaagatggtaatgagcattggacttcaccaaatattgatacgattaagattaataccgatgctacaatattctctttaactaactactatagctactcctgtgttgctagaactcatgctagtacattattggaagccaaggccaagtgtgtaagaggtgttgtctcccctgaggtggctgaagccattggcatacatgaagaattgagttggatcaaagacaaacggtggagctatgtggaagtagaatcgaactgccttgtagccattcagtctatttatagctcgtataccatgtattcctattttggtagagttattactaagtgcaaaaggttgttggatgagttgaaagattgttttgtttctttaaaatttgttaaacggtctacaaacaatggagctcactatttagcgagatccacttgttttatttctgatcgtagtttgagtgtgagcaatgctccctaccgagttcatttctctattgatgaacaatttgattatttaatgaagtttatctttttttgtcaaaaaaaaataaattataaatataaaagtgaaaattgctctttattatatttgccattttatttaatttttctaaaaaaataaatatttactcatttaatttttaatttaatggcacgtttattaaactgtaattggaatcaga

SEQ ID NO: 62598 - DNA, 1135 bp, Cannabis sativa
taattctgttttattgattgtttgaacttaatggttacaaaaaaagagaatgccttttatatacaaattgatgaaacacagcaggactaactaactaactgactgaagtatactaacaaactaacttaaccgacttaagggtaatatgggaaagtctaataattagagccaaaattttgttagagaccatagatgtatcattatagttgttttgtaaccattaaatttatgtagttattttgccaatttaacattttttagtttgaccaattttctgtattttatcttaatttgttatttatttaatttattcttatgggaatgggcagggatgcaaaagcacttcaggagaagctagctagaaaatcagggcaagctggtggaggaaataatggtgttcttggagggaaaaattagagtgtttataggttagatttatgagtattgaatagtcttggtttttagtcatataatttatgtcattcgagatgaacaattgattgtattgttggccttgtaaggcattgatgttaattggctattaactaaaacttttcagttcttataataatatataaatataatttggaattaaattccttttgtgtccatattctgcatacctctttactttcattcataccaattatctttaatgttgtagacttaggaatttgtcattctatgttttatggtaattatagtactagaattttggggaagttgagaattcatatttgtagggctataaggtgtttgaggtgcgggtagtgtggtttctgcaattttttcacaccttgatttactagtgtcaaataattcaataattaaatattataataaaactttagaagcaagtgatgattgatttggtgtaatataatggtaatagtaatgtaatggaataggaattataatagtaattaattactatgtttggtgtttggtttgtgattggaatgagtattgtaagtaaaattattgtgtttagtttggtttgggaatgtaatggaataaaatatataaaatatttctattatttttattatttataattataaaatatttaaataaaaggtaaaatagatttttttaatttttgtttattataatttttaatgagtgtgcattgtga

SEQ ID NO: 62599 - DNA, 763 bp, Cannabis sativa
tatgtagtaaaaatcttttttttttttaaaaggttgcatcatattcatcattcagtaataataacaaataataattttatgatatatttatttaattgtctctaaattttattttttagcaaattggtcctcaaatttatataaattttggcaagttggttctcaaattttatttttttgacaaattagtccccaaacttttattttcttaaaaacataaagtcctcattcttaaatgatggtattttatttatttatttattttgtattaattttaaataatattattaaattaaattaatatgttttttttatttatatatattttttaaaatatgtcaaaataaaaagaagaaaataacaattaaaattgcttaaataatattattattattttttataactataagtaaattatattttaaattttatttttaaattgtgctccacaatgaacctatgaaattttacgattcaaaatttaaataattaataaatatatgtacaattaaaaaattattaaaattataatactatatattcataaatcaacaataagatatattataaatattaaaatataaaaatgtgagggaactaaaattttctctagccattatatgagtccactagtgtttatactcttttccctttttaataatacatatgaataaattatattttaaatatttttaaaaaaaaattaaatattataattataaagtatatattatatgagtacttaaaaaataaaaataaaaaa

SEQ ID NO: 62600 - DNA, 529 bp, Cannabis sativa
tttttttttttttttttcacattgctgcttcaaatagaagacgagacaatcatattcaacaggtaaaaatgattagtgacatttttttcatggggagaatggtctctcaggtagtattgtggattactattctaatttgttttcagcttctaatgtggatagtgatgaagtggtaaactgtgcaagaagctgaattttaagtgaggctaattgagaattattgaaaccaatttctgaagaggatgtcaaaaagcaatcttccaaatacaccctgataagagtccgtaccccgatggtatgacacatacattttatcaaaagtgttggtccattgttagcaaggatgtggttgaaattgtgcgcatcttttttcaaactaaagattttgaagttggttgtggtaatgcaaatatagttctcattccaaagaaaaagaaccctaatttgataacaaacaacatgttgcattatttaatgttctctacaagatcatcactaaagtagcgaccaatcgcatgaagtcgttaat

SEQ ID NO: 62601 - DNA, 970 bp, Cannabis sativa
  modified_base (53)..(55): a, c, t, g, unknown or other
aatagttataaataattttcataattaaacgtgattaactgctaatttccaannnaaactaagcggtctttacataacagtggtggaagcttttgggaaaggaaacttatgtattttgccaagacaacatgtagcacaaactgaaaaaggagaatttttattgctaacaggcagattacaaagctttagaacagtttgtacaatcttttctgagggatggcctaatctattatgccatagtgtgatatcattttgaacattaggattacacttgtggcaacttgacatagagacctcagaattttgaaaagaaacagtgaagacacttttgacactaggactgctacaggtttgaggagagtcattcttgatgattctttccttgagatttgaggaaacaagattgatttgtgtagaatcaaaagtatataggccattcttgtgcatccccttcatcaaagtagtatgagtcaatttgtcctttacacaacacatgtcagcatgaacttcaaagaacacattattatcttgagcaaatttagatacactaatgaggtactttgttatttcaggcacatgaagtaaattattaagaataagaggctgtgtaaaagatgaattggagggaataataaaggattgaccaatatgtttaatagacaaacttgaaccatcaccaatgtgcatttgaccctgtccattgtaatcatagaagtttgcaagattttgggcctaaggagtgcagtgatttgtggctcccgagtctgggtaccaattggtatcactggtgttgttggcagtggcaatattagcctgaggttgggatgttaatgctgaagtttgactgctattcgaacctactggaggccttgtgaaattcttatcaaaacgataaaggcagtcttgcacaacatgaccaaatctaaagcaaagctgacattgtattctagtgttgaagttcatactagtt

SEQ ID NO: 62602 - DNA, 1607 bp, Cannabis sativa
  modified_base (28)..(31): a, c, t, g, unknown or other
tcaaattccctgtggttcgacctcgctnnnntgagtttactacttgattacgtatacttacgtactgttctaaattttcgtaacacttgacaggtcttatcgatggaatgtcgatagtttgtcgaatatgttaaatttttgcccttttttttagtttttttttttatataattttttggtacttttctctaacttacctttttttgtttaaaattgcaggatcgactatgtttcttgttgtatcgtacgatggtgtttggtgtgttgagggttttaattgggtttataaagccgaatgcagtttaacgttgacggttagaactgacacaaccatacaacaaatgcttttttatttagttttcaaactttgagacatatttattttttattttctactaggttatgcttttttaggtagatttttcttttatcttctatatggattatgaatgcataataaatatttgtaagaatattagtttaatttattttttttttattttgccttaatggatacccggtgggttctccataaccgatgggtattcccctaccccgaatccgtaggttattagatggggatgggacggggatgggggtataaataagtagcggggaagggcgggaattgtattccccatacattaacagcccaatttccatctctaattccatgtgaatcatgcatgctaaaatatagtgttcactttgtgactacttttctccttaaatacttaagctttgaaaatttaatcataaaagattaattttcacacaactcaaattccttataattttgatactaatcatatcaaaattaaacactaatttagacatgtgactatgtgtaggggtgaacccacatataggcgaggtggggcagttgcccccctgaaaaaaaaattgagaaaaaatatttatgtattttagctagttataacatatatttttgaataaaagtgacatttatttatgaatataatataagctttggtataatggtaaagttattttatgtacatagtggaggtcatgagttctaatcccaataaaagtatgtttactttagtatttaaattttacttgggaaatttcattttttgaccctaataaaatactccatatcaaaatttataccatccattaatttgtacaaatttagcccattaattacatgaacttcccattttacccttgttttttaaaaaataaaataaaattgataaaaactgaaattgcctctttctctctgtcttccctttctttatcgtcccactctcttgtccctctctcggtttaccattgaatggttgtttctcggtgggcgttggtggaaaaccggagcacaccaaaatatcactgaagaatcttacaccattacaatgggtaagttgtgttttaagtatttgttagactttatgaagtttgctttcgttatatgtgtcgtatttgttggaactagtattttttggtctgaaatgtttgagatctggcagatctgggtttcagtcgaaatctgggtattcccgttgttatcgatgatatatcggtagaatattgatggtttctcgatattctgccacgaaaggtcagtgatgaccattatc

SEQ ID NO: 62603 - DNA, 1025 bp, Cannabis sativa
cataacacttttcttacctcaagtataatgtcaaatgtgcggctgacctatatcaagtggaacgatgctcgatgatctcggatcctatgatcctatgtcacgacaaaggtaaatcaataacggtctactccaaaacactgtctaaaactcgcataaaataacgtaaggtttgcaaccgaatcttatgttgaaagcacccaaaaagaaaatacatttttttggctctaaactatatctcatattgtagagctcttcataaccttcaaaatagtatatagaatttctaaaaaggacacccgggtgaaaacttatggctaaaatacgaaaatcgatgattcctgaaaattgaccatccgaaattccggttggtgcagccctgtaccatccggaattccggttcactacagcaaaaactcgaaaatttaagatcttcaaagtcccaaaacttgctcccaaccttaccaatttttcccaaacttcacataacagttctatatcatgaatacaatatattacaaactccaaaacacaacaattccatcattgaatcaaaatgacatattcaagtaaagaaaactaaattttaggcatcacttaattcaaatcaaactaaacagcccatgcttctactcaattcaaactcaaacaagcataaaaacaatcctaacttaccgtaaccttaatttaacttcacagcccttacaaacctaaaaccctatccaaaacctagtctaaaccttaagaaaataagaataacatggtaagaagcttacctcaagaattggacaccactaggattggttttctagctggaattggtgctgaaatatgctaaaagtttgaatcccccttttgtttccttctaggtcgaaagagaggagagagagaggtctgagactttccttcctaacctcttctttatttaattcttttgtaagaaattaaatcctatttttttttttaaataataatcagcccaaaattaaataaatcaaatcaccttcctgctgggttttatgccctaa

SEQ ID NO: 62604 - DNA, 1899 bp, Cannabis sativa
  modified_base (269)..(275): a, c, t, g, unknown or other
  modified_base (1870)..(1871): a, c, t, g, unknown or other
aatcatcccacttggccttccccagacgatgtgggattgcacagcttacccgatatttctcctcactgatcacgagactactgactgttacagcagagagtatgatcaatcactaaacttggatcttcactagaacaagaacatgactttcattcttcagtttcttcatagtcttccacagagatctaagtattgtaacataattgcgtggccaattgttacaaccattaagtgtagttttgaaaataagggagagagagagagagagnnnnnnngagagagagagagagaagtgagagaaagagagaatttttctgagttttctaacagaaatctgagttgtagaaagtctcttatatagctctctatttatagctaaaggtttagtaaggaaaagggaacctaagcttttttcttccaattaattaattaaataaataaaagaaacaaaatagtcaagacttggtaagaaacctaagcgttgttctaatcagcttggcctacactcctaaatttagatctgaggtaagaaaaatacattcataccacattttatgtcaagatatgatacgaatattatcatctgtgaatcaattattgccgagtataagatacggtaattaccgttttgaaagaaagagtcattactctatactgaaattattgttaggttttttacttatcaattacttcattagataacaacagtgacattggatgcctggttaagcttatcagggttgcttcattagacaacaatgtaaaagagagtactactcttattaaaatcgttgttagattttttacttatcgattagttgtctcatttgaaatgagagttaccaaatactttataaagtatcgagaatagtttgtcttagacaaatacttaaaattgttaatgttgtgatatattgaattaatcaatttgaatatatatttgattatatggttattgttgattgttgatgtgaatttgtattttttgcttttcttattgagtctttgtgacttatgggtactttgtagtgcaggtaagggaaaaggaaaagtaaatcaaccatgagtcagaggttttctagcgaatgtacatattagccttaccgtttgtcgtgcttgttaattgaatcataatttttttctaaaattattagtttattagtataaactaatttataaaaacatacaagtactgcccttacggattagggcattacatatttgttctacactccaagttttgatcctatgttacagtagtagattgcttgactgccatactgaacatggcagattgtttatctttcattgatactgacccttattgcctttgtcaagccttcaagactagcacccaacttggtgaaattttgaatgtcactaaggcttccactctcccttaagcctacaggtcgatcttcctctatttgtgctttgtaagctcttgttttttaaaaaaaaaataagcacaaaatatacaatatttttgaataattataaaacaatattatagaaatctaatgaagaaaaaaaaataaagaaagaaagaaatttctttcctcattttttatttatacaactccttaaatcttaaatcactcattctaagtctcaatctaatttttatggatctttttattttgtatgtggtggtggctattattacaactgtcataatgaacatgccagattgtttctcatttatctcaaatggtagcacagtggctacgtcgaacgaaagttgttgtgtgggaataaagaatgctctcgaagctcaacttggtaaagttttgaatgtaagcaatgtaacatccccgcttcaagcctctattgggcccttacacctacagaatgatgactcttatacacnngtacgccactctagctgcttcctggatt

SEQ ID NO: 62605 - DNA, 743 bp, Cannabis sativa
tgttaaaaccaagtccatcttaaagaaaggtgcttgtaagttggcggctaatggtagggacacatgtacatgaagggaaccttgtattcctcatatgcgtaatttcctccctcgaccaaattgttctcccgtcatggacgacaatattgttgctgagcttttttctaacgaaggtggattggatccacaagttgaccaacctttttgatcatgagattgtttttgtgattttaaaaggtggtgccccttctggcacctgtaaagattagtgagtgtggacccttgaaagtgatgggcgcttctcttacaaatctgtctatcttacccaggctatggaaagagctccctactgtgaggttcctccctcgctttagaataaactttggaacagtaaagtgttggagcaccataagattatgtggtggtgtattctctccagtgccctccctgtcaggtctgtgatcaggaaaatatttcatattgaggatgtgagttgccctttgtgcgggagggaggatgaatctttagaacacctttttcttatttgtgatgtggctttccatgcctacgattatctccttagggtatttatcctatctgtgacaccggaatccgtatgtgggactgggtcaaattcatttgggaccttaaacacaaggggattgttgcgaaggaggttttcctatatgcatctgttgtggttgataccatctagcgcactcaaaatgacaaggtacataata

SEQ ID NO: 62606 - DNA, 2002 bp, Cannabis sativa
  modified_base (1940)..(1949): a, c, t, g, unknown or other
taacatacatggtagtaaatctaactcctggtaaagcatattccaacagattttggttgtggtttaagatattgaagtagctgaatctcacaacaatctctaccccctatcaaaaggtcccaaaagaaccataatcatttctttgcgcacttacattctagatattcatatttttgcttccttgttcataattgcttacctattcttttttattctaatcttagaaaaatcgaatctttcaatcttcttttggttgaagtgatatatctatatattttataaatgaatcttctttagggtttttattatttttcgcctttctatatttctaccgattaatttttttgaaaaattatatatttatttcgttcgatagattttattaggatattgaattctcgtcacgttttttctaatgtgcttgtttgcttactgggggtctcttaatttattaaatcaagtttgttgtaatttcaaattcttaacttaagagcagtagagtggttggtgttcggagattaagaaaatttaattctatgttcttggggagaggctgaattggaaagtaatagttggataatcggggtagttgatctgatttaataactttatcttgcagttgatttgggtgtagtttttttctggtttatcttgagtttgtaaaaaggtttcttggttatttagtcttcttgcttggatgttggtttagttttgaaggggagattttgatggtaattatagttttttaattctagatcattttgagcttttgcaattttagtttttaagttgatatgatggttagttggtcttttctgttagtttgaatgcttttattttgttttgttttgttttttttcaggaatgaaagtatcaatttgatgaatgagttgggccattgtttatggctttggtgccttttcaaggtttttgagcctaatatatggctggcccctaattatttagggtaattaggttaaaatattaagatatcatgaaatataaaatattatgaaatttaaagttaaaagtgtttgcaaagattttactaattagttctaaaagggccgacttttgtaaatgtatgatttaaggaaaaatgtaagtgaatctagtattatttagggggtttaaagattaaatagtaataactgtgactcattgtgttcaaggtatgatttatgaaaatgtttaaaaaaatttaggtattatttaagaggattaaagatttaaatgataatagatgtgatggcctaatgtttaattaggatggattgggatctatctatttgcaaataggggaagttgtaaaaattatgagtaatcagtctctaaggatataatatgaaatttattaagtaaatagagtaacataaataatttggagggctctaatattagttatataatcaaaaaataaggaaaaattaaactataatactcaaattggatggtgattatattagcagattcattgtacttcaatttccagaaattacaaatgacaataaatatgagttttattatagataccgtaatattatttagtgtataaattataaatgtggagattttaaaatcaagggaggtggggacattaatagtgaattgggaatattttgtttattttattattgaaataaatgggcattaaaggataacgaagtattgagtttttttttttttgtttttttttaataaaaatcctaagatctattaattaataaattcgttcaaaacaatagaatgcacttcagaggcacaatcctccaactgaagcacacgacctatagagaaacaagagtctcttgccaagcaatgagccaacttatttgcagatcattttacaatacacaaattgtgaaggcataaaataccgctctgagtcgctttgacacacactaacctatttgtttccaacatgactctatcccacgaannnnnnnnnntccaactcaatgcttctttaatgcctattatctcaacaatttcgggttgaaca

SEQ ID NO: 62607 - DNA, 663 bp, Cannabis sativa
agggcataaaacccaacagtatcgactatcgggaactaaacaagttgacgatcaataataaatacctcttacataaaatcgatgatttgttcgatcatcttcagggaaagacaatattttcaaagattgacctacgatccggttatcatcaactcagaattcgggaagaagatataccaaagaaagcatttcgaaccagatatggacactacgagtttctggttatgtcattcatattgactaattcccctgcggcctttatgaatctcatgaatagggtattcaaggatttcctcgataattgcgtcatagtgtttatcgatgacatccttgtgtactctcagtcagacgaggagcacgagcatcatcttcgaatggtattacagggacttagggatcataaattgtattcaaagttcaaaaagtgtgaattctagttgtcagaggtatcttttctatggcatattgtcggaaagaatggaattatggttgatccaagcaagattgagtcagtgaagaattaaccgaggccaaaatttgtgacagaaatttgaagtgggtattatcgacgtttcgtcgagggattctctaagatttctatgctactgaccgagttaactacgaaaaatcagcgattcttatggtcagacaaatgtgaagcaa

SEQ ID NO: 62608 - DNA, 683 bp, Cannabis sativa
cagccaaagcaaaccagttcgaaacttcttactgtcattacaaaattgttttccactctcgacataaatctagaaaagacagatcctcaaagtctatcttacaatgttgactaaaggatatgaatgaaaatgttgttagcgaaaaacaaagtaaggataaaattatttgactaaaggaatataaagattcttttggaataaaatagaaaatttatctaaaggaatagagattttatatttaaaaaatagggtttttttcagtaattgaataaaaaagatgaatacggctaagcgaatgataactttatttagaaaaaataaagtaaggagaaagtgattctactaaaggaatgtaagattattttgaagaagatagagaatttgactaaaggaataaaaagactatttggacaaaattaaattaggagaaaatgattttactaaaggaacaaaataaattatttcgagaaaataaataatttggctaaaggaataataattttgtttggataagacaagagttaggagaaaatgattcaacagaaatataagattttttttgaggaaaataaagttattggctaagggaactaaaatttattttgaaaagatagaaatgggagaaaatgatttaactaaaagattattttgagaaaatataagattacttactattactagca

SEQ ID NO: 62609 - DNA, 894 bp, Cannabis sativa
agtttgctggtgtacgagtatgtaaccaataggagtctgaatcagtttctttttggtaaattttctttctattattctttctctacattagttctcaattttaatgattacaatacaaagtaacaaaacaaatggtcctaatacatttttcttttgacttgtgaaatgcagagaagaacatgtttcacattcagaattggaagcagtagtttaacatcattgtaggaacagcagagggcccatcttcatggaggttctaagttaagaataatccagagggacattaaaagcagaaatgaaggacgaaagagctattatcaatccaattgtatgcccaacctcctccttctaagagtttattcataaccaattcaagaatgatacgtcactagcgtatctatggacttaagtttttcaagttctgattctaaattagaaaagtgataatgtgatcatgttgatttcataacagcaaaacagaatgtaggtgtgggtggtaaaagaggaattctcaattggaactattatccaaaataaaataaataaaacgaaaaattcaaaacaaaaactccctttccctttcaatcatggaatgaaaccttttgaccacctaaaatcgcaagtataaacaatcattgaaatgaaaattgcagataaagcgaaggagaaggaatacctaatgctcatcatgtccatggccatggccctcccaaggatgtctccaacccaatactacaggaccatcttgcttggctctgtacagaacccaaaaccacatcatagcacacatgcccttcccagtaattacgtgccaccgcttaggtgcgtacatcgttaatcccttgtacgtcgtcccttctccatgcccacctcccatcgcttctctcactctct

SEQ ID NO: 62610 - DNA, 1558 bp, Cannabis sativa
cactctttccctacacgagtagcagaaattggggaggcttttgtattgaaagctgatccatttaggttcaggaataccacggaaatgtatggtcataccccgacgtaaaggcttagtgatgtcgaataagacacgaagacggagataaggaccaaagctcttcagcaaagaaaggggaaatatttcaataagttctccgatctcgtcagcaatgaattgcgccaattgagggctttttcgaccaaacggaatcctatgggcctggatccaaaagggaacataccgaacaaaatcgggagttggagtaatggacacagcaggatgggtaaaaaccatgaggaacttatcaaagtgccatggctgttcctcaagaacacgacgactgtcttcgtcacattgaaaagaggctaggaataatccagagtggtattcagaaatttggactggcaatctaagagtccaagcttcagacatagctttctcaatccaagaaggtttggcagacttgggggacaacaatttaaagaacaaacataaagagttggactaattgggggaatggatggaaatgtgatcgaaatcgtgaacaagactctcttcatcatcaagagcggtaaaaggagtaggggttcgagaagaggacgccattaaaaccagaaacgaagggatgacagatttggtagaagaaggagaaaatgatggtgggggaagacattgcaagcaggtatttaaatacacaataaaggaagcaaacgatagaagaagatacctggagaagaaagggcgcctcgaagagagaaacggtctctgaaccacctcttcaaaacctgcatagactgtctggattcggagaagatatgcaatgatgagctttgggtttaagctgaagagataccaattgacggttggtttatctctggaaattcgacttgggaagagaaatagatagatagtttgcaggaacattaattgtgaaaaagatggagccgccaaaattaaatgaaggtgtgaggagaaagggtattaaaaactgtttgagcttgagaaattaggggaagtttcataatgattagggtgacgtctgggataataaatgcgaaagttagggaaagggtaattaattgcgacaacttgatctaaagaggaggaagcagaaaccaaatgagaatggaaaggcatcaaacaaaaccttgctgagactgaaccagaccagagcctgtaggaaggttcaagaagaagaaaattttctaccatgtgcatttttttttgtttttcaatttagttatgctattttacataactttttttcaaatattttcttttctttttagattgttttttttccttttaattgctagctcaactagctgcttattatttacctttcaatagtcatatatgtatatatattcaaatcttaatgttatcatctaaggagtaattagatatctatataggctatacttaatatagtggtttaccaaagtaacttgttactatcttaggagtgaccagttacctatattataagataaggaaattatacttactatgagat

SEQ ID NO: 62611 - DNA, 969 bp, Cannabis sativa
aaagaggtgatattattttgtacgtgcggtacggtatgagattcattaaaatatctgacaagtattgtgtaatttttttataatttacgtatattattgaaaaaccccctaaatgaaacccctattacaactagcgctgcaacaaaaaatcgtatagaaactcctattacaactagcgttgcaaccactttagaaacttaaaccgtaaatttaaaaagaaaaattaaaaaaaaaaatagtatatggagtaattcccctataaataattagttataacaaattattattatacaataaataatttattaattaattaagttttgaaatgcattaattaaacccttcaaaataaaatttaataagtatttttaaggtgttttaatttttagagtaaattaaatactattttttaagagtaaaaaaaataatgtaatgttattacaaattaagaaatttaatattttactaatataatttattggatttaataaatatttagtattaaaatatttttaatatattaataaaataataaaaaatataaaatttaatataatttttagtgttgtaattaaaattaaaaaaaagttaataataatgaatcgcctcattcctctctcttgttttatcggctgtccaccatctcttccatttaagaattcatggacacacagtctaaattggagagttttttggcaagcctgaggcaattgtatagacaataaacttgaggacaagatattggagaatactattgtattgatcttcttgattgatgccaaagtttttctcattcccacatcaacgtcttcttctttgaggggttcaagagcagtcgtctgaaagtagtttggttcggctcaacgacgtcattcgtttcagatttttgttttcatttattaatttataattattagtttaattctaattaatatttttatggggttataattataaggagttcattcc

SEQ ID NO: 62612 - DNA, 974 bp, Cannabis sativa
aaaggcttgttttgtagcagtgtaaagctacactttatcagagacattattgccagcaagaaagttaaagtgaaagattaacacacatgaaaatccagctgatatgttcacgaaatgtgtcactggtgagaagtgttaggctatgcctaaagctgctgaacatagaagattattgatcctccattcttggaggatgactttgctgatggaatgattttgcccatttgttttgctcaaagttcacactcttgtataagtatataaaccaggtgaaattggtggtgtttatatacttgtgcaagttagatatgtttgttagttaaattctattaagtttgttggttcgggtatacttgtattgggtctatatataaagaccatttgctattcaatagcttgagagaaaaagattgagaatgtgtgctattgtaaagggtttgagaatgtataactcatgtcgctcaagtgagccattgcagtaggagcaagactctattttgttcatgttttatgtccttgttgtgtttcaactttgagcattgtcctcaatcaataaaggcaaagcatcaaggcagtttcacccaaagagtagatctaagttttctgcttgtgattgaaccttgtaactcatgtgtttccatactctgtttttattattttctttttatgcattattagttttattttttttgttattctttgatttcagtgtgtttattatattcttggagggtgattaaatcaccacaatactaaaattaaattattcagagcttgtatctatgttgtatctatgttgtgactaaactttatcactagaggtaggtgtttgtggtagtgatatttttattacttgatgataagtcaaaaaaaaacctataactaaacaaacttgtacagtagtgataatataaccattgaaacctcctctatatatataaatatttacaaagtttggtttgattaattagttt

SEQ ID NO: 62613 - DNA, 1135 bp, Cannabis sativa
ggcggagggggtccgcctctaataggtccgccgctaaagggttaaattgttgtagtgcatccatcagcattggtccactgcgtagcatctttgagagttgcactgagaaggatggtgtttacaagctgggtttggtgctgtttgtgatggttgttttgactaggaaagaggagaagaccctagttccgccatttattatgagaatggctgacaaccttctttttttctaacagtgcatgtagggaaaaatttctttaacttgttgaaagatacttggagtaaggacttcgtagaaaagaagaagcatatggataagaagattgaaaagggaacaactcagaaggagtccaagtacttagtctatggatatgttgtagcattgcagtattgggcatatgagtccatcttggagcttgctgagaaatttgcgatcagaaaattgcgcaactttcctagaatggtgaactgggagagtaaggaggcgcaactcggcaaagaggaagtcatcagattgtttgcaagaaacgtaagattttgaattcattttgtttgttcatgtttatttatttatttcattttaatccaagtctaataatctttttgttcttatttgcagttgacattgtactccgttttatgtccgcgagctcatgaggtcgagtttttgagcaacgtcactagaggtgaggcgcctctatttgtagatatggaggaattgattattggcagtgatggagggcctactaaggatagtttacgcagccaagcttcgaagcttgcacaggcgctaaaacaacgagcggaggaagctagaatcttcagagctgatacaccaccgaactctccacgatcaaatacccgttctgttccactgcctgcacaatgccccattctgcatctatgcctgagtcagcatttattcccagtacttcacagcctcaagaaccaatatcttctgccatattggcaagattaaagcgggttgagaaggaacaacttgctttgaagtaagggtagactgatattctgaaagggcagatagagataatgagttacttgaagaccctattgccacttatgggagatccgagaaggcccaatgtaaaggcagagccacagccagaccctgtctctc

SEQ ID NO: 62614 - DNA, 1501 bp, Cannabis sativa
aaaaaaaaaaaaagaagaattaattttttttttttttttttaatttggagtttactctccctctaccccccattccctccaaaaatcctcccaaccaaacatagagtaatgataactttaatgataaaacttaattttgggtaaacagggtcgattctagactaaggcgggctaggcccgcgtatagggcccactcctattaggggtccaaatgaaaaaaaaaaccttttgataaatatatattttttttaataatttttaaaaatatcatttgtcattataaaaagggccaaaaattttattttttctaagacccaaattaagtgagggccaaccttggggtaaacttaaatttagtgtgaaacagcagcttgatgagcctttaaaagctttcttaagccacttcaacacgtcaacaactataggttaaaatttgaatgataatattcaatttgtagttctacaactaagaatcattgcaggagacgagctgtgggatgatttacaaggaatacttgtaagatcaataaacgttttcaatgagcgagctcaaatttatatttaaaaagaggaatcaattaatttcagtttttattgcttacatttgtgttaattaattagtctttaaaatattattttaatctttatttgtttaatatttaacatgatatttatttttaaattacttaatcaaagtatgttttgtatattgttacatgagttagctataattttattacttttactattaattacaattttaagttatcaagttatttgacttataaattttttgatgttattggggttataataattatttaaatgattgattgaatgcccgtggatctactacagacactaattgcatttaacaagaaaagttagtttcacattttctttttagtttattctggttggaaatattttatttatggtaactattgtttgcaatttctataatttttatccattaatgcttattttggttatttaaaagaataaatttaaaataatatttatttatttattatttttatgtttcatcccactaatgtatagtttgtttatgtgccagttaaaatactaatgtcccttcaagcttttagagaaaggataacaagttttcaaaacaaattgcgggatgctgatcacattggactgcaatctgttaccaagattttacaactgtaatttattttttagtgaagtttccctactttaatgattttacgatcattgttaaaagtttttacaagtttttcatctagatttccaagagtgttcctaatatgtgttgctcatggattagttgtgcatgctcttcggatggatgaacaacttgtttggctagatatgatgatccaggtttttgttggatgtatagaagtatcgtattaatcatgacatgtataatatttatttgatgaacttgatcataactagcttgtataacgttattatatttttaatgaatttattcattgtttttttttttttt

SEQ ID NO: 62615 - DNA, 2212 bp, Cannabis sativa
tgtctaattttttaaactttgatccgacctctaaaaaaattttatcgtgttcgtattgacccacttttactagaagctagagttgtagaggaaataataaatttgaggttccaattaaaaatttatctatagatatataattttttttatatataataaaaattataatttttaacttaatattgaatctttcaaaaaaaaaagaaaaataatcactatatatatttacatagttatattattataaataatttttttattttatttaaaaaaatcgtgtcaaacatgtcaacttcgtgttaaacgaatcatgttgtatttgatttattttgtgttaagtcgtgtcgatcacttgcacttaatttgttcaactctaaatcataaaatccgtatcatgttcgtgttcatatgccgtgtggaaacttgttttgctactccttatttaatctcaagaacaaggtcaaggtccagttttttctataaggagtttctccaatataattaaagagattaccaacaccaataatccaattgtgtacaccaatgggacaattaagaaagaaaccaccctaaagacactcaagctctcaacacaccaacatggtttacaaaactttctctctatatataggtctctttcgtacacaattttgctcttaatttgctctcaattaataatcttaagttcttaacctcttgaataatgaggactccaactatatatagaagttagatgacattccaactaactaacataagtgtacatagctaacttaataactttcaactaacaaaactcccaaaacagtactttaggttgttagattttataaatgatgatacttagtacccgatgtattatttaatattatgtataatttaatattaggtcctattttaattacaaatggaaaaatactaaaagacattattagtgtttaaatccacttaaaagtatcataccattattagtgtaattaagtattaggttccatataatttaatttaataatgactataaatatcactaactattaacaagtcactatttttaagtagtgttaggcatcactatattggtagagctatgaagctctgtaaaccactagctcgaattggagaaaaattgtgatgaccaagaatttaattagaagcaaaatggctttgagggagtttactagcttacattttagcatcgcaaatatttgctccaagcttttggccaagggattatacgatgaggaaatagttttttttcatttgggatagaataagtgctccaaaataaaaatttatcaattggttggctagttggaaaagactccaaatcagggatcggttgttcaagtttggcttaatcactaatgctaattgtttactttgtgatgaggagttggagacacaccaccatctccaccatctcttctttgggtgtagagatgagcatcagttagtttggtcggtttttttttttatataaaaatctcaaattttgtttttggtttggatttgtacaatccgaaaaccgaccgaccaatccagaacctatcttaaaaccgaccgttttgaacctcggtttggtcgatttaaaccgccaaactgaacttcttctttttctgtaaaatatgatccaatttattgtataagcacattattctacattctacaactgtaatacaaattaattgttcaaaaactaattgtcttattcttataactttaatattaattaaataataatatattattatatattataagtaactaaaatacataaaggaaaaaattaataaattaattttttcggttccgatttttttagtcgatttactacccaaaaaaattgatcgttcaatagcggtttcaaccgttagcgattttttcgattttcaatttcgacgatttcagttctaacagtgttcagtaagtcagtttacaattttttttttcagttttctgaatttcatgcttagccctatttgggtgtagatacaatacacaaattcttgtgaaggtttgtgattgggctggttttaatccccatttgggtgagaaattggagaagatcgagatgtaaacgtggaatctatacggtcgttttgaatggtttggtctacaatatttgggaggctaagaacaatgccctttataatagttaagtttatacggtacatttcattgtaaaagaaattcaaaaagaaatttgtataag

SEQ ID NO: 62616 - DNA, 767 bp, Cannabis sativa
aaaagtcacatactcaaattatatttctatttcatgtggtattaatgtactcattatcattttcaatatttatacttatattataatttctcttattagatttatttaattttgtggagactttttctactattttgatctataattatcgaattaaaaaaattacatttaattttttaaaaaacaatatttttattagcgggaactatagctcccatattaatacaattgggtgcgtccctattctcaaccgaaaaagtggtatccacccgttgttagtacataatgtcaagatcaatgttgatgcagtgaaaacctttagtaaagacaagtgcagcacgacaacatttgcgtggaacatgatcttttctcgataagcatcttgatagtatcacgactgagttattggtcttcgaagaaggctcttcgagtctgattgtgctgttgcaatttctcttctcttttcctccaatccaatgactactatggtaaccttgatgccattctttggtctatcaagaacagcattcctctctacatctttgctggtttcagcctcatctttagagaatctaacatagttactcatttggtatactcttatgctagtgctgccttagttaaagacttgtcatttcctttgtaaattttctccctcttgtgggtaatccattttcattaaaagaataaagaattaacaaatcttcaatggaaatgatataaagatagaatggtatattttttaagaaaaattacaaacttcaata

SEQ ID NO: 62617 - DNA, 621 bp, Cannabis sativa
gtacggaaagatttctcatgaagtaattatatcagatgatgctctcaaagagtgcgcctctcccatattcaagaaaattgaccttgctcatgatcaacatcattaaagtcaagctcacgcaatatagtatgtgtattgtacatataattgtatatacatgtactactattttatttattagtagtttttaaggtggtaaaaatatgtgtatatactatattgattgagattttctgtaactacttaatctttttattataacttataataagtgtttaggatgaatacttttaagtgattagggtgttaatgaactttagtccacatcacaaattatttgtatttatgtgttgaaccaagttacaataatgatgtttttgtttatgcaaggatcatttaagagtctttttaactcttcgtgcccaaaatccttctaatccttttacagtaaatttatctctctatttataggaaaaatggatgagtcttttgaaaaggggcttagcccgctcctccaaccagctgtagtctactaggctatatttcttaacaaggaaatgcctttttgttgcgggtttgttggataggctagacaagctatagtatactaacttctaagtc

SEQ ID NO: 62618 - DNA, 1687 bp, Cannabis sativa
accaaataatagagcttgaaacaacttttccaacgatatataaaacgtccaaaacaaaattcgaagtcaaaaattaacttgaagattcaaactttattttctatcacaaacgcaacgtgttaagcaactaaaacttagaatttttcacctattgtatcttacaattctaaaaattcatgctaaatttgtcaaattcatcttatttaacatattttctctcatttcaactcgtatgatgtatttgactattaaaacttaaaacaaaaagaaaataagtgtaaatctgaacaaaaagaaataaaaactactaaaatatatactaaaatagactctaaaaatacataaaaataaacttatcaataagtatgcttattctattgttaggtctgttaaggttgatttgcaactctttatctcatttccctagtactactgaaattgtaatgtattggttcataatttagctaaaaggactttggggctagatagggaagtcatttggaatgtatccaatttcttaacactttgtaacatgaaatcatgaacttattgtgatatacacttgcaagttgtttatcaacggtaacattcctcaacaacccttacaagacattaatgaggtagtcaatgaagctgatggtgtggaagggtctgttgaacctctccataacaacaatgtggaagttaatgctactgaaactgagggaggatctgctataccgcctcctaatggtgtcactgaaaagtctaatgaggagcttgaagctctgcgtaacaactttttgcaatctatgaccattgatttggaaccaaatattgagcttacggctgaagtagtaagcacaggagttctagctagttttttcgacgggaagggagtgtcgagaactaaactgaaagagattctcagtcgtatctggaagctaaaaaggaactggagattcaagacaatgaagcctggtgtttggggtattttctttgacaaacctgaagactgtcaggatgtgcttagaaaccggtcgtggattattaatgggaagctccttattatcaaagaatggccggaggacggagattggttcaatgcggatatgcgaaaagcaattttctgggttttggtatccgggttaccaaccccttacctcaatggtgtcaactcacgcactctggcggctaaggcgggtcgattcattcgaagtgatctggcaaatcaaaaaacagtcattagaagaggattcctgaaattccaagtcgaaatagacacatcccttcagctggtctctggtttctttttggatattaaaagaggaaggaaagaatggattctattcaggtactttaaacttccaaagctatgttacaactgtggttatcttggtcatgataaaaaaatgtgttatcgatcaacggcgtatgcttttcctcctactggagctgctgtcccagcatacgggccatggatgaaggcggaaatggctgtttacagttgtttcaataccagaaatcagttagattacttcagagaagggagtgaccggacctctgctcaggcaagaactcctccggctacggcatcaaactcaaaatcgatgggaaagagacctgtccaggagcacctcagcaagcagagtcagcaaaaaattaattgcagcaaaccaacaaggaaagtaatcaggctagcaagcaa

SEQ ID NO: 62619 - DNA, 1005 bp, Cannabis sativa
  modified_base (328)..(343): a, c, t, g, unknown or other
  modified_base (885)..(886): a, c, t, g, unknown or other
atatatcgattactataaatcacttatcgcttactaaatttgactcgttgtcgttgactaaaagtgaggtcaagattttggtactttcattgagagaaggatcctgaatcgctctttattcaacatataaccacaaatctgatggtgcaaactaatagatgcctaactgatccagcaaattcacagacggtggatccagcattgtagaatccaggaaacacaaggattccaccaactgttgatcctggacagtcggcgaacgtggggaatggtgtaacaactccaatggatgaaatcgctccgagtgtgcaagagactgggaataacnnnnnnnnnnnnnnnnagggcattcataacacaactgttcccctggaaccaacacccagacgaccattggatatgctactgagttacaaaatcttcgcgacgctcttggactcatgcagggtcataacaataccctacatcatgatcaggatgaactccgcactgcggtaaatctcgtgttcgaagaacaaaggtgtatgtttgccgaatggagggatagtgagatggaggcattaagggctcaccatgcagagatcgaaaatcgtagtcggcaggctaccgtgctaatacaaaaagcctaccaaactgtaggtcagcacccgccgaacgtcattcccctaggtgagacagacaaagatccagcgatgaatacttctcaaaatgcaaatggtcagccgccctatccccggtcacgagttccactcgtgggccaagcagtaggcgggcagtccttgtctagtaattcatcaggagaagtcagacctaatggttcaaaccagataaatggtgccattccacccgtcaaccaagcgaatcaatcgctgaggcagccaggcnnttctgtattcgaaaggttgggagcgacccatgacctaaggaatgatctgaatagaagaatgggattagacgatcagtatgttacgacaatctttgtaacgtccccgcttcaagcctcca

SEQ ID NO: 62620 - DNA, 902 bp, Cannabis sativa
tgtaatatgtgttgtcctcagggtcaatccccctttttgtgtctctgaagggtttatcaaaaggatttcggggaattcgggcataaatcatatcgtgaggatgcattcaggctttacactatttagctttagagatgaagagactagagatgttgttttggaaactaaggtcatacactttgaaaaaaaatcggttgtggttagatcttggtcctctgacttggactctttgaagatggtaaaaaatgtctctatttggatttgtcttaatggtctttgattgtaatacttgggaaggaatactctaagtgctcttgtgagtactatagggaacctgataatgattgataaagttatcagagatcgctcaatgatcaaatttgctagggtacttgttgatgtgtctattttcaataagcctcctactagtatcaactttgtcattgaaagaaactaattattggagcaagctattgaatacgagtggttgcctacttcttgtgctgcttgtgggctattgggacacaatatcaacacatgtcccaaagacaaaggtctggtctggactagaaaagctttatcgaatccaggcaaagggaaagagattgagaacaagcctttggaggaaaaaactaatctgactgctattagtaaccctgctacagatcctattactgtagatgagtagaaagagcataagaagaagccagagaaaatggaagagatgaacactgaggttgataaagctgaacttcaagaagttgttatgcaatagaatttctcagatggtcaatggatcactcccagcagaaaaggaacaaagaaacaatctagctcaaaaaccgatttgccagatgctattatagcaaacacgtataaggctctacgggaacctttgacct

SEQ ID NO: 62621 - DNA, 632 bp, Cannabis sativa
ggtttgatgacaaaagttaagaaactttatcaaagtataatatgctatcaaggttatccatagtggagtgttatgaaagctggtctgagattaagtgggccctaaagaaaaatttttttggatcatttatataaaaaaatatgtagttatttggaaagttactaaaatatatgtataattttaaatgaaaaatatttttttggatcttgaattggatgagctctaagcacggatttagaccaccttagcccaaacacaaccttatatgattaactttttttttaaaaaaaaataaaagtataccaccaaattatttggtgaaaggagaaaatttattcgtagcacgatttgtatgtttaatgattaacttattatttaaaatttgtatcataaaatatatttaatatttccttctttctaaactcaatccagcacaaataagctggaacactacatagatttataagacttattgtttttcttaatccaaatcttaataacaattattgtatgtaaataaatatttaaaaaaggaacaatttataatttggtcaaagttgtaatatggaatatgtatatctgttaaaaaaataagaattaagtttgatagtggtatcgatcattttattaaa

SEQ ID NO: 62622 - DNA, 1035 bp, Cannabis sativa
ccaagtcttcatggtacaaaataccaaaatatagttagttggaaacgagttatcaaagtccaaacttctgtcccggagttcctaaagttaacttgggtaaagggctagggacccctccaaggtttagttgctatgactcgagactactcaactctgagatgtcatctttcttgtcacgtgtcaaatattgatgtccacatcatcaaggatacttttggtgtaaatattttcccccaagttaacttacacttgcgtgaggttgacttaatgacgtgaactaagcctatttctctcaaaactaccagttgggcatcaattttgacaatcttggacaattgtttctattcgtcaagcattcccactgagagtaggatttcgaattcccattccttgttaaatagtggaattcaaaattgtaagtataaaaggagaagaggaaagatgatcatcttttcttatcacctatcctttcctttcaacttaaaatttagatgactccttaagtgattttctttgatttgggatacttctgaaatgtgtcaacatctgaatgtcaacacttactctgatcttttggttgttgtcttcccattgactctcttgtcacactgtgcgtttatgtggttatagatgtagtctttgtcttctcttaggttgtagccttgaagttctttagcattcccttagttatgctattagtgaaggtggtcttgttcatctcctcagtttggtaatggatgaggcctttgtcaactttttaaatttacagtataagaggcatttaacatcccctcaactttgcagcggaggaggccttcaacatccccacaactttgcagcggccttcattatctcctcaactttacagcgaaggaggtctttgtcatctcctcaacttcatagtggaggaggtcttcatcatctcctcaactttacagcagaggaggtcttcttgacgactatcaatgatgtgctatagcagttgttggctattctttggtcaattgagtgtgtgaccaactcccaaattaatat

SEQ ID NO: 62623 - DNA, 1289 bp, Cannabis sativa
tagcaaacaatcaagtatggtcaattgaatttttatgaatttgcattaaacatgatgtattcccgtacgccataggcctaataggtccaattatcaatagattggttgatgatcacatccgaagaattgtcactagtcagaagcatgactgttagcatgagtcaaacaaaccctcgtacctacacattaacatgttcaccaacctgtgattgcttactggtagcacaagtgaaaggacaaaaacaagactatatgctctagaaatattaaatttaggctaattaggatatttgtccctgaactttgatatgtgtaccaaatcatgccccctgaacttttctggtcattaaaaattctcctgaactattgagattattggatttaaggatttttgtttaattttagtatggaaagtctaacatagatgaaagttcagagagcgtgatttagcacatgtcaaagtacgagaggcgtgatttagtaaatattaaaatctaaggagcatgatttagtacataaacaatcactaaattagtaaaattgaatgaaattggacaaaagactttaaattcgataatctcaatagtttagacttttagagaaaaattttaacggtcagaaaaagttaagggagcatgatttggtatatatcaaaatttagggggcaaaaattctaattaagccttaaatttaaacaagtcataacattttcaatgccacaaaggccataccttcaaaaagttaaagaaaggttagttgtttgttgtagggaaaacaaacagaatgggaacttgtagctaagatgtttctgcttgacatctattttttaagacattttctttcaaagttccaaaacagtcatctatcttgtagcccataacttctctgaacaacaataaatcataaccatagttgtaaagttccaaaaaagtcatgcttttaaaagacaaatttggtgaaggaaagtagctattctacatcacagaatcaaagaacattatatcataccaactaactagggaaaggataaaagagaagtgaacgttggaaagacattcattataggctatctgttgatatgtccaaaaatagatactcatatgaggatatggatatattatggaagtcttatgtgatgttccatattcttaagcggtacaagcagactgctctcgtccaccaagtataaacacaagtaatgaaaaaggcgctattcaagtaaatgtgaaagtgaaacttatgtgagaattggttcttgttgctattaaggttctgagcttagaataagc

SEQ ID NO: 62624 - DNA, 1361 bp, Cannabis sativa
tccaaaatagtatttaccctaacataaaaaaaaatcagccaaaaaaataaatatataaaaaggaaagcacaaaaaaatgagaggtgacatcctagaaaagttttgccacatggtatattttgtcatttaacaaaagtaaaggtctaatcagtaatttttacaaaacataggatccaaaatagtatttacccaaacataaaaaaaaaattctcagcaaaaaaaatcaatacataaaaaggaaagcacaaaaaaatgagaggtgacatcctagaaaagttgtaccacatgttatcctttttcttatttttttatatgttttatttattttttaaaattttgataattttactcataagtgagttcttaagaaaaaattctacataattttaaaaaagagtgttctattatagactatatattattgatgattattttcccctctctattttgtcccaaagttagggctatattattttttatggtgattaaagaatttaatcttactcaattaattttttttagaagtatatttttttttgtatttttcttacaatcaatatatcaatataaaggatagcataagaggagtctatgtaacatttacattttttcttcctatttttctaataatatgacacatctttttattttatttgaaaaataatccacacatataaaataaaagtctcatatcgtttaaaatttttttaggtattatttatgttggttataaataaaattttagtttcgtttatttccttaaattattaatattttatttttagtgattaatttttttaataaattttttatatatttattaagataattttattttaagaattttatttgtattgttcaatattcttatattgttatttgttcaagttaaaaaaaaatttttacaactaaaatattttctcttaatttttatttgttcaaaagtaaaattttattttttcatttgcaaaaagtaaatatcaatattatatatgactgtttgaacacttttgattatatattttttcgttatgtttttttattgttttaattttataatattaaaacgtattgtttctacaaattattttttttttattttaatagtttcgctattaactttttttgtctattaactttttttgtaagtttattttgtaagtttagtttaatgtaagtttagtttaaattatttatatggtcaaatcagagataaaaataagtatttttcttttttaccttaataaagaaaaataaatagtgtttctatattattttcaatttattttaaaattttgtgtgagtttcatatcaatatcaatgtatatatataatcaatctatatatataatgttattgtt

SEQ ID NO: 62625 - DNA, 1428 bp, Cannabis sativa
agttattataagtaaaaattcattctctagattctaaaatgtcatccattggctcatgaaatgcaggggtatttatagaaatctcttcattcacgttctttttgtgctggtcttactagaagagatctgactattgatctggtaggtggccgctccatcatacagtgtgtagagatgacgacatgtaccgtctggacactccatacgtgtcactcaaagacctttcctttttggactgctcctgtgaatgactcctggagaatgggccagtacgatggtgtgcattccttgtactatggcctgacgttggggacaaaacttggcttcgtaccaaataaaagcatggtcgtcacttttgtagtatgatagatacagacggagctcccccgcgacatcatacaggaatacaacttagtctaaatccttctacatccctcataggcgtactcggggaagcccttggcctccgtagggcacttcctttctgctcccaggaataggaaatgtcatgcgcgctgatgctccacatgtccccacagaggtatcctttgcggatgcccctcacgggagctagggctggaggcattattcagttgatgattatattggtttcttctgttagatttcacatgtcatgctatcaaaaatctggacaatagttagtaataagaagttcgaaaataacgagaataatttatatggatgttccttaaatttaattgtatgacttggactttgtaagcatttaaattgctcatacataaaaaaatcataatgtaaaaaattagtatttttgtagtatataatgtggtgcggtttgaaccatgactattaaattcaaaactacaaactgcactgtaccacacgatttggtgaagacataaattgtaaccgcaccacaaaggattttaaaccatatttttttgtacggtgtggcgtggtgcaggcggttatgcagtgtaagtggtttgatgaacacccttacacaaaagaacataagggcttatcagggctagattataatagtttcgagaattgctctatatgttcctctgtgaatgtagactgtccatgattgatgcttggctgtgaagaagaattaggtacagattgtaaggctctctcggatctagtgggctttccatcaagcggttttccacgtatttttgttagcatgtctcacgtgtatgccaatattttttgcagaaatcacaccatgacttcttattcttgtcattgttggagtcagctcctttgacaaacaaagtagaggtgtcattacctgaaatagaggctgattcactgttggacatcactttcatgcaactttcttctacttggattttagaaaaaacatcacgaatcgaaggtaataatggtcgatgtccaagaattctgctcttggcctcatccatattcttattaatc

SEQ ID NO: 62626 - DNA, 737 bp, Cannabis sativa
taattttctctttccctctctctctctgtctttccatttctctctccgactttccctcttcgtccctgcccaaaaacaaaacaaccgaacaacgaaacccaacccgacgacgacgaacacatacgccgaacccaacaaccctcttcttcccactctatttttccctctctctgtctatctatctctgtttttcctctttctctctctctcgatcagtcttgaatttgacccgtgctcgtcgaaacaaccacgaacaacaacgaacagtcgccaacatcagtacccgtgctcgtcgaaaccgaacagaggccattgccaccacaaccacgaactgtcaccaccaccacaaagctcagtcaaaggtaatttttttttttgaaaaagaaattaattttttcatagaattggatgtcaattattgcaagttgttgagattagtagaatttttgtagattttgtgctctttcttgtggtaggttgtatatttttgatatgtttcaatagtgtttgtgtgtttttaaagcgttatcgatgcaatgtcgataggatatcgatatatgtggttttttgtttgtgtgtttggacattgttgtcgacaggttgtcgatatagtgaaacttgggaaaatcttcactagatgagttaaagcaaaaagttggaaatggcgagttagtattggtcaaagctaaaggaacgacccgtatcaagtttcattcaaaaagatttttacttttaca

SEQ ID NO: 62627 - DNA, 1461 bp, Cannabis sativa
tgtttgccatgagtaacaataaggttccgggaccagatgggatgtccgttcttttcttcaagcactattgggaaactgtgggtatggacttttgagatgcagtatctgacttttttcggacaggaagaatgcataagggtgtcaatgctacgaatattgtgcttatccccaaggttcaaaagttgaaaagaaccaaccagtacaggcctatctccctgtgtaacgttatgtataaggtcatctctaaaatcattgcccatagaattaagccccttctcccttcccttatttgtcctacccaagcagcttttgtcccaagaaggaacattcaggacaataatgtgattatccaagaaatcatccactccttcaataggaaaaaaggaaaagaaggtttctttgccataaaaattgaccttatgaaagcgtatgacaagttgagttggaactttattgaccaggtgcttgctggttttggagcgcccttaaaatttagaggttggatctcccaatgtatgctaccatctcgctcaaaatttgcattaatggagggcagtttagtaaaattataccctcatgtggccttcgctagggcaaccctttatccccttacctctttatttgtgcagcggaaattctgttcagacttttgattgacgcccaagacaatggctctattaaggacattaagctcagtagagggggcccggttatctctcatatcttctttgcggatgatttattcttggtgggaagagcgaacatggaggaagtcaaaggttactggcattgtcttgagaggttttgcgcttggtctggtcagcaagtcaataagctcaaaacctcatattctttagcaaaaatacatctaatggcatgaaaagaggtattaaagaggctttaggattgagctctccggaaggtaacatcaaatatctggggctacctttatttagatccacgcaaaaggatgcagatttcaactttatcttggataatctcacttctaaacttcagggctggaaagctaagactctgtctaaagcaggtcgtgcaacccttataaagtctgtgggcttgtcgttgcctatgctatgcaaacaactaagctttcaaaccgtcttgtagctcagattagggaattctggtggaggtctgaaaaggggaatcatgggctccagcttaaagcttgggacaagctttgcctccctaagtctcttgggggtttgggtttcagcaaaactaaagaaatgaaccaaagatttcgattcttggttttggaaaagtgtggtaagagccatccccattttaaaaaaaggagcatacaaggtgggggtgagtggcaaggatattaaggtctgggaggacccttggatagctcataagaaagatttatgtcctcgtgctaacggttcctccacttgtgaagtggataaagtggctgagctgttgatagataat

SEQ ID NO: 62628 - DNA, 790 bp, Cannabis sativa
ggtgtggttttagcaactgttgtgcgagatggaaaaggtaacattgtcaccatcaaaactgagagaagcctaactactgatccgttgataggggaagggcttgcagtctgtatggccgctgaactgatgctagagatgagggtcaagcaggtgatatttcagagtgataacatggtggttgctactaatctttccaccgagtcggggaaggacatccatttcaaattgactaatatcaggaagcgcttccaccagttgtgtttgcaatttacaagttggggcattggtcatgtgaatagaaagtgcaactatatggcgcataatgtcgcaaaatgggcaaaggagacaaggacaataggcttaactaagtctacggatgtggatcctactgtgctgaccgattacttggagtggaggaaacatgctggctaatctgctgctagctttctgcttggtgctgatttaagtttatagtttttcggttgcttttccttggttgtttttctgtttttcttgtagtactctattttccttagtttgtagttctctgaactttgattatttggttaatcgatttgctctggggtgttttcacccctaaaaaaattatgataaattcttatattatatcattttatttttcaaacagagtttggtgcttatatcgttaaactcttaaatatttgctattattaatattatttattagtgttaattatctaattggaagaattcaatccataatttaaatgaatagcttaaaattatataaataaattaattaggttta

SEQ ID NO: 62629 - DNA, 2954 bp, Cannabis sativa
cgttattggtctaactaagtatctagtctcatataatttaatataatagcttttaaggaatatcgctaactaatcgcaacgcaacatatcgagaaagtgctaggtaccactgtaactaatagcaatgctattattatatagtataccactctttcaatataaatgtttagcaattagagaataagaaaaattacaataccaaccgcaatttagttgtctagtttcaacaatataacacttgtcatcaaactagaagaagagtgcaaagagatctccttatcactcatactcacaccttattagtgaataataaatatgagagacaagtgacaatttaaatgtaaattacaatttactattttttatttcttgactcaggcctttctgccgttacataaggcgggagcccttttcctattttcttctaaataataattaaaaattagcaaaaaaaaaaaaaaaaagaagttagctatttttgggattacataatttggacctcagacttatttaggcaataatccatggtaatactgtggttaacgagttgagcgttgggacctcaaacatggtgtttcatcatctccaacaccaatccccacttgttgaacattcttcccaacattccttaccattaccagctaaagaaacacacacaaaatcccacctaacccttttcttcttcttcttctttctatacattaacaagtagttgttccatcaaggattgaggtaaagttgatgatttttgttgtggtttaataacttggtacacgacacaaactttggattggaaagtatggggggtggagaaggatctagtgccccaagggaacttgatcagacaccaacctgggctgtggcctctgtttgtgctgtcatcattgtcatttctattctcttggagaaagttcttcatatggttggagaagtaagcaatattatttcatgcttatgttgattcatgcatgcaatgggattgttttttcttattatttttttatcaaaaaatataatttctattaatgccaattacaaccaaaagaggactgacaaatttctttcgatttctttattgctactatctatacaactcggtttcatacatgtttacttatacatacactaatttcggttctgctaaatgcacctagaatgggattgttatgttacaaacttatgatttaaatttatgcttattaaatcttgactttgcattctatccaatgagattaatgttgtgtactttgcagtggtttcaagaaagaaaaaagaacgctttgtttgaagctcttcagaaagtgaaagggggtaacaataacaataccattttgatcctatatatgaacataacataaacatttgggtttttggagattgatcactattcactgctaactaaagctatgtttaaatccttaatcttgcagagttgatggttctaggattcatttctctgattatgacttttggtcaaaactacatagcaaggatttgtgttccgacgcatagttctgtgattatgttgccctgtcctttgagctcaaatgataatagctatgaagtggggcatgagccagagaccaaaggcggcgaacatgaacaccatcgaaagcttttgtggtttgaacgtagatatttagcttctggtagcgtaggccccggttgcaaaccggtaagtaagtatgttattgtttggaatatgaatgtagtagatgatcaggtaaattaaggacttgaatgtgtgactaatcctgatttttcgtattttaattgataataggggtatgtgccactcatatctctcaatgccttacatcagttacacatcttcatattctttttagcagtgtttcatgttatttacagtgccataacaatggcacttggaagattaaaggtgaatacatgttatttactcaccatataaattgatcattctcttcttccacttgaagctgaagatcaactcttttgtttctttcatacagattcgaggttggaaagaatgggaacaagagactgatcatcatcaagaatacatgaatggtattttatattgaatccatttatcttttgtttttgatagacactgaatatcaatccctatttctccttctttttggttcttgtttatttttgttttgtcattatacagatcctatgagattcaggcttactcatgagacatctttcgtgaaggatcacacaagatcctggactaaaaatcctttcaccttctatcttgtaagaaatctcatgacagttttgtctcactcactgattaattccatcaccttgtttaattttcttcttcaaacgtttaaattttggcaggtgtgttttcttcgacaattcattaggtctgttcgtaaggccgattacttgaccatgagacatggatttgtcactgttagtttctccaaacttatatcaaattaattatttttatcatcaaataggaatgatgagtatttctgctctttgattacaggttcatttagctcctggaagcaagtttaatttccaaaagtacatcaaaagatcattagaagatgactttaaggtggttgtgggaataacgtgagctttttctcaaacttgttttggttaagaattttgtagcctttggaattgaatgtcatcaacttacatgaacaatcataatgttgcagtccagtattatggtcttcattggtgttctttctacttctcaatgtacatggtaaatatattattacgatttttttcatttttttaatattattatccatcctttttttaaatttcttttttcatctctttcaggatggcaggctatgttttggttgtccatggtgcctttagtggtaagaagtctctgctgaaagaaaaaaaaacaagtctcttgtgttaaacattaattacatgacaaaacaatgaacatggtttttgagttgatgagaaaacaaaaa

SEQ ID NO: 62630 - DNA, 1034 bp, Cannabis sativa
ggattaaatgttggcattttatttattaatgggaaatttgaaattaattggaattgaattgagtatgaaatgactaaattacccttgtgtgtatgtgagcttgattttttagctaggggtaaaatagtcattttgaccttttattattttttataaaagaaaaggattttcaagggaaaaaagcaaaataattttggatttttcttccccttacccgacccctctttctctctagctctctttggattttcaagatttcaattggtgaattgcttgggtttagcttgattgaagtgaaagtgttggtgaattgttgtgctagcccttgaagtgattcttgaggtagttttttttttttaactctaattcctactatgttgctgaattttaatgttagaaatgcatgattaggttgttgatgaagatgataactatgtgttgcatgaggtggtgttcctttgggaatctatgtgagttttgcttgaattcttggtgtgatggttgtttgagctttagatggaattttagggtttctttcatatcttgaattcaagttaattgatgatgtttgttgctggaaaatagttggatatgttgaagttaagttcaagttcttgagcttggattttatgagtttgagcatgatttttaagttaattatgtaatctaatttttagggaaaattgtgaatgttaattcatgttgtatgtattttaatacactagcttttaacttgtaaatatatgaatttgtttgagggtttggacgtgatttgggatgttttggaatggtttagtggctgaattttcatgtttcaggctgctggtttctgggtttggaacccaggtactgcgacatggcttgagcataccgcggccggcccctgttggtggaacctgggattttgtcccaggtgctgcggcatggcttgggcatgccgcggcccgccctcgagtttttggacagttttgagttcgaactttgaaaatgcatatcttttgattccgaactccgatttaggaattttttatatc

SEQ ID NO: 62631 - DNA, 1320 bp, Cannabis sativa
aaaccttcattcaattcattcaataaaactttctgtttgtttttctttcatccgcaatactagggtgattgagatatctcattctcatagtgaagataagaagagcacaatataatatatatacacatatgttatacaaaaatgactgggatggcatactcttcccatgttgagtatgagcttgttcatgctgataattggaataaggtctctttctattggaatgtcaaagaaatatactacaaattttctggcaagaattttattggactgaaacttatttttttgcttaactgtacttgatgatgctcttagtctagatttcttttgtacttgtccatgctcttggtctagatggtgtaatgtaccttattaatctattcagcagtactgtttcaaaaaaaaaaaatctattcagcagtacatttggactaaaatgtgaaccacaaagtttgatgaaacaataatttttacagagaaatttttttggttcactctttgacaaagcagtttctttatttttgatacagtacaataaaatgtaaaccacaaattttgatgaattttatggaattgtactgaagcaaagttcttaagctgcatttggtgagatttagttgcattaggaaaagttaccaaaaaaatgtacgattagaaaaaaaaatctctagttgctttgcatttgtgtcaaaatgtaagtttacagaaaaaatttgtcttgttaacttctattctcttcaataaaaatttgattttggagttctttgagaagagacaagtataaattatgttttttatttttatttattgtagaaactaaattaaaacagtaggatagacattgagggctcgaattcccatgttatcatgaatatgaaaaacataataaaaattaaaataagtaaaagttggtaaccacctaattttctcatgaaaaatttaggaatatctctttttctttttaaatcaattaatcaaatctatcttcatattagatttaattgaaacataattgcatgtatgtatagtttggtacacaaactgcaaaataaaattctattactttaaaaggttttttctacaaaactgatctcttagggctcgtttggtacgttgtattgtattgtattctattgtattgtgttggatggtgttgtattgtattgtattagtattatttaatacaatactatgtttagtattgacttgtatcaatagattgtgttgtattgtattgtattagtattatttaatctgggtccgggtctgggtccaggtacgcgtcggggtttgggtccgggtctggggttcgggatccag

SEQ ID NO: 62632 - DNA, 2585 bp, Cannabis sativa
aaatttgtacccttcttcaacattctcaaaggcaacaaaaaatttgagtggacagaggaatgtgaaagtacattccagaagctaaagaagcaattgtcccaaccaccggtattgtctaaacccctagacaatgaagagctaagcgtgtacctagcagtcacagagcacacagtgagtgctgtcctcacaatagaaaaaggcggtgtacaacatcctgtgtactacatcagcaaaaggctagtcgatgcagagagtcaatacctactcatggagaagctgacctacaacttgctcttggcctctagaaagttgaggccctacttctaggcacaccccataaaggtgtacaccgatcaaccactgcgataggttttgcagaaatctaaagcatcaggccgactactcagaaggaccatagagcttggccagttcgagatcacataccaaccaagaacagccataaagggtcaagcccttacagacatcatggctgagtacaccaactcaactcttgaggtctctcaagactcaaaaaaacagcaagagcaagagaagaagcgagagcaagagcagcaacaaaatctcaaagatctaacatggaaactccatgttgatgggagctgcactgatcaactgtcaagtataggtatttcccttacaacacctaggggaaacaattgcacggagccctgatagctaagtacaaagccttgataactggtctcaagctagcgcatgaagtacgggctaaccacctggacatatacaatgattctcaactagttatgaatacagtcctggatgaatacacagctcgaggtgacaaaatggtggcctacttgagcaaaatcaaagacttgttaagtcaggttaaaggctagacaatcaagtagatccccagagaacagaatgccacagcagatgcacttacccgcctagcaagtagtaccatagctgattaagcaaacctggtgcccatctagttcctaaaaaagctcagcattgtcgtcctagaagaggtcgacatgctggataacacaccaacatggatgagacctattgcagcttacctctaaactggagccttgccagaagacaaaaatgaggcaagcaaactaaaaaagaaaagctgctaggtacctgatcctagacgggataatgtacagatagagtttctctatgcctttcctaaggtgtgtcaccaaagcttaagttgaacagcttatgatataagtgcatgaaggcttatgcgaaaatcatgcaaggggcagggcttgtccaaaatgatacactgacaggggtagttttggccagcaatgatcgaagactcggtggactatgtcagaaaatgtgacaagtgccagagattttcaaagataccaagagctccacccaatgagctcacgatgatgcagtctccttggccctttgcagtgtgggggactcacctaattggtcaactcccaaagggaaaaagagggatacagtttattgttgtcgcagtaaactacttcaccaaatggacagaagctgaacccctagcaacaaccacctccaagaaggtccttgacttttttgtcaagaacattctatgccacttcagtcttccccaaaagattgtgtcaaacaacgacaagttgttcgatagtgacatattcactaatttctgcaacaaatatggcatcatcaaaagcttctctgacgtggcccatccacaagaaaatggataggtagaggctatcaataaaaccctcaaagacaccatgaagaagagccttgaggaagcaaaaggcaactggcctgaactgctcctagaggtcctatggtcgcataggataactgagaagacgaccactgggcaaactacattcactctagcttatggctatgaagtgatgttgcttatagagctagtgctactgtctcacagaagaacaacttatgacctaaaaataaatagcaccttgctggcaaagtcccataacgaagtagaagaaagaagagaataagccaacctaaagctacaagcctaccagcaaaaggtagcaaggaacttcaacaaacacatcaagaatagaaagttattcataggatacatggtgctctgaagagtgttactaaacaccaaagactcactagcatgagtgtttgaacctaactaggaaggcccttatcaagttacagaaataactagtaagggagcctacaagctaggaaggtacaataagaacatggagctcattctcctaccaagatattggaatggagagcacctccacaaatactaccaataaccagtttatagaactctactctagtgtagcgattttatctactcaacaatagagtacatacaacaagcgctaggacccacgacccttcttgggcgtggtctcccactgttcttcaacagtggcctctatttctgtaggcgagcaggggtagccacctgatatctaaaagctaaacttgtgtaatataggcttgtagactcaatttatgtaagttgcacaacagcaaagaccaattaatgaataattgcatatttacatattctgttcattgtgtctatgaaccacttgctc

SEQ ID NO: 62633 - DNA, 1255 bp, Cannabis sativa
aattctttctctgattcgatcatgggtgagtttcaaataattccagatgtccttctctttgattcctctcctctgaacgcgttgggtttttgattgtatgttgtttttgcgtttttgtacaacaatggaggttgaatacttttttttttccctttttgtatttggatttttcgggatttgattggtttttccttgagatctacatctttatcagatctgatttccccgattgttgaaagaaaatggtggagattaggttgtttgaggtttctcggctgggtcacgaagaaggaggtctctcctccattttttatgggttggccgatatttttgtaaatagaaacttttggtttttatttatgtttattctctttttaggttataaatgtaaattggttccctttttagtttattatagaaaaaaaattttgtgcctagttcttttcccaaaaatgtaccattggggttgggtggggatttttctagacagaaatttcaccacaacaaaaagggtcccattactctgctacttcgtgccatttgaggcattaggcacgcaaagggatggggccgagaaaatttcgtgcgcaaggtgatttgaaggttcttttttcctcattcatgcaatcttattctttttttagcagttatttttactactacaaaatagatttttttttttaagtcaaagactattacccaacaatattagagacgttctactcttataattggtatttaattaaagactctattttatcattgatgaaataataacggtaaaaagggagccctacacacattgggtcctctcttgcatttactcttaatcttgtgtctgtattgatcactttggagaaattgagtgtcctatgtctcacatagacaatatatattttattgattattatgttcaaaattaatactttcatgacctgatcttgtatattatctttcatgagtattgatgcataggattaagtttaacaataagacagttcgggtttcaaactgagccgtaagatgtatggataatatatccatttttgtgcgaggacgtgtaaaattaatcacatgattaatagatttcataaataaaaaaatgaggtatatatatataaaatggaaaactaaacatactaaaataaaaaagaaaattgtagctatcgctaattagactaagtaaattctctgctataatcataaacttaattatatttatatatatcaactactagcttatagaaatttcctg

SEQ ID NO: 62634 - DNA, 1351 bp, Cannabis sativa
gactcaagcctcactctatcgatcggtttaagacttctttgggttttgattttgggttagaagtccctagattatcttttgggggtggcttaatgttattatggaaagctgattgtaatgtaaatattttaaactattcccttaatcatatagattgtaatatctcttttaaatctaatgatatatggcactttacttgtttctatggttccccgatggaaagtactaggcgttttacttgggaacttttggataagctttattataatgcccctaatcttcctttggttatcatgggtgactttaatagctatttgtttagtagtgataaatatggtgatcgtgttagttctagttctgtttcctcttcttttgttgagtttcttaataaattttctcttattactcttccttttattggtaataaattcacttggtgtaattctagtgttaaagaaagattagattgggttgttttctctgagtcttggtgtgatctctttcctaataactctttgcaccacctaggtttttatggctcggatcatagagctcttaagctagttcttgataataattcgtatactgtacctagttttgttaataaaaggtttcggtttgaaaatacctggttggaagattctaatttttattctactgttaaagaagtctggtctgatcaatctgttcctatacctgcctcaggttttcagtctttccttaataagcaacatcattgtgttaatcacctcaagtcttggagtaaaaaatataattctctttttaagaccagaatttcccagcttaattttgaaatagatcaactccagaataagattgctcttacttttgaggagtctcgtaagcttagtcatcttaagtctgctttagatactctgctttataaagaggaggtctattggagacaacgagctagggttaaatggttaaatgctggggacagaaatactaaattttttcataagcatgcctccttcagaaggaaattgaatacgatcaaattccttaaagctgaggatggctctgttgtgaatactcatgaggggattgtaaatcttataactgattattttcaaaacctcttttcttcccaaggcagtgatgtggatgctgcttctgctattttttcctctcttaattatgggttaaaggagtctgatgtcaattttttcaatcatgattttacttcggatgaggttaagagagctgtttttcaaatctttgatgataaagtagctggtcttgatggccttaattgtaacgccctaatgctaaggctcgctacagtgctttttcaattattgtgcaatctttgctaatcaaagaaatt

SEQ ID NO: 62635 - DNA, 687 bp, Cannabis sativa
attggggtcacaattgtatatgtaaaatgtgtgttgcgtcatcaaataaatatgtcaaatttatgtggtctattttaaaataaagtttatgacataacaacataattgtcatgattttaatatgtggttaccaattagataatttctgattttgatgagggatcaaattagatttagttaataaatattactaactgttttaatagttggtaatataacaggtgtctccatttacattgtatcatatttttcaaaatcctatatccccatcatgaggaaaataaagcttcaaaggtttttgatgcaaattggaagataatacttttttttataaacgattcaatggattccagtacgtttccgctaatctatattctattatttgattctcttgaattaattagggctaaattcacatttacaatgttcttaacatgtaatatgagagcatccctaaattaattgttgaggatatatagtatcattggtcttgaagtacattattattgtatttaataattgctgaatatatattttattgattataatcgttcatacatatatacaatatgttcatatatatatatatacatattgaaagagatttgtcatagtttataagtatatgcgattcaattaaagttttgatttgaaaaaccgtgtttttgcaaatgtcagttgtatata

SEQ ID NO: 62636 - DNA, 1753 bp, Cannabis sativa
  modified_base (1203)..(1207): a, c, t, g, unknown or other
  modified_base (1655)..(1656): a, c, t, g, unknown or other
gtggggcagactcgagacattagtataatgacctgggaggaattcaagagtctgtttgaggaaaaattttataacatcgctgtgaggacttcacacatggaagactttgtgaatatgacttaggggaaaatgtctgtgaccgaatacactatagagtttgatcgactgtctaagtttgctggtgatctagtgcccacaaatttcaccaagaaacagaaatatgtgagaggactgaatgccatgatcagtcgggacttgaaaattaccacttcacatgacactttgtacaagaaagtggtagagctagccttaattgttgaggaggaggaacctaagaagaatatcgctcagaacccaggacgaatttttaccatgactcaggctgacgctgattctagtccgtcagtggtgacaggttcgttgtctataaatggttgttcttatactgtattgtttggctcgggagctactcattcctatgtgctgagtagagtaattgaaagttttcataaaccatgtgatatttatgcttcggggttcgataccctactatcttcgggagaccttatagtatccattaagtggatttggtccttgtctttctggattgatggttgtgaattaactgccaatctaatagaattgcaactgtctgattttgatataatcctgggaatggatttttttttatctaagtatggggcaacgatcgactgcaagcaaaagatggtggtgtttgagcctgatagtgctaacctaacggtgttcgtgggtaaagttcagggggcacgcataccaaggatatcacttttgaaagctaaggacctgatgagcagaggttgtcagggtttcatagtcacaacaacggataccagcctacctgtgacatctggacctgggagtacaagattggtgtgcgagttccttgacgtctttcctgaagatttaccgggattgcctcctacacgggagattgaatttgttattgaattcattccgggagtggacccagtatcaaaagcaccgtatcgaatggctccaacggaattgaaagaattaaagatacaattgcaagagttattgaatctgggattcattagactgagctactcaccttggggtgctccgatattttttgtgaaaaagaaaaacgggtccttgcaaatgtgtattgattactgggagttgaacaagcttaccatnnnnnacaagtatcctttacctcgaattgataatctgtttgatcaactgaaggggaagacggtcttttccaagatcgatcatcgctcaagctatcatcatctgagaattcgagaagaagatatcccaaaaacttgttccgtactcggtatggacattatgaattccttgtaatgtcttttggactcaccaatgcctcgacgacatttatggatcttatgaattgagtgttcaaggactacttggatagatgtgtgatcgtgattatcgatgacatcttggtgtattctgaatcgaatgaggagcatgagtttcatcttagattagttttgcaatagctacgagatcattagctatatgctaaattcaaaaagtgtgaattctggttatctcgtgtctctttcttagggcacataggagatgaagatggaattattgttgggttttgtgccctnnataaaacccatttcaatataattatatttacttaataataaagatcagaagtaacattttttttatgttgcatggttcacatgatttatttcctgat

SEQ ID NO: 62637 - DNA, 11535 bp, Cannabis sativa
  modified_base (5380)..(5396): a, c, t, g, unknown or other
  modified_base (5456)..(5460): a, c, t, g, unknown or other
ctgcggctgcggctgctccagactctggactgaagagttgtgggagttgcatggaaccgtgatgatcaaaagtgtaattatcatatagttgttggaaatgttttggctgatgatgttgatgatggagatgttgatggtgatgatgatctaatactaatggggtagaattaccatttatacttgtcttcatttgtggatgataggatagttcttcttgattgttattattattattattgccaagttctggttgaaagcttctgttatgattcttcttcttgaatacccggcaaactacccaaccatcttcctgcttataataaataaccacttgattaatagagtaagacttctatacattaatgacgttaagataaaaaatctaaatctactatcttgtaaattttgtgttaaattgagctaaaaaatgagccaatattataaatacaattgtgtttcaatgcactagaagtaaaataaattttattttaataaaaatgtgtaaaaaatatcaataaaaacattaaataattattgaaagtatataataaccatattaaaatatatataaataaaaatataaaaagctaggaaatatattaacgagtggcaaaagaataaattaaaaaataatattattgtggtgtaaaatttagctcatgttatattttgtattaaaatttacacaacttttaatatatgtcaaatttagacgggattatacactattggggttcaattttataaatatggactaaaacttgcatatacactatatttatactccactattgagatgctctaagttattaattaatcgagctttaatttacacttttttgctaaaaacaaaattcttacttttaatggcaataaaatttgtgaataaaaaaacatatcattaaacctatattaaactactaataattaaaaagtacttaaattacattatgagttgtgagttaacgtttttttaaccatttttatttttagggtatgttcagaagttagatttttgttaaaaaagaaagaggtaagaaaaatatagataataattatatagaaaaaactgtcattcaaacaaaaaaaaaatgatatcaaacatgaaaaattgttttgtttttcaaaccttttctcttaattaacctaatctgagacttgagaaactatattaagatacctggatctgatcagcaggagcagcagtagtagtatcattgtcctcaaggcgatattcatgcatgatccaatcagtcttctggccatgaggagctcggccagtgtagaaaactagggttttcctcattccaatcctcttcgtatcactaacatggatggccttgtctctcccggtggccttccagaacccggctgccgtcgcccgattcgtccttgttccggttggatatttcttgtccttgtggctgaagaagtaccactcattctgtggccctgatcctattctacatttctctacacatgtacataataataataatattattatacataaatcatatatattatcataatatatgtatatatgtatatattacgtacctttgagatcccaaggctcgagtttattgagatcgacctctctaatgacatcaagatcaatgggctcataagagaccttcttttttaggtaataatagagaagctcttcatcagttggatggaatctgaaccctggaggaaccgtcagttgcccgttactgccttctcccatgttcatattatatattataatattttactataaattttttttgttaattaatgagtacgtagtcttgtatcgattttacctcccctgtgatgaaagaaagaataaaatcaatcgatcagaaattattacaattaatataatattacatatgttttggatcaatacaacaacgtacgcagtgttatatatacatacttctaataataaataaaaatatttataatgaataacatgtatttaattaaagactatatagataattacaagattaaggtatgaacataatttctgtgtcgacatcaaattcagtgaaaaataactaatatttcgaagaactaatatctatataaaaagaacccaactaagaagatatagctatgtatacatatatatatatacacacactctttgtattaaagatccaggcccggagattctagcaagaaactaaattagaatttaaatggcttcacttaattttccagtactcaacagctataactggaagtatcaaaacctaaaggatgaagtcataataataacctaagccactaaggctagcttaagtggtgagggagggaaacacttatcctacgctaaaaaaaaaagtcataataaataaccttcacactatacagtacgtcctccgaaagaaaaatctacatatatatatatatatgtatgtatgaaacaatttcatgtactacgagtacagctacgtacatgtaaatatatatataggacgtaatagacgcgcccttattatgagatcaattaagcctgaaagtacgtagttgacaaattttggaagatatgtgttttctacaaaaaaagaagagaaaccctagtttggctaaaaaataatgaatatcttcatgattatatataccaagtattatatatatatacacgcgcagacatataaaattgtttcaagtaaaccctaattagctctctttgaactgtatatataaatcagtactataatgaaatatacatgaaaaaggtcaatccatagatcatgaaagtctgaaatatacatatataagttgaaaaaggacgagaataaagttgtaaagtttgtgctaaaacaaacaaaacaaattgaaaaagaaaagctgcaacaatcaaaagagaataaaaaaaaagtgaaaattcaaagggttctaataaaaagatgagaggagatcatcatgaaaaggagaggatgaaagattaaatgattaagaaaagagagagagagagagagaagcaaaccttttggtgtagagaggagatgaaggtgataattaagtttggttgagtgacaaatgaaagaagacaaagctaggcagacacaaagcaagcttaccagtttagtacttcgcttcaagggcacgatgtgtttgtttacagagaaaaaagagagagaaagataagagaattgggatgagtgcaaatactggcttaaaggaagatggcacagaaataaagacaagaatacaataatacaatattctaactattaaaaaataattatatcatctaatacatacttgactaagggtgcttaactagctagttaattaagctttttttttttgttaaattcaacttcaatattattatatagagtggtgcttccatgtgtaaaagttattacatagcaatattagcaatattgacatgtaggaaagtactagtactagacactactagtcccttttagcatttctctattatatataggacaccaatgtatctatcatcttctagaagtgtcattttgtagttgacttacgatactctctaaaagctatgacattaaactatataagactcgatatttatttacactaatagcgatattaacacataaaaaatgtgctaattgatgtcttttaaatacattataaaaggtccggtaggaaaatgtatgtatacttacgtggtaataactaaaaaaaattattaattactatttttgttagagagtgagtgctatgtcgggttctgacaaagaaaaaatataatgaatattaagaattatgacctaattatgagaaaaagggtttaatctgtaaatattgtccgttgaatgggagacccttttcccatgtatcgccttattacgatgatgtacacacaaaatctttcatataattcgactgtcaattttatggacccatgccatttaactgttttaattatataataacaacataaatatttatttatattaatggcttatattttctcgtctgtttctatatatcatgatatgaaattatatatatacatgactagtgcagctggtcagagtcaaattaagaggaatgagagaatctgtcatattttgtatttttgtgtaattatgctgagaagtagacaatttaagaagtaataatgtatagagaatatgatatttttgtgtatatattccggtttattatgtaattgcctaaattggttcccttgtttgtttgtttaaagctaaatttgctgtgtgtgcctttgcgcattttgctcttatcttttgatttttcacacactttgattttgaccatacataatcccaataaacccaccgaatatagagtttgaccaatacatatgagcccacgtggtcatatcacaatattacattggacactgcaattttattttgttttatttttatttttgtacgtttcaattttatttatttattcacttattaaatttcgacaagaagacttattttattatatatttagtcccatatatatgctaaggtatgcagacagtatttaccctcaaacatatatcaatcccaataataattatatgtctataatcaatcaaaataatattataatgtatttttttatattaagtcactatgtttaattgcagtgtggatgaataaacaattaaatttaaattaattaaaatactattccctcctaatattaattatttctcacaaataaaaaaaatttgggtttattaattatagaactcattttatgacaaacaattatatataattaattaaatttaattctatatgaatgaaattaatatttctgttgaaaagtaagaaaggatataactaataaaattataatactaaaatatagaataataatatttatatcaatattgcttattatattataatgtgtaataaataatatatatttgagatgatgataacaaatcgagttattttttagctactatcaaaataattcattgtagtttttattaatatactccaattatttaattattgttcttttacacaaatttaatacatcgatttctaataatctaaaaaaaaatatgatcaaactattacatataatgaaaaaaaataatgttatatatacaaattaatatatatatatttttataaattagatcattgtattacttcaacttcaatatttacatcctaacaacatcaagaaagtctgaatagagtcaatagagtccatttagcattaacgattagattggattatattaaagggattattttacaaatatgcaaaaacaataaaaaaaattacaaaaatatggttttatagaatttttaaatatttttatgcttttatttacagaaagtacagtctttttattttgtactcttgttaattttttgatgttatttagatgttattnnnnnnnnnnnnnnnnntaattttcttgttgtttttatgaaaaatcgtagaaatgtaaaaaaaaaaaatctttaaannnnnaaatataatttttttttacaaaatatggtgccttatgtaattattcctatattaaatgcaatcctctatttgatttcagaatgaactagactatttttttttataaaaaataaataaaagattaactaaatttaaattacattttaataataaataattataatggccaaccacatgaagagtttatgtttaggagtaataaatctgctataaacctcttcatactaggacattgtctcttgcttaggaacaagatggccatactcgtgtttgattgtgtacctgctcgacatgaattttttgatgttaatgtattaattgagaatttcattaacattagtgaggcttgataacaaattctatatatgaatgttagcaattaatgatatgcgattcgatgtaagaaagtaaagaaaagacaacgattttacatggttttgtacgagtcaatattatttttgaattttcttttgatgagtttacaatttagtaaaatttctctaagttagaaaattaacatcatagaaataaaatagcaactacttttgatctaatccatacaatggttataaaatgtggacattctccatctttcatatatttaactaataagtgagaaacatacataactgcttgtatttaaataaaagataatcgatatgtctttgacttggtcatagtgtgttatagtcgagcaagtttatataaggactcttcttcatggaaaactcatagaaggaagtgtgtattaggagtaggcttcttgaagactggcttgattcagatcactagccttccaaagtgatcaccaggaataagcttaagcgagttaagcttctcaacattactaatatcaacacttggaaagttcttgaatgtcttgacattcttagaacccctagcccatgtcatgaattttccccaggcattcatcaggagtgagattagttgttttagactacgctttaggagagattaccaattaaactcaagaaggaggttgataaactgaacaaacttaaaaaaactagtgagcttgaggttcaaaataaaacctctgaagttgagaatttgaagaaagcattgcgcgaggaaaaagagaaggccaagaagggttcggaagaccatgaggttgaggtcaagaagaggatcaaggtaatggctcaaaaatctctttatagagtttggcaaagcaataagggattgaatttcaacctcttgcagccaaacatcaagaggagcattgctatcttcatttcccaccaacccccaattgtcttgaaaaatatagctcccaaaaccatcaggccccagagccttacctctagggataggaaatgtctctttcttcactttatctttaaaatctttgaattaatagctgattttggctatttgagagaatcgagccttgtctaattactttggatatcatagatcttctattcatcatttttttatcccaatagattcttgtaataagtaaggtaaacattactcaccaattatggttaagcatgccatcgatcttccttccatatcaataatagaataaatccaccgcagctccttgagctggtgctatggcaaagagaaggtccgagactcagggaaggctaaaatccactgcgaagaagaggaagaagcgagggccagattcaggatcaaatgtttgcaaaaccaaatctatggaagaagttctaggggtaaatcccaccaaattttttgaggaagaaggaagctgcaatgagactgaaaaactagtgatagatgtaattacaaagactccaggacacagagagatatgtcacgatatagcaagctatctacaggcttctcaatgatgtggaaatatgataatagaaggtaaggctccatctaaacctccaatgcttagatctgctaccattaaaaagaaccttgctagctcattcgaaactgaatagaataccaaaattaaagttagcttcaaagacatagaggttaaagtttcattttggactccatcaattgtatgctatgtcctatgagctaatccacctttggctattctaggtgggtttgtaaggaggatttgggggaataaggtggataaaagtgtatgttggcgtatggattttttctaattaggtttgattctatggagacacgtgatgatatattgaatggaggttgtatatcttcttcaacaaaagacatgttattatgcaggcttaggatccaaacattaactttaggaaaggagatgttagagcactacctatctggattcatcttgatgatcttgagctaaaatattggggagaaaagtcgttattcaagatcattggccagatttgagaacctatcatggtagattcagtaacaaaagaaagggagaaactaacttttcctcatgtactaataaaggtccaattgaaataggaattactaggggaaattcagtttaaggatgagaatggagttgatgtgcctattcaagtgtcttacgaatggaaacctactatatgccatcattgttctggtatatatgggacatgacataactaattgtaagaagaaaaaaaataagaaacaagaatggataatcaaggaagatggaaggaaaaaaccagcagaggtagcaggggatgcagatggatttataccagctagtaggagggtctcgaaagcaaaaagcaaggaaaaagaagagaagctgagccaaagaaatgactttcagctgctggcagatcctaatgaagcagaataccagcaagttgaattggtagaaaatggccaaaccagtgatttaatgaacacaatagcaggaccaacaaaaagggcaatagataaggacatattagaagaagagaccagcaataacgtgattaaaaaattgagaatactagaggagggggagtacctcctctacccaatggatagaatcttatgttggaatgttcgagggatcaacctacaacaaaaataatatttagttaagcgatttattgctgaacaacaagtaggtttggttggtctcctcaagacaagagtcaaggctcaaaaaataagaaccttgtacactactaatatgcatgcgggatggtactttacatcaaatttggcttggcataaagggggagaattattgttgcttggaatccattatccttcaatgtgagtatttaggaatgttcaagtcaaccaattcatctttatatcactatacctgatatgaggaacatgttttttgttacaattgtgtatggtttcaatgacgaagaaggtagaaaagaactatggaaagatttacaaaagttggcaggtaaagagccatggattgtatgtggagatttcaatgaaatcatggctaaagaaggagagaattcgatgtagaaccagatgcaatttttccatggatctcgtgagatgtgtggaataatgtcaattaaaagatatcaaatatagtagaagttgctttacatggaacaataaacaacaaggggaagatagaatctactccaagatagattgaatgcttgcaaattggaagtggctgtcgagttttcaacatgttgaagttgtttttcacaatgaaggattatttgaccacactccagttgttttgacagtctataaaggtatgcatttaggtctaaaaccatttaaatatttccaaatgtggaaatcttttccacaatattagcagcttgttaaaaatgcttggcagcaatagctggttcaaggcacaaaaatctacaagttagtcacgaaattaaagctgttaaaccctgtgtgtagagaaattaataaacaaggattcaataatatagtggcagctaacaatcagcccagggatgcattgaaggtgtgtcaacaagaactgcaatcagatcctcttaatctgatgttgcagcaaaaaaagagtgcagctagggatcaatatgttgttactcacaaggatttttgttcctttatgcaacaaaaatccaaggatgtaaactctatttttttttccactcgagcatccgagagaggagaactcagaattgaatttattcgattcaaaatgaaacagggttcagaatagaagaaccaaatgcagttataggggctttcttggagtattataaaaagttgttttggaacttaaatgaagcaaaggaaacaggttttgaaatctgttgtcaaacaggggccatttttatcttcacaacaagcactatggttggtggctgagtactcgaaagaggatattaaacaagcaatgtttagtattcctggaatcaaagcatcagggcatatggatatagcagctatttcttccaagataattgggagctaattggtgatgaagaaacctgctaaaagaaatcaactttacagtacttacacttatccccaaagttaagtgtccaaatattgtaagtaattttcgtccaatagcatgttgtaatgtgatttataaagttgctactaagcccatatgttcctgtttgaagcaaattttatctaaaatagtagcatagaatcaaggagaattcatagaaggtagtatcatagcccacaacattatgatatgctaggacttagtgagacactatggaaggaaatcatcaaagccaaattgcatgatcatgcttgaccttcaaaaagcctatgatactatgagtttgagtctagatatttgagcaaaaatataaaaaggaatatgttagacaaaaaataaaaattattttgaaaacagaaaacaacaatttgatgttttttattttctagttttttgtataactcactattcagaaaactgtttttgtaaaaaattggccaaacatacctatgtcaagagaaacaaagtcagttggtcttatccaactaactttctgttacatttagttatttctgttatgtttgtaactgattctttgttatgcttcttgttctgttttggttctgcatttgtatataaactctggccttagtgctttcatttcttaatgcactcaattcaattctttcactctattcgttttactttacatggtatcagagctctctctttcttctctttctgtctggttcgtttactctcttcaagctttcgttcatggccaacaatggaggttcgtctcacaattcaagttttaaccttccgcgttctgctcctgtcactttttcacatactctttcagttcgtttagacgaacacaactatcttccttggcgtcatcaagtctttgctgccatcaaaggaaatcgccttcagaatcatcttgatccagctcgaatcccccctaaattcctcactaatgatgatcggtcacacaacagaatctctccagaatatgaagcttgggatcaacaggacaacatactcgtttcttggctgttgtcttcaatggctgagaaaattctcacacgcatggttgggtgtgatactgctgcctaaatttgggatactcttcgtatctactacactgcattgaacagagctaatattggcaaataaaaaactcaactcaaaaactctaaaatgcaaggctctctcagtgattttctcttaaagattaagagtcttgttgatattcttgcatcaatcggtcatcctatgtctgctcaagaccatattgaagccatattcaatggtttatccagtgaatataatgtgtttgttacctctgtcaatactcgacttgatgactattctcactacaagaaaaggcctttttaccggccggcgcagttcgtcaaatacgccggtaaaagttgtcgacgtaaagcaaaaactaaaatcccaattgtatttatgctttacttttgccggcgcaataatgcgccggtattactatgttttgccggcgcaataatgaatatgcgccggtaaaagtgatgaaatgaagcgccaacaggcgcgaaaaatttgccgcctttcatttcatttattctggcgcttatatacttttaccggcgcataaaaaaagagagagaaacttcccgagtggatttccttggtaggtggggatacttttaccggcgcacatttgcgccggcaaaagtattaaataaaacgcgtggattttgatgtggcaagtg

SEQ ID NO: 62638 - DNA, 1564 bp, Cannabis sativa
tgtgcttaggaaagctgcctccgactgctacgtcagacatgggttctggaaagtcaaaggggattttcctcttcctcacaaggtaaggactactactttttttttttgggaaaattgcaataattaagaatatcccatatattttataactgtaatttaacaaaagctaattttcaaactatctaaggatttgtcaaaccgaattttgctaactccacattgtcaattcaaattactatttacaattgcttagaattaagtccctgattagccaagaataagatagacaacttgtttagttatgattgccaacctgaaggctttcttcttcaacgaaccgttattaactccagtgaccaatccctagtaagttgcctattttcttatatcattggtttaaacatttttagctatatatataaacattcatttgatgaaagatgaaatattgaaccataaaaagatggctttttgacaatatgagcttctggatttaatctattatttgttcaggttagtctctaatagatttatggaagtgctaactagtgaggaggaacatgatccatctagttaaaatatggatgcttaagactttgatgagcagaatggtatatatgcataagtgggtggggcaatgatggtcttaaatatttgacatttgttcatattattattatgcggtccttcaaaataaataggaaagccaggtgcctatggttattgtttttgcagtatagaagatcatttgtataaatgacacagtttgtcatgtgtgcttccagaacaacaaattgattatcaactgaatgatcgtttccagtttatgtactatgtatatcagctaatttagttattcacagtacaagttacaactatattttaagaagaaacctgttgcttgtagaaagacccaaaattccatcatacatgatgtgtaaaacttacattctttgattgtttttctttcccaatacgtatggattattattatgtttcgctaatcaaaatgatcgaaatcactaattagaatttgttgttatttgtaaacaagtgacaaggtctagtgcaggctgtgctctggattttccctaaatcataaaaagtttaacataatatataagatttggaaaagtgattcgattttttctttgattatgtacagtctttatataggcaatataagaatctttgcaacagattttggagagtaaaactcttgcactaatgcctcagaaatagcagtaagactagctaacaaactaaggaaattaaatacataagaatagattaatggggcatttggtatgatacttggaatcgatgaatttgtgttttcaattatgtttcactttttaaattaataaggtagtaatgttaattctctcaaacgtatgagtttcatatttcttccaagtttttcttttaactttactctctctaagttaaattcacataacaaatactcatttggtgatgtttggttgcaagaagtaaaaatatagctagaataaaaatgacattctaatactttaaaataaaatcaaataaaggaatagaataa

SEQ ID NO: 62639 - DNA, 1130 bp, Cannabis sativa
ctgagcatagcgctccctagtcttacttgtcttgcttgtaatgtagggtctaacaattatgacacccaaatgaccactgctgcttgtggcatagggtctctactctgggcagcttgtgcatgagcttggtcgttctgcacataacaacgcaagtggggattatatttccttatgaggaatttaatctccctttttcaagttttgacactcattggtgttatagccaaaattattgtgaaatcggcagaactttaacatgtccctcttactcatctcttttttgataggaggaggcttcttgtatgggagccatgtaaatggtcttaggtttttcagttaggagggtgaagcactgtgcttcttctccttttccttttggtttcgtggcataggggggaagtgttgtacttccctttttactttggccagaattgttgttgttgcacttgcctcaagtattttttccattggagggctggttggctgcttgtactggcttgcatgtttggaaggtcttggaactgcatagcaccctgagactacctattgttggcttgctttcctgtctgggcttatatgacgacttcctttaattttatcatttgctcgtttgaggaactccttcatgttgttggttgagatctttcgggtatctttccagaagtcactcaacgaaaggataccctcaatatggctgtataatgaccttcttctactaggcttttgaccttggtggcctcagccatgaacctttagatataatccttcaaaagtttgccttgtctttgtttcatctcaacaaggtcttccagctgtgatggtaactgtctcgaggacatgaaatgtgtgtagaaatcttgagaaaattcattccgagaattgaatcttcccagagccagcttgaagtaccattgttgggctattttttatagagtcaccagaaagatctagcatcacacatcaccgatgaatttttggagatctttctatacatctcaaagtacttgatgtgtgtatgaggatcttctctcccgttatacatcttctataccgacatcttaaacttaggcaagggcaacgcattaatgtatgccgagaatggagacccccttcacctatctagttcaagg

SEQ ID NO: 62640 - DNA, 962 bp, Cannabis sativa
ttcaaaaaaggaaaaagaagagaagatctccacttcccttggagcccaacgccaccaagtcccctaaatcccgagattctcgctttgttttgacaatccaagcttcccacaagcttcctcaatggtcttcactagtgggtaagctttcaaatcacattctctacttgttttcttgaatctgccatttttgtgttcaagctttttacattcttcattctcacgttagattatagtcttttggtattttgatctgcatgatagttttaggatgcataatgtatgatttcctgataaaaaaatttgattttgagcttcgttgtgattcttgactctttgagtcacgaagaacacgtttgagtctagtaaaaacacatattttgatccgttagacaccttggccagcccttggggtcttgttggagacctggctagcccatggtgcttttcatgggggctggtcggttctagggtttcacctaggaccctggctggttcttgtattggtcaaaggaccctaacactcattttaaaaaaattaaaaaataattaaaaaaaactcttttgacaatgtcgtgagccggtctgtgtgtttgagtacactcatttttcttttttaatattagcaatcattaaattcaatgaaaataaacccaaatttattagaatagtccaacgagagccaactcattatcctaaatcactaatcatattcaaattagaataagagtagatcaaggcctaattgagatttagattccaactcctaaatttaaatttattacatatgttttttaggttccatacattgttgaccaattcatggaaaaagcttttaatttttagtgataaatacatcaagcccttaaataatactgattcttattttatatccttgtatttatataataaaaaattaattatataaggtcccaaaacatgatctcttgatcaattaattttaa

SEQ ID NO: 62641 - DNA, 2665 bp, Cannabis sativa
ttatttttactgaataagtatttttataaataaaaaagttcaaagcgtaaaaataaaaaaattctgtgttgatgtatttttgtaactttagtttattatgtaaatttttaaatttttttagacacaaaaaaataatcaaacaaacagattcaagcttgttctcatcatattgaattgttacacaaagtttgtttttaatatactacctaaatattttttttttaatttcctaatcattcaaaatccttatttttcttatattctaccatttgagtttatttttgaatacaatttagtagtagtcaaaattcggaggataaaaatactaatttataataacaaataaacatttataataaaatgtaacgaaatctagtagaatgactaaattttctaaaagtaaatgttcatggagaatttttaacatgttttaaatagtacagtttgatggtgtcagaagttcagaatttaaaaatattaatgttttttaaaaaattattgataatattattataattgaaaaaatatgtactacaatacattgataaatggtgaaaatggaattaagagaatatttattgtgtaccaaatataatatgtgtgaaatttgacacaacttgcaacacactattagagaaatatttatttaaaagatactaaaatataacactacattaccaattgagcattgctattgggcatcagtggtgcccaacaccttctatagatatcgcttcacgattcgttagcgattaaatctaaaagctatttcttaagttatatgggacgcgatgtttaattacaccgatagcggtatgacaccgtagagagtactaggcactaatgatcccttttagcaattttttttatcaatttagtatgaagtcacaattttgcatataaaagtttacaaaaactcctcagggaaacttatataaatattttctcaccaaggaacttgacaaataaataagaatcttggggatttagacaacttagaactgaactaattatgcaacccaattgaaccttatcaaaatcaagaaaatgaagctaaacaaagtaattacaataagtacaaagaccatctcatctttccaagaaacttatcaaaacacacaaaacctagcaacaaaagaatccatgatgtgatttgctatggtggttagtcagtgttcttctacaacaaatgctgcttctatctcaggaaaataatcctgcctaaaagtacaaggaaagatgattcattaaaggaatatacacaatcatattttgaatatctataagcttgcagtccatagcttcaactctttcaaaaagaaaaagagtttgggatcataaaagtttgaagtggaagcccttctactttggggctctcaaaaatcatgaaacatgtctgacattttgtaacgccctgatgtacagggatgccacgtgtgtgtgcttttaaaaattaatctataattataaattaaaaatttaataaaagtgcggtttatttaaacttttgattaaattgaaacataacttttattcaaaatactgctggattcagggatcccctatttaaaagcttttacatcacattacaaaactgcctttataatagagggttatattttcaaaacacggtcaaaagggtggatcctgtctactgaaagctgagaccatttgctgggagacctctgactcatgctggtccactttccccttcccttcatctgcaccacgaagtacctgtgagtcacaaagacttaacaagaaaagcaagtaaaacacaaacatcgcataacatgagaaattataacattgcataaccaacaaattcatcatccaatataaacatttattcaatacgtattcaaatattacataaacaattatttatcttataagacaaattgactttgatgcctcataaagcatccttaccactcgttaccctcgagctgccactatcgttgcccgataaagcattcgataagtaagaaacctatctacagtttcaagcgagtaattactcattcacaataatggtaatgaccgtatctttactcattctcaataacggtaatgaccgtatctttacttcaatcataatcaagcgacacatgataatagatgtttctctcttaacatgcttagtagtgcaaatagcttttcttacctcaagtccaaagtcaggtgtgtgggccgacttgagttaaacgatactcgacgatctcgggtcctatgtcatgataatagtaaatcaataacggtctatttcaaaatactgtctaaaactcgcataaaataacctagggttttctaccaaaacttatggtgaaattccctaaaataaaatacatattttggctctaatctatgtctcaaactgtagagctcttcataagcttcgaaacggtatatataatgtctaatatagacacccgaataaaaagttatggctaaaatacgaaaaatcagcgatttccgaaactgaccaaaaggaattccggttggtacagtcctgtaccatccaaaatttcggttcactacagtagaaactcaaaaatttcagttcttcaaagttccaaaaatttctccaaacctagtcaattgttcctaaacttcatggaacaattctatatcatgaatacaatgtatacaatcaatcaaaact

SEQ ID NO: 62642 - DNA, 772 bp, Cannabis sativa
  modified_base (397)..(400): a, c, t, g, unknown or other
attaataaaataattattaataattaatataaaaaacaattattaataaaaaataattaataaaacaataactaataaataatataaaataattaagaataaaaaataattaacaaaataataactaataaataatataaaattattatatatataaaaaaatattatgctaattaataattaataataaaacaataattaatcattaataataaaaaaatattaataacaaaattattaataattaatataaaacaataactaataattaataattaatataaagcaattaataataattaataatatttaattattaataaaaaaataattaataaaataaaaactaataaataatataaaataattatgaataaaaaaaatagaacaataattnnnnattaataataaaacaataattaatcattaataataaaaaaatattaataaaaaatatgactaattaatataaaacaattattaataaaaaaaattattagtaaaacaattatcaataaaaaataattaatacaacaataactaataaataatataaaataattatgaataaaaaaatactatgctaattaataattaataataaaacaataaataatcattaataataaaaaaaacttaatatattaatataaaacaattattaataaataaattattagtaaaacaattactaaaaacaatacttaataaaataataactaataattaatataaaataattattagtaaaaaaaaaatagaacaataatta

SEQ ID NO: 62643 - DNA, 1075 bp, Cannabis sativa
  modified_base (395)..(402): a, c, t, g, unknown or other
ataagattttcgcgtctggcgtgaaggctacattgcagaatttattatttggacaacttttagtctcaccactggcatggcaccacctaaaatacaatttgattaattgccaaggtcaattgaagtctgtttttaaacgttgggtaattacatgagccataattttttttttgtaaaaaaaattaaatttttatgtttaaattttttttttcttcacatttttatggcttttcatacaaacaacatgaaaacaacaagaaaattacataaaagtaacatgaaataatatttaaataacatcaaacaacaacaaaaaataacttacagataataaaaaatcaacaacaaattaacaagagtataacataaaaagatcgtattttctataaataaannnnnnnnaatcgtaaaaatatttaaatttccatgtgtatttgtgaaataatccattgaaagattcatgtgaagtcaatatttattattattagacactatctcaatgaaagatataaaatttgtgctacatttaacacacaaaataattatgtaatattttatatcaatttttagtattgtgctgaaatgtacaattccaaaacttaatacaaaatttattttttcattaatatttttattaaaagtattagaaaaagaaaaaattacacaatacaccaaaaattaaacaaaactacaaaatgttttcgtttttattctttgaacttttttatttacaaaaatacatattcagtaaaaataataaattatttttttgttgttttatcctttatttatagttctattatagttgtcatggggttatttttctgattgttttatagtttttttttttttttttgacgaaaaagcttcaggagaagccattatagagttggaattaaagcattccaacaggattcttcatcttgccccaatgcccttcgtgccaggttgtgcgctctgcaattgattgttttgtttatgtgtcgcaggtgagcatcagggaaagcagataaagaacatcttatatcttcaacaacatcagagagggctgaaaaatctgccttcttattatgga

SEQ ID NO: 62644 - DNA, 646 bp, Cannabis sativa
acaaggatttttatagaggttcagacccgtgatgatggtagtagcctactcaaagttgtatttgtattacttcaaagatatctagatcaaaaggtgctagcctagtgagtttctcaaagatcttataaaggcttacaattattttgataatataagtgctctctagaaaatatgagtcgggctcccttgataatagaatgactccactatttatagaaaatataaaatgaatattgttacctaaattaattagaaaagaaataagaaactaacactaattcttagaatctattggttgtgaaaattaaatcccataaattaatgtagggatttaaccaagataaaaataaggagatatttatggaaaatatcttccagattctaaattaccacatctttctgggcgaaggatcctgcttagctggcaagagatatcaagcttggaacatcatctgcatctctactttagagacacgaacataattagttttgtgtagactcttctcgatgaagcatttaaaggtgaatagactgtccatgtcttcgaatgatctccacgtgtcacgtttttttgatgccacatcaccctatatagacattgacataacacttgccctccaagtccatgttggagcagctgcttata

SEQ ID NO: 62645 - DNA, 1964 bp, Cannabis sativa
taagttccttctagataaagttattaagataacattctagtattaactttaaagtaaaatacttgcttaagattaagtaatcactagagataccataaatcatttcataaggacccggaattgtgcttaagtctttcaaatagacattgcaagatttcttatcttatcctcataattctaataagttattactatccatatgaatggttaaattaactttctttagttttattttaaagttcctttcttgaacatatcatggtaagtcatcactagtgtcattcaaataataacaagcttgaattgttaaaatcttcccactaagataaggtactgtgattttatgtctagggacttcagtggtatctatttctattataacatatattggaacgcatacagaatcaagaataagttctactagtttgctagttaaattttatattatatacatgtctaatcaaaatatgtgtgttatagagattctgtggtgttttaaatataatcaagagttcaatgtaaaagaagtttgaacttcatatattaataacttcttccacccctatgtgttataaatattatgtggtgttttgaatataatctagagttcaatgtaaaagatcactacatatatcaataacgtaaaagacctttgaactgcatatatcaaaaacttcttccacccctatcaaatcacaagatcttttattaaacaaaatcttaataataattgtttaagaatggataattattcataaacattgaatttaaattatattgtttatgtggtattatgcctttgcagagattaatataacataaattttattaaaagtaatgagctaattctttattttatgtagccattaactataacgataacaaatacataattacaaaaaagtcacaacacattatacatggcaaagtatattaattatatatgataaaataataatctcagtttgtacttattattatttcgtttacaaacccattcactttttaattgtagaaaatttttaatttttgactaaatttgtttcaataatatcaattcaaagaaaaatttattttaactaaatttaaaaatatatatatttgaattaattaaaattaaataataaatttattaaaaagtaaggtaagaatctagactatatgtatatggttatgtataataaaatcgaattaaaatattagttttatataattcatatcgtaaagacaaattatgttattaaaaatagaatattatatactcgtacatatattatagggtaagtttacagtacagtcttaaaagagtattcgacacccagaaaaattttttagtttattttttttttttatataatcgtgtatttaggaccacctgtaaactttcagaaaattacgaataatttacaatgttgaaaataagatttacatattttgttatatatgtgattattttttcgtatacacatggtaattatctgtttaaacttttttttcgtcattgtttttagaattttttaaaaatttacaagttgtactaaatagataagaaaaaactaaaaaaactttctaaatatcgaaatagataaaagtctactagcacaatcaattagaggatctactataaaagttttactatattatatctaaatatagtaattaatttaaaataaagtcagatacaaatcattaaaattcgatatattgaaagaaaaaaattagcattgtatcataatatctattgtaagttgtttttataattaataacataatgattattaaaaaaaataataacataatgataatggtgtatagttatgttaaatttcctaaatattaaatttttgcttatctaatgaaatatgagccgaatttttatttggggaattactccatatactattttttttaatttttttttcaaatctatggtttgggtttctaaagtggttgcagtgctagtt

SEQ ID NO: 62646 - DNA, 1218 bp, Cannabis sativa
ttctgcatactaaaacatatcataaacaaaaagttgtgatcagtacttaatttaatttatgtatacagatataattcttactgggcaaagcaacttaagacggtataaaaattgtctatataaatacataaaaatagaattaaattccaccaagtttaaagatgaaaagtcaaaattgtttcgtctatcgatatatatgctatatatgacattggggtttttattaagatatggatgatggcagaattaaagtttagactgattggttttcgttcaggccaataaaattgaatagaatgtaaaaaaaaaatcaactttcattctattttttttttggtttaattgtattataaccgtgtaattattaagtatggtaattattacggtggtaattacaaagtttagtaattacactatattttaaaatgcaatgtgtgtttggatatgaggtggtaattacaaatgaattcctaatatcttgtttggcaaaatagttagtaattacatgaaaaataatatttttaagtagctaatatttaatatggaaagttttcagtaattatacagtgtaattacattcaattctaatagggggccatgagaattggagagtgtaattggaaccttacttccaattacacagttacagtgtaattacatggtcagaaaaacatgtcaaattgtgtaattacccccgattacacacaaatccaattatattgtggcttccaaacgtaccctaaattaattctaatgaataaatataccaccattttagtgactattttattttaaaatgaaaaataaataattcaaatataaaataaaaaaactagcaatttttttatcaatctttctcatgtatattaatttttattcaattttattcttattctaattcccgttcctacgtttcatttataggatcatattcttgtgtttagtggtgtattcttaagagtcttaagaataatattgaatgtagaatagcatattataggtaccaaggatggcttctaataaaaaccaatggctaattagagaaagagtgtaagaatgttaacgtattgaaatattgtaacattatttatatgtataaattattaaagatgtaacttgctgaacaaaagttataaaatattttctttcaaaaaaaatatttaacctggcaggcataagattcgtattatctccttaaaactaataattaatttaaaa

SEQ ID NO: 62647 - DNA, 876 bp, Cannabis sativa
aatttgtgtttgcgggtcgtgttgtgtcgtgtcgagactcatgtataacatgtacatgctcgattcgaacacgacccatttaataatcgtgtcaaaaaatgaaatccgaacacgactcgttcataaacgggttgacacgacacgactcgtgtaactcgtttataagcatatcttatttaaacatgtcaaccaataacatgtttatgaagtattcaacacgtttataatccatttatgacatattaaagtactaaaataactttaaatagatcattaataggtcaatttcgtgttagtcgtgtcaacccgaacataacccatttattaaactagttagacgagtcaacctgaacccatttaaggtaaatctaagcccgctaactctcgtgcgagtttcgagtcgtgttatcgtatctgatccgttttgtcggccctatcctaagcttgctattgtattttaacttctatattgtcgttgctactgctgttttcttacccaattggttaaagaagtttttctgttggtatgcctttaagaacttatggtacttttaatttcatgattatattttaagctgatcacaacatccttattcaccatttcacatgttaggtagagcctaaaaatatacatataaaaatcaaatatgctatactaactatatggatgtaatgtaagataactatagttgacatatgtgatcgtgttagggtattgagattttttggtacgaaatatatataagtcaggttagaattgaccaattaaacatatcaacatacatgaatataaatatcacacaacaatacaaattaccacctctaataaacatatatattatgataactaattaactatgtttataattaataggg

SEQ ID NO: 62648 - DNA, 1846 bp, Cannabis sativa
tgctgaagctttgccttctttgatcctcaactcaagttaggcctcccctgcctctgtggtggaaacccccttgcctgattctcaggttagaggtaaaggtttggcgtgtgcttctggggtcaaaaggcctacttttcaagcatgtcaagctaatgttggtggttcaatgcgctctatgcttaagcgagctagagctggtgatgttgatgtaagtggctcttcttcaattcctgatgatgaacaggcgggtgatgctgagcacacccggcacccgcccgggaaaatgagccttatatgttggaatgctcgaggattggggaaccctcgagcattcaattggctttcagacatgatcaagtctcacaaacctgttcttatttttttgatggaaactaggcttaaaccgaatttggtagataggtttaaagctttgttaggttttgattttggtcttgaaatctctaggcagtattttggagggggtttacttttgttgtggaaggctgatatttctgtaaatattttaaactattcctctaatcatatagattgtactgtctgttttaatactaatgaattatggcatttcacttgtttttatggttctcttgttcattctcagaaacattttacttggaaacttttacatgatatttattataatgcttctcatttgccttggttaataatgggggattttaatagctatctttttagtactgataagcttgggggtcaggcctctgatcaggttgttatgtctattttctcagattttatcaataaattttctatgtttcctcttccttatgtgggttgtaaatatacttggactaataaaactataagtgaacgtttagattgggcagtagcttctgagtcttggtgtgatcttttccctgaaaatagtcttcatcatttaggttattatgagtgtgatcatcgtgctttaaaacttcttcttgcaaatgatgctagtaggcctattaatttgttaataggaggttccgttttgaaaatagttggttagaggaccctgatttctatcaccttatgcagaataaatggcatgattttctaactcataattcaccttccaatcactttagttattttttagataaacaagcccattgtgttaaccatttaaaagattggaataagactcataatcatctttttaaatctagaattcagcaattaactcaggaaatagagaattttcaaaatcaagatgtccttactcaggctgatagacttcatctgaataaattgaattcaatgttggatgctcttctctataaagaagaagtctattcgaaacaaagggctagggtgaggtggcttaaagctggagataaaaacactaaatttttccataagcaggccactattaggaagaagactaatgctataaagtatcttaaagataatgagggtaatgtggttaatagtcaagaggggatagctaacttagttatctctcatttttctgacctttttagtactcagggttgtaatgttgatgctgctgctgcaatttttgatgctttgggtcctgggttggaaattcttgatgtggagtttcttgagcaggattttactgcagaagaggttaaaaaggctgtttttcaattgtctggggattaggcagtgggattagatggttttaatgtttatttttatcaaaagaattgggctgttctaggtagagattttacaagtgctattttagactgtcttaataaagatattgatttttctaaaataaattctactcttattgtcttaatacctaaaaaacaacatgctaataagttaggtgattttagacctattagtcttt

SEQ ID NO: 62649 - DNA, 1956 bp, Cannabis sativa
tgggactcaacctaggacatgtgggttaccaccgagacacccccagcatctttctcgaactgatagggaggaggcatacacatacctaaacagagggcgtgtatcgaacctttttcgaaggagaacgcttgtgcaggacgaggcaagttctagctcgggacattcaagatctcgagggcacactcgattagaaaggcatacgtgaggaggagatagaccacgctgttatgttgatcaagagagtatgagcaatacgaggagctattaatctgagagttactgtgatacgaggtctgtgagcaactattaacgaagacagccaaatcttcgtgaacatttgaattgaagacaacccgatttatgcgagcgcttaaaacagaatgcacctgatttatgtcaacaactcaatgctaaccgatagcaagaggatccaatccaattgcgaatcattgagttggaagataaattcaggagataccaagatggggaatatgggaagttacacgattatgactcagacgaggagcctgagcctttccatccagacattatgaactttgaattctcctaggggtttaaaaacccacacgtcttgtagtacgatgggacttcagacccaatcaccccccttaccaatttcaataccataatgcgagccagtaacgtctcgaataatttacgttgtatcttattccccacctcgctgactggagcagtgagtagttggttcgataagtttacccatcattcaataacttcttgggaacagttgtccaaggattataagaaacaattttaggcagcaagagacaagggacctgaagcatcctccttaacgaacataaagcatcaaccaggcgagtcactcaaggcttacctaacgcgatttagtactatcgccgctaaagttagaaacttgaacgacagtattcaacttactactcttcaagtagggatcacgactgacctctcaactgctgggggcgagctgtgggatgacttgcaaggttgcccgataagaaatattaatgatttcaacgagagagtgcaagtgttggtgcgcaaaaagaaagtaagaaatgagatgaaattgctgaagactggcttaggaaataaacccagcactgccacagcaagcaccgtctcgacaaaggctgacaatccatgtggttctaacaccaagagaaaagatgactctaaggaatcatctaaaaataagaagaaacagaaaaaacacaataagtatgtgccaatttacactgtttataccgagcttaattaaactcgggaaaacatctttctcgcaaatgagcacagggttgcattccacaaatctaagcctatgagacatgcgagacacaaatgtgacccaaatagattttattgatttcataaacatttggcatacgactgaagagtgtcggcaactaaaagacgagatagaaagcttaatttctcgtggatactttggacaatatgtgaagcgccaaggaaatgaacaaaactgacctgttcatcccaaaaacccagataaccaaagaatgcaacctccccctgttgagggcgaggatatattagtcatctcaggagggccacagctcgctggagaaagtagtaatacccagaagcgatatgtcaatgaagtcaaaaatattcaataagtgtttgcaccagaaccactaaagaaagaaaaaatagaagaacctccaattgtattctcggaggaaaatataaaacacatgagatatccacacgtcgatcctctagtgattatagtacaactcgcaaacaaaaggataaaaagagtgttggtggataatggaatctcggtaaacatcctttaccgagatatgttaaagaagatgggactacaaaatgcaaagttaaaaccttgtatggtgaacttatgtggatttaccggagataatgtcgccagtcaaggcattattgaactcc

SEQ ID NO: 62650 - DNA, 719 bp, Cannabis sativa
caacaatctcaatagttcatgaagtatttttaacgaacttaaaagttcagagaacatgatttattacatgtcaaagtttagggggtaaaaatcttaattatttttcattgtaagcgagttaataatgctcttgcacattctttagataatttgacactctctttagatggatctcgtgtttggtggtcgagtcttatgcttaatttactttaatttatcatgcttataatgtgttatgaaatatagtcaaatcaagtaatatatcaataagtaaagtatcgttcttataaagacggtagttaattacaaaacaattaaattattaaattctatttggtgacaataataataacaaagaaggtttaaattctaatgaaaagaaaataaattattaaaatacaactaacaatgatcaaaaagcttagggtgattaatttaatttgaatctactttctatagtttaatataatataattttaaattctaattttcatatgatagccgacttactaaagaaatttatattcgggttaggacatataatctcaacctatatgcaaactttttacgttttcatgataaatttaaatatatagaagacattaaacatgaaaattttaaatgttacgcataccatacatgtactcttgtctaatatcaaaatctatatctatttactatagtctaatcaatactacttctcgaattttacattgaaa

SEQ ID NO: 62651 - DNA, 511 bp, Cannabis sativa
agggcacaaaacccaacaaatagcccttccttttaaagatgttgtttgtgttttctcttattggcaaagttatcttaatgctttggacttcaatcctcattttaatgtatatgcaggcaaacaattcagattgggtgcttgcagtttgctggtctccaactaaagaatgtttcaaaaatagaatatagatgctgctttctctttgcatgaggagaaacacatgtgttggagctcttctctttgataactctagtgttctagtgctcgataggtatgtcaaaaagatccatttagttggagcgggttggagcttcgatccgagggatcacctctgatctgaaacattcggatacttattggatcttggatcagatccgctccgccctgcctaatttttttatggatcggatctgatccaaccagatttcaatttatttagaaaaaaaacttaattcaagactcggacctcagactcggatcccttggcacctggacccagaccgggactcag

SEQ ID NO: 62652 - DNA, 1394 bp, Cannabis sativa
atagagagactgcccgccaacaaatcagttatttagaccatccttttacttcttattaatattacaaaatcctacacgtacacaaaaaaatcattctatacctataaatcatataaaatactactactactaataaataaataattcaatcacacacttaatatataaattaacaatatatttaaactatgtactatatagtgagccaaaaaaattgttatgagacaaaagtgtcatgaagccgtttaagattagtgtgcaaaaaataactactatcttgaaaggatgttaaaaaatacatgaaaacttaaccagatgcataagctactttactcaatatatataaattagatttgaaataaaattctatgcatcttaccgtagacatcgctttcatctactttctcctccacactatatttaacaatactcaatatttaataatcaatccaatcaatatttcaacagtacacgacaatttgaaagacaaggccgattgaagggttgcaaagcagcgaatggagctcctattatttcgcatatgtttttcgcggacgacaattacatttactgccgtgcaaatgagagagaggctactagtgtgttgagcttgttgaatatttttgaaatggcttcggggcagaaagttaatttcttgaagtcatccatcttttttagcacaaacactcctatagctactcggttgagactgtgaggtatccttggtatgactgaagcaaacgaaaatagcacgtacttggggcttccttgtacgatggggagaaataaagatgcggttctggggttcttaaaagacaaaatgcagaagaggatccaaagttgggagggtcgatttttgtcaaaggcaggaaaagaagtgttactgaagactgtggctcagtctattcctagttatgctatgtctattttcttattacctctaaaaacttgtagtcatttggagcaaatgatggccaagtattggtggcactcgaattcaaagaaaactcgtggagtaacttgggttagttggtcacgtttatgtaaacataaaagtgttggagggctaggctttcggagcatccgtgattataatctttctttgcttgggaaacaagcctggaggttacttaattttgagaaatccctggtgggtcaaatctacaaggcaaggtactatccgcatagtactttccttaatgctaagttggggaataatccgagctttatttggcgaagtatttttgagacacaaagtttgattaaagctagatctcggatttgtattggaaatggtttgaagactgatattttgcatactccctggctacctcatgactcaaatccgtatgtggcttctacacacccgggtttgaataattttaaagttcaaa

SEQ ID NO: 62653 - DNA, 744 bp, Cannabis sativa
aattatttgtgatataacaacattttgtggtcttcactccaacagtccaatccaactcatgctatattagtcataatgttttctttaagtcatttttaatttttttttttaaagtcattaggttacaatttaggatgaatttatgttagacttatgttatatttaggttggatttatgttgggttgtaatattttgaactaatatattagccgtttaggtgaaaaatcaagttttactcttttaaggattgaattggatggattcaatcaatccaattaatattgaattgaaaatattggatggacacaatctggtctaaaaaatattggatggatctgatccaatacaagaattcatctattggatggaatcgattcaatccaatgatttattggatcagtttggttcggttgagcctacagtataaaattagatcggttggagaaatccaacatccaatgtataatttgattggacctagttggatctaaaaacagtgatcaatgaacacagccctacttaattcttgattttatttatagaatcctatcaatctatctatatatttatataatgttactgttaggacaaatgatgtggcagtctatccattcaagatgctaatatttctattttttcagattttatggtttttttaattttttaaagatttttacttaaatttttgcattatttttatttaatgcatctattcaaacctaagcctaaccgtacctctcccc

SEQ ID NO: 62654 - DNA, 835 bp, Cannabis sativa
atataaatatatataagagagagaaatgtgaaggttgttctagaagggaggttaaccctgaccctatatcatttgcttaatgcttatctatacttaaggctccagaaagattttgggttgcactatgcactaaacagatctcaactattaaaaaccaagaacttatgctgaagctgtgaagagtgattataagcttgaattggaggctgttatgaaagaagaaatttagttccatacagaaataacacttgaattcttgtgaagaaacctgctaagaagaagatagtagggtgcaagtggtttattaagcccaaaggagagcatacttggagtggaaaaagcaatgtttaagaccagattagtagtcaaagactacacacaaagtgagggaatagattgcacataaatattctctaatgaagcaaatatataccttaattaattggagttttataggctttaagaacaatagaagatgtggactgtaacaccttaataattagatacgctacagtgacttttaattaccgtgcatacttttgctaattaaagagttttttcaaaaatcgtgcttaatttaaactttttgattaaatttaaacttttataactaaaaatatatattatacaaaaaggttgggatctcactttttaaacttgtttacatgttcaaaataaactttacaattttatcgcaaaacaactacaaaataaagcccccaatcgtcctgagactgaactctccaggtcaaaccatcttgacatgtacaatcatcctcaagctctggactcattgatgttcagccttagcttttcctttacctacacatgcaag

SEQ ID NO: 62655 - DNA, 1226 bp, Cannabis sativa
ctaatttaatttatgttggaatttttttttattcaaagtgaaaagaatggaaaaagaaataaaagaaaaattcatttcaaaaaaaaaaaaagaaaaaaattaattgtttaggtttagaataattttttaggttttagaatatatttttatttttattttttatacattttaaatatattattttgattttaaaatgaattttaaaatgaaaaataaatttttttgatgtggactaataaaagggtgatacgtggacacttacctggaagaaaaccagaggtacctacgaaagttctaggagtgtgacggaaggtatttttaccgccaaaaatacaacttaggtacatatctgctactcgacataaaactatattttttccgcaaattactcagctgtaaatgtaatatattgctttattaaaaaatattttgtaaaaatttaattttaatggtgatataaaatgtgtgttaactttggtgctaaatattacgttaaatttggttcaaaagatagcatgattaaattttagttacattacacttgtaacaataatatttttataaagtattaaactataaaataaatggtgatatttaagttttgcgtatttatcttcatgtttttaagttaatattaaaaattaagtgtgcaattagatatccaattaaaaaattgatcaaacacaattagtaattggatcggattggattggattttgaggtctaattggattggagtggatgatgattttttaaatccaattattaattggattggatcggatgacaaaaaaaatgttagattagatcggatatgtccacccctacttaattgcaacaatagtgatatgatacctaaaaaggtgctaggcaatggtgccttttagcctttcttgtaattagagatgtaaacggggtggggcaggggcggggattgctcccccatcccgatacttgcttcctaaattcaccctttacccgtcctaataccagtttaaattaaaacagggattatccactaggggaaggattctcatcaggtacccattacatatatatatatttttaaaaatgatatctcaaagagaattaagaaaaaaaaccatcatacaaacttattaaaacaagcgaaatttacagcataaatacccaatttttatattttgttactaataagtacctagttttaaaaatttatgacattaatgttggaatatattttacca

SEQ ID NO: 62656 - DNA, 2878 bp, Cannabis sativa
cagggtcctatttgtactattataaaaaatacagggtctattttgtcatttaacaaaatacggggtccaattaataacttttacaaaacagagggtccaaaatagtatttagcctatttaattttagagcattaatatttttaattaataaacatacctaagttaatatttagtgtagaatcttcaagaattttgaaccacttttgattttataaacctctttaatctacacacttacaaaattaagagagcttgaatataatgaacactattttttcattccctcaacatcatggccacacccatctctctccccccatagaataaaaagcataaactcttattatgagagattatgagctaattgggcctagataactaattgaagaaaattagttatcttggcccaataggctggtcaaaaatgtttaagagcgtgtccatggatcctgagcatgttaatacttatgtctatctcattatggcctgatggtaataccatacaatactaattatataactatcatatgttaatactaatactgcaatgagcaacgcttaattatgctagttcacataaaaatattctaacattctcacacttagattacataatcaaatcaaccagtgctcatagaataatagtatctacacacaaaatctaaagaagcacaaaacattggagattcacaaaacatgaagataactattaatctggatccactcaaaacataccaccgagactaagtcactgacttgcatcaacaagtatgtacacacaacatcaaatagtgatcgagaacatgcatatattcaacaactattagcaatccttaacatgtttattatacataaaaaatgtaactcccacagaccaaatatactcaataagtgctcattgaattaaagtatctacacacaaaatctcaagaagcacaataatatctataaaaatcaattatgtacaatattgtatagatagaatacaaatataatacataatgagacattggagattcacaaatacatgaagataactattaatctagatccactcaaaacatagcaccgagactaagccgctaacttacatcaacaagtgtgtacacacaacatcaaatagtgatctagaatatgcatatatttaacaatcattagcaatccctgacatgcctattatacatgaaaagtgtaactcccattgaccaaatataactttggctctcacaatccaaacaagaaatatcttctttaacacatatttaggcaattcgtgtcagtgtagtcatcaacatgttatctgttagagcgtgttatgatataatagaggactactccacaactttctcacaacaaatggtacattataaccaaatagagcaacaagacttctcaggttctgagagaaatatatgcttgctatatttatcacataagttctgtaaattcataataaagtcaattactcttaatactgaaatagaatatcgcagttgcaatatacaatcaatatcctcgtaacacgctacacactctatctctacaaatgaggatgatgtaaatgtccatacaacacctaatcacctataactctcccattatacttgcatttataagggaagaagttgtaggtgttcatatgatacttgattacaaattagctcctcatagaatcatgaatacttataagtggattttatcatccatgcaacattttcaatcggtatcagtaaaactaactattatatgtcacgatgttagtttgtcaatttttaacacatcctttataccataaggatgacaactcaagtaccagttcaacatgcctgcaatagatatcacaagaatatgcatatacttgagtgaatcctagactaccttcaataagcatatatatgtatgggacaaattcaatactgatctcttgttaaaatctatacatatggactttaggcctttcatagcacaccatacttttgataatttaaaaattttcaatgaaatcgaaatattattcacaacaataactagtcattagaaactatatgagacaattcagtctaccgttgatctcatcatgaagaatctcaatacttagaccatataaggtttatcaaggattcttcatctaatagagattatcaaataacagtttattcgtctctagaatagatcaaaatcataaaatatgagcaatgcactacatcaagtaacaaaaataaacatataaatgcacccactgatctttcacacaatattgactaatgataatatttcgatgtgacccttttgagaattacaataaatcattgtccttatgcccgaccataaatagatataatccatttaactcgaatgtccttatgagctaccttctcaaggcctaatcaagtcatttaacaagacaaggtctttaaataagaatttggctctcacatccttataaattgatttctcaatagtcaccactctattattcaataatagtgcaaaacgaacaaatccattattagagggaagactagttataggttttaattcaccttactttgagcatcaaacaatctattcttaaaatgaaccaccaccaagaaaaatctcccaattattatggtattaagcctaaactttcatgtgatcatgattttagcttggaaatcgtgatattattatatcatctgttcaacaaggattaagaaatgttaaatgctcttgacaacatagagatatatgtcattaaacttatctcttgcatataattacaggaacatttagagtagtgcccataagatcagagcatatttctctacttttgtaaagaccgcatatgattaataccttaaattattaaataattagggttcatgtatgagattat

SEQ ID NO: 62657 - DNA, 783 bp, Cannabis sativa
aaagtacgggtgcaaaggcagcagtgccccttgtttagcatgagcacctgaccaggcgcacatccccctctgagggtttgagcctcgattgtttgatgcgggaacataacagtctagctcacccagatagccgcgctggtcgaaatcccgtaaacgtgcctcagtgaccttggacggagggctcacccacctggcatccaaggcactttgcctcctttgaggaactgcagcagcaagctcctcagtgacataatccacgccctcaaccaggacgtcgccatccgcgtctactagctccccagcctcattgtatcccccaaagctttggggtgcagcctcctcttcttcctccacctcgaaaggactaccaggacgaacatcgctctgtttctctatctcctggacctcagtgtccccttcatgatccccctcctcctacacgagtggatcctgttcggcgctgggcgaggtggcgtgctgggccacatgagggtcagacgcgttaactttacgcattgtctgtttagtacgagccatcatcctgtggctagacagggagattgaattaaaatgaccgtcgcttgaagagggcagactagaacaaagacgagggtgatcctcgtaaaagagttgaagcagatcctgatcgatttggtgttcacttcccccaaaactcacctgggttcatcaacaaaagacaacatgcaagatgagtgtttggtggggatatcgaacattaaacaggcaaatatgccgaccaggagtactcaacagattaaataa

SEQ ID NO: 62658 - DNA, 1480 bp, Cannabis sativa
aaagtggaaccctatgacaaaagggttgtcacctcataaattcaaagatcatgtagagaacatgagacttggttctcttatgtaatttatacaaataaagttattattaatgaaactcttattttgatattttctcatatttacgcgcgtcttaattttacatttgaaaattttttagaggaccttaataaacataaggtttatgatttatattcgcttagtacattgccacataaagtatattgttatatggtacatgagaatgtatcgttatgattcatatatttattatataattggaaatgttgggtgtgaatattttagtctaaatactgaccaagtgggagaatattcgaatattttatatttatggaattaataaaagaattaattttgggataaatgaatattttatatttattgaatctagacaaaattaattaggtaatattctatatatggtcatattttgatattcattactcgatttgattttccgaattaattgtcaaaatattttgacaattaatgtggcgcagatatcgatagaatatctcacctataaatgtaggatctcgatctgtaaaggccgcctaatttgatatgttggctcatcaaataattagggtttaattatgagaattaattatttatttatgatttgcatattgtgggaatttatttaatttcaacatatattaattatgttatatgtgaatttctcattttttgtgattgtgctcggtggcagtagaaagcgatgttgggccattagagagtcacgttttgtatggtataaaatttatttatggtggggcatcattgttaggcatttagagagtcgggaatttatcggggtttgaaaatgaccaaactaccgttggatagttttaaacatttgaatattacttaagggcaaaatagtcattttgctaagattactttttgtctttttgtgagatattttaagattattattcagattaattataactcatattatcatcatataccaaaattagagaaaaacctagaaattagatgaacctcctttctttctctttctctccttcgaatcacacaaaccggccaagaattgtgggtattctcaactgaattcaggggagtttgggaaggtttcaagctgaagttcaaggtatgaattatgatttcttcttctttaggtttttcttagctcaaaataggtgtttatacatgtatttggggattttgttgttgtgattgtttaggttgtttgttttagtactctggagttttattagggttgttagaggtagtttgagctgaattgggagtttgttttggtgtctaggtgggatttgagtttaagaactcaaatcttgtcctttaatggtgtttttatttttgagccatttattgtgttttattgcttgaattggttatattggagtatatacatgcattctggaagttattggagagtttgggcttgaattga

SEQ ID NO: 62659 - DNA, 2124 bp, Cannabis sativa
tctaggatttcacattgttttccatcttattagagagagtttgctttgtattttaaaatcaaatatccattgtatgaagaggtgaggttggcacctgtagaaaaacaacttggttgtaggtgaggttgagaccgatttttgtaaacaacccgagaaaaatgagattgtcactacaacaatttaagagtgagattggcacttcaacaattcgaagaggttgatagtcctttgtaaaactattggttgaggtgaagttggcaccagtggaaaaacaactcagttggtgagattgacacttcaactatccggtgaggttgatagtccttggaagaaaactattgtgagtctgtgagaggtttgggaaaaaatttagtgaaaaagtccccggttgtaagggttaatcaagcccgttaacttggctcgatagttgaactcaaagctaggtccataacttttaagaccaagaacgtaggtggcttagttctattgaaccttgtaaaaattaagagtttgcaatttctatccctaacctattcacatttcaagtttgttatttgtttatacttgtgattgtctttgttattgcattaaacttgaatatttgcatgaattatctttggggtttttaaacttttgaaattagtttaaatttccaattcactcccccctcttagaaacatatcttggactaacagatattattgcactatcaaattgtagtaattgctatggatcaatcaggtacgcatagctaattattatctatcattattgtgttctagattatatacaaagtttatctcttaggttatttattttttctaacatatatggtctcagattgtcaattgtgtatgatttagatcctataatttgtataacaactattatgtatatgttaattttctccaattacatattaatttagtaattattatttgttaaatttttcattttttaatcttaaaactttaggggttctattcctcatgaaattctctttcttctgatatattatttgcataaaattgttgagtattttgtgagaattttaagtttaaagttttgagttttatgtgattatattatgatatagattttagattttttgattctattgaatataaactaaaattgattgtgtatatatcattaacaattattttataatgtttctacacatttaattttcgaattggatgagatataattaccataatcagatttattttaattcatagtttttgaatgtatttcattagatctacctaagtttatgcatgtatattcaaaattaaatttgtagatctcttagtaattgaatgccgatcaaaaaccccccttttcccatctatttcaagtcatttttttggcccaaaaatattttcgacctaaatggactcaaaccatgtcgcttgacccgttttggagctgttataggttgaagacaacctgtctaggacaaagcccactcacgactgccagagtgtgagggagagtgtcttagttttcaaactctgtttttgacgattcttttctctaatattattagaatttaatttatgatttttctataattttaattaatttttgatcccatttaataattattattattaataatttaataataattatgcaatgaaaaaatcattaaaaataatttttgatgattttttggaattagtaaatcatagcaaattttttgggctttttctcgttctatttgacatagtcactctcttattttgatatatcttgatgtgtattctccacaatactctttctttcacatatttccattctttgttgttctaaaatttttaaaacttgattatttaatgcaaaaataatgtattatggtggacactatatttgttgattatcgatatatattattaatatatctctttttagaaatctggctaaaaattattattattcagtaattgtttaatcactaaatttcatatattgtaaaaactattatttatttttgttaactatatgtataattacttgtctaaagatagtagttatatatatatactagatgaaagttatgtggcgagccacgtaaatattagtttcatttaagttctagtgaattttgtttaagaattc

SEQ ID NO: 62660 - DNA, 1343 bp, Cannabis sativa
  modified_base (33)..(36): a, c, t, g, unknown or other
ttttgttgattgtttcattgaattgtgatggtnnnnttgtttattgaattgaatctaagatttgttttgtggaatatatttgtgtttgtgtgaatttcatcagcccctttctctctctatcgtattctctctctctctcacttcatccatctttgctgcccagctatttgacgaaggcgacggtgactcgctcgctgcccagcgaatcggtggacgacgaccgtgactcgctcgctgcccaactcaggtttttaactttctcctatttttcatttttcatacttaaacttaacaataatgggtttctctctcatttttcacacatctgctcagctacctgtaccgcatacggtagttgtaccgcaaatataacaaatataactaagaatttactatgagttaacttacaccaaatataggattgttgaagattacaacgtgtttttatttatgggattagggaataggaataaggaatgagtttgattatctaacggagagatatcttcttcctcgcaaacgacagcaagcaactcaggtcttttaattttttctttttcatttttcatagttaagcccaaaaatcaggacttaattagttcatttttatcccttaagctgtctaattaacttggtcaaaagatgtgaccaataatagttaatttgatgagctgaaaaatcaggatacatatttgattgtaaatatattttttgtagcactcactcactcatatcaatctcaaaattaatggctataattagtttctttaaattcaagcttgttcagtttttatcatatttattaatgaatgatattttaatgaatgtattttcttctatgctctagaatttaagaagttattacaaaatacacaatgatttatgctgtaccagagaggagcatgtaggacctgtagcatttgataaattgttgtttttttcacaaacctcataatatgtttttggcttccatgatattatataagaaaagaaaaaattgtagaaaatttattagggtttcattaggtggatttgtcagaatgcattaatagggacaagttgttttgtgaggagcactaatccacgaaacatcatacattaaatttgaatgaattagtgttaaagttaagtgttttctttagttttttgtattatatatatatataaatgtatcatatttctattctgcagagagtgtgattttgaactaatatattagctctttaggtgaaaaatcaagttctactcttggattggattggatggatccaatcaatccaattaatattggattaaaaatattggatggatccaatctaatctaaaaaatattggatcaaaag

SEQ ID NO: 62661 - DNA, 1114 bp, Cannabis sativa
gtaagagccaagtagaagatgttttccatgctttatggaattaccccaagttacacaaagtttggaagcacttcgggttccttcacctcttcccttcttctttaaggcaagcccctgactttctaatggtgatgaaggggaagctttctaaagaagagtttctattctttattggtattacttggctaatttggtacaaaaggaataagtgtatttttcagaataaggacattgaagatgacatttggattccttgggccacggagatgatggagatacacttggcttctgctcaaactaattcacaccagaatatttcaaaagacacgattagatggtctccccctcccacgggaacattcatgattaacacagacgcttctctcattgaagggcaatcgggatgttgtttaagagtgataattagagaccatttgggtgcattagttgctgctgctacagatttcattcctggctgcctttcggtgctactggcagaaactctagcaatccgtttagctctgaagctcgttgaaacaagattaatgcagaccatctacattgcttcggatagtcaatcggtgattaaagctttgaaggggaagactcgcataaatacggattggggtattgtgattgatgattgtatcctagctagcaaaagattctataatctttcttttaatttttctcctaggaagtgtaatactgtagctcactgtttagctaattggagccgtttgtaccatgttactggagtgtggacttcggctatacctgattgtgcagctgcttatttgaaagcagatatgcccctgggtgctagtttgtaattcagcttttatttcaaaaaaaaaatgtgttatatgggacaccgaatgttttttttcaaacgaacatgcgtttcagacgtggaaaaaaggatttaatcgtaaacaggaatttgaattaccaccacgcgccacctttgcaaggggaacaagtgttagaaaagttgaattaagttcaattccaccttggaaagcgaaaagtaactccaaagaaaagaaagggtcgctgtgagaaaagtgatgttgttacaaatgaactacaagggccatggaagaagaagtca

SEQ ID NO: 62662 - DNA, 673 bp, Cannabis sativa
ttcttagctcatgagagtgttatcaggcctgtgttttgtaattgattaattgcaatgaagtacaaaaaaaactttgtccaaaaattttacccattaaaaattaaatcatcattatagctattctaaaaaaatgtagctccagctaatttgtttttcatcagaattagctgaggtaatcccctctacactaatgccctgttcgactaacactgtattagctataacttggcgatggaaattttgacctagacacgacttcgtggcatctatttgatcaaagaggtgatcgattcacttgcttgaggaagattgaatcacactatggattaagctgtgttgaagatagctgctttattagtacttttttctgaggagcaccctattccagtaccatggtatgggcaccagattcaagttagagtaatagaaggccaacttgtaagttccatggtctagcactttagtaatgacatatatggccctttcagaggaaatcctgagtactcctgttgtaacatcttttctatttaggaatactcatcgtaacaccatatccccatgcttaaatttcttatctttaaccttggagttgtagtttcgggcgatcctttgttgatacgcaaccttgtggagctcaattttctctctaatttcttcaatttttttctagaga

SEQ ID NO: 62663 - DNA, 1037 bp, Cannabis sativa
  modified_base (837)..(844): a, c, t, g, unknown or other
cttcttacaaaacccaaatctaatgtctctcttttctctatacctctctatctctctatctctcaatcttttctctctcaaaatctcaatctcagtctaaaccatcttgtaaaaataacaagtgaggtggtatttataggcttaggatcaagatcctaaagtcggtgactgcaagaattgaagttactaagttagttagacagtaactaacttaactaactttttcttttgagtgagatctccacatcagcataagtaatagtgcatccgagaatgtatgtgagcttttgagatcatggaccaaaggcactcgttgaaggagcttttagataagatagagcttgctagagtactatccaaaactgtctttccacgaggagcaactagccaactggatctccatcccggagagaggctatctattcttgaagacccttcacggaaggataaggaagccttccgagaaaggcttctatgagtgaacaacttttcaggaataacattaaaaatcttttcatttagaagaactatatgataattttaaatataaagaaagataattacctttgctttccatttggagcatcaaaaatagatttaatgtagaaaatattttctgaaacaaataaaaatcgaagactttatgtgtacccctatatatatacctatatatatttagaatgactaagatcatatgtgaaagaaaattattataaataacgtgtaaagactcatacttggacacatcatgatcaaacttattctaaactcttatgtgtttaattttattattttagagatgttcatatttacgatgttaatcaacatacttgttannnnnnnnagatcctggtaaaatatttttaacaaaaaagattaacattaggcctcaaatctaaaccgtaattaaatttctaatcactatagtacgaaaaatgatggagaatcttttggcctcaatggatcgccacaattagaagctaaagaatgcaagttcttggatactgatttagaactggagttgatcaggggacaat

SEQ ID NO: 62664 - DNA, 862 bp, Cannabis sativa
ttttggggaagaaacaacacttcttgggtgctagaagcaatgcccagcgtccaggttgacattttgtaaacctaggctaattttgatgatattttttgagaattccttcaagcaacttctctgttttcaacaaagattaagattcaactatttctggggaccacacggatgttccaaagggcaataaacctagcaccctggttgacatattgttaacctgggccgtttctaatcaagttcttgaaaaagtgtttcaggcagtttttctatcataaaaaataatgaagattcaagaaaattcgggatgaaaaccacaatctcgagaccctagaaaaagggcccaacgcccaggttgacctagtgttgggcccagcgcccaagttgacaatcaacctgatgtgctggtttctatcactcaaatgtcaattctgattaaaccattgaatctagaattgtcaaagacaaggtgggagacctcatcctcaagttctagaactttgaaagtatctaaacaacattatggaagttccaaaatgagtacccatcaccttggttgataaatagactggtacgttgggttctgcctatctgattctaattctgtttcaaccatccgtctagtttttcacaataaaaaatatccatgaagtccaagaagtcaaattcataattttcatttctcatttccaatatgggaaactcactcaaaaattaagagtatcgagtctccaattttcgcagaatagtaacatctttgaaaattggtgaccagcttctccaaaacacagaaacagactaactaatgtcaaaatatcacttaggcatcataaagtacattccttggacatttttacacaaaccc

SEQ ID NO: 62665 - DNA, 690 bp, Cannabis sativa
aattttttcaataattagtaagttaacataaggtaaacataggattattggactcaatccttcaatgcaaaagagttgaattaattaaggtgtttgtagcttagctagtttctccttctcatccattaattcatagacaacatatttctctaaatttctattgtagtatgtaatattgaaagaaattttttaacattttatgcttaaaagttaattcgataacaaaataattagcccaactaaacatgttactaatttatgttaatttttaccctttttccaaaaatattattagctatggttacaagtttcatcttccagaaagttaattgtctttttggaaagcaattccaaaaaattagtttccttccagaaagtaatttcaggaagctagttgtcctttcaaagagctagttgtccttccgaaaagaagttcggaaaggtttgttgaccttctagaatgcttgttccattaagcttgttgcatgtctagaaagtccttttaaaaagcttgttaccattctagagagcttgtttcccgagataacatggagaacttagaatgggtgttagttaaatcggttagtaatggcattagcctattatacctatcagtacctattgtaactagatgagcataagtgagatagtcatttttaattctaaaaggttagagagagagagagagag

SEQ ID NO: 62666 - DNA, 912 bp, Cannabis sativa
aatagaatatctctaaaatatttaatgaactaaattaaaatcacactacatcatatgctctaaactcttctattttaaaacttctttaaaattgaatattcatgctctatatttatagaatattatttattactttaaagatattttattaattatttagagttttaattttacttgaatatgtaaatattaatattatttaaataaaacgtattgaaatttaagaaaatagaattttagtttaaagaagcggatgtatagtgtaatattaaaaattgaagtaaaataaaaataatgtaatcttaatgatgtattttaaagaataaagtaaagaaattaatgagaatgtttttagtgttatgaaatatgaatcatatatgtagatgcaaaatgttaacacgtaatggattgcttgtttcaaaaagtttagccattgtacaagaaatatacctcttagccagcccaaatttgaaattggaattctgtcttacacataatatctgaggaacgtcaatacctcataggtccttagaggaactccaaccaacaaaattaatagtattcttacatttggtgatcataaaccttttcacttacagtaacaaaagaaaaacaagtcattgacaagaagctacaaaaatatgcaacgttatttctttaagcttatactctacatacatatccaactaatcaatccaagttgatcttgtacgttgtgtatgcccccagcatgttcgatcacctctgcttcctaatcttactgcttttcctacctctacctctagcccataccattcaataactccaaaaaataaatagaaggttgcagggatctctagttttacagttacagttgtgtagcctcatacttgtatggtcatcttttcctgatcaaaaacctgtacagtattt

SEQ ID NO: 62667 - DNA, 1270 bp, Cannabis sativa
caactgttggtgtggtttgtatcaagggttatggcttctcagaggccctctggatcatgaagcaataaagtgttattatggtcttgcatgagcctaagtgcttctcgcagattttagagttcacttttgcctccagcaagcctttaagtattagtagtagatgggaccttggtgttgggagttgtttgatcagctgccatactagtgtttccagtctcttatacgcctagcgtgatccaaggcagaggggaagtcattccgtagcctacagtaggaggttgtgcattaacctactcgggatttgtccctggtcgtcctctcgtgtttgtaggagtttgcctattgggatctgtcaccattgggtcgccttgatcagtaaagcctcccttcgagtttgtacaaccatcctatttacctgtcaaaactaagtcaaaggcttgtgttttttttaatgaaagcacccgatgtgacctcgcttctagccaatgacaatgtgtaaaaaataaagcaattacataagataaataaaagaaaacaaaattgataaaataaagttaacactaaattttaaagaggttcggctctgtaagtgtggtgatagcctactccctttgtatttgtattgacttgagataaggaacaaagtgttcttcctctcaaaagctcttacaattgatctctgtgtaactttctctcttagatccctctttcctctcttaaatgtatttttgacgcaattttctcgatccccttaatagtaatattaggccactattcataaggacttaatacatgaggaatggtttccctttcgcctataatgagtaaaataagaaactacattaattctataattacaatgtaactaatagaaaactaaaatgtgttgcctttattctttgaatcaatcccataattatatgaattgtctttgtgttctagaaacaatgagattgctctctgaaattgtcggtgttatcctgtttacgcgagagtcgaggtaattctatcttatgagcttctaccattgtttcatactttgtatcccatactcttagtcactactattggggagatcgttactaagaataaaagacttacaataatacttatctttcaagattccacgacttgaaatttctaattaatgaacatctatcagggaagaatctcattaaaataagaactatgtaaaataaacaatagagatcaaatatccttaaaataaagctcattattttaaaatatgtatttttatattatatttatt

SEQ ID NO: 62668 - DNA, 914 bp, Cannabis sativa
  modified_base (286)..(292): a, c, t, g, unknown or other
tcgaccactgtcgtgactaacaaaaatctgatggcccctacactacttccacacccatgccaacaagcttccttttcaacaaaagcgcctcctgcggcttacgatgtcactcaggccaactcgccctagtgtaccaagcatatagtatggactacccaccaaaccttgtattatgccaactagtttcaaacattttattgcgcctctctacaactgcacgtggtagttgtctttctagcatccttccatacgcctacatcccctctaggataggccaaccaggttnnnnnnncactgagataaacttggctctgatacccactatcacaggctcaccttttcaggcagtggaatacccctgtggcaccttagcttctctaagctaaggtcaaccttccaaccgtctgagtaacaatgggctcattttttgcgcgaccgtgtgcctcgtgcacacgtccgtctctcgaataactcccgccaagtcatgctcacaagcatccatgagtgcatccatgcatcgaggctttctagccaagatactcacactgtccataggttcccagtatgataagataaatcccaacatcgacgctcacgtaatcactcgtgaccaaggtagcaagtgtggcaagatgccaacactaagctgacgtgccaacgcctctatcatgccccattcgatattgttcgaatagtctcccccgttgcccaaggactcccatacgtccatggaccaatcctcaaggcatcatgcctccacgcatgttggcaggccctcgagacaaggcaccaaactagttgcatacattcgacctctatctctttccagtatggtgcatccgtcccatgcacgtatgcaaactagcccacgaatgactacatgtgtcatcttgtgttgagactcgtggccaagg

SEQ ID NO: 62669 - DNA, 989 bp, Cannabis sativa
gattcctaacttccatgttcaatgtaggtgacaagaaatctgactttgaacaacaaactattgttatcattgatagtgatgatgaaaatgctcctcctagaaccaatttgcacgataaaggccctatagatctgactgataaaggtcctatatatctgacttataaagaccctatagatctgacggattgggatattaagcccattctgtctaaacgaaaaagatcttgttcgcctaatgcaagtgggagcaagaggaagcttgatggtgcaacacctacaaatgatgctaagaaccgaaaatcaccatcaaaacatgttcaagttcaatacgaagagaagacaagagaggacaaaagctctccaactacttttaaccagctaacagttggtgatgagagtggggctttcaattttgaggttagttcctcatctgacaagcaaactagttcctcatatcacagtgatgctagcgttgatttagatgagatcttttcacaaagccagaaaccaatttaactaagataagtgagtgtacacgaccagcgattttgaacaccattttggtctacttgttcttcggggcagtcaagaggattcttgtactctgcatttctgatcttttgttgctggttgttcttgcttgcttgtagctatagatatagttagatgccactaaactaacacaacattagtgtatatgtatctatatatgattagttcactaccttaccttaggaagagtcagaaaaaaccattcttgcctttgttcctgtcaatatgtatatgtttaaggcaaggttgaaatggttctttttctcttccccttttgtacaaaactagctaattggactggtatagtcaaagctcaacagatgtttgtaacaagttattatatatatttatattttctttttgcttgaagaaagttgtatctcaatataaattggagaacatggccacaatgggaaaccttccaaaagccctttg

SEQ ID NO: 62670 - DNA, 740 bp, Cannabis sativa
tgaaactgatttttcttgtagtgcgacctcggacctagacccgacttaaataaaattaaaaaatgaaaatgaattaattttacagaacacacgattgttttctgtttttaaaattaaaaaacaaaagtggttacaaaacacatttttgtttttcaaaaacaaaaattttactttcattttgtgattaaaaaattgaaaggcaaaaattttccagatatttaaaatttaaaaaatatacaaacacttgtataaattatttacaactcgggatccgaaatccaattacaaaatatacatattaatgtaaaaatgattagtttaggaattgatcaatacattttcttattagaaaatagctacagaaatgtatgctaccgcgtgttttgactagtatcttaaatgatgtaacaatatataataaaattttaaggaattgcccaatacattatttttttattttctttttcaaatttacgtttaggattattgtagtgattgttctagtagtttagattttgattgcgatttaagttgatttattagttgctatatggattacaatatagatttctataaaaaatgcaaaaaaaactgtattaaagtataaaaataaaaaaaaaatcatattttatatggtagttattcacgattaattttattttcaaagttgtataacattttttattaaaaaataacaatctcaaatgtctcactcttgctcattttagagcgatctatgt

SEQ ID NO: 62671 - DNA, 1858 bp, Cannabis sativa
caatagtgagagaagtgatgatcttggaggaatgtatgtctattctagaagcagttaacagtttaaggagcatattcaaaaggataaagtgaggaggagtgatgagcattacatattcaagttggttggctccccaatatgatggacagcttgcacaacattgatatttcggtctatgaattttgatgtgtacagaattaaggttgcaaatattttctctatcaacattcacatggtatattttctctatcaacattcacatggtatgttgccacagatccactcgttaggagtagggtgggcctcagcttagcccctccaaacaaggcctgcgcctcgggcttccacggcccaaagaatttcaaaaaaattccttcccatacatatctttattcttttttaatattttacaaaagagaaatattaggggggatgtcaagcacaataggatggggctcttgttatgggttcatgcatgttagaatatggtatgttatacgattctatctcaaaattaaattggtaataaaaggagtaccacatgcatcttatgtatagtatttagtttctacatattattaatgtaggactctctaacattccccataggatgatggctcttttcttgctcacaaattttgcaatcctcgatcacaagtggcccttttagctcacagtggctctttttggctcactatccctgaattataagcggctcttttagctcatctttttagatttggattggttactcgttagagttttagtttggctctgatactatgttaaatataaataataaataaaccatataagaaataatcactatgtcacatcgatatagtgttgtataccttagactatgtttgttaggaataatagagaataatgaggatggagggttggtgaatgatgtagaataagagagagagagtggagagtagcaatccttttgaattgtttggtagaaaggatgaagtgatggaagaatagagagtatttatttatgtaattattatattgtcctacatatatgatgaccaagtgtgtgactttagcaaagtttagacattgtctaaacttgctcaacatcacaactttgcagtgatagacctcctttggagttacaccgagacatcatacatatgattctatgacttatgtcaaaaaggtggataattgtggtgtttttaacataagtctaataagtgccaagtgtcactctcgggttggtcatttttaaatgatagttatgttagctggtttttgggggaatcgttttgtcccaaagctatatatatcttccctttgccataattccatgaggctaaatttttagaaaaacacaacaaatttgagagagagtgagacagagtgattaggagggtcaggaactagtctcctttaatcgatcttcctgatgtagatcaaacactttgtactcataattagttcatcaataaagaattatatgctgattgttttccggggatgtaagcacagattactctaatttgtgttcgaacctcattaaagaaaggtaccattttagtttctgctccattaccattgattgttcagattatagtttatgcttgtctaaatgttcattgttggttttgagcttgcattttcaattctggttttatgttaatgttctttgttgtgtatattcttgaatgaggtgaattggattcaccacaatatatttattaattatacttttataattaatgtattcatttattttataattatattttatatattccataatatattattcattaattacttattttcagggcgtaaattctaacacttcttttgtagaaggactttggcccaagcaattctt

SEQ ID NO: 62672 - DNA, 3549 bp, Cannabis sativa
  modified_base (3428)..(3428): a, c, t, g, unknown or other
  modified_base (3470)..(3510): a, c, t, g, unknown or other
aatccaagggttctaatataaatagttttagttgaaagggtatacactgcaataaattaagttaaatgtaaggattggataaaaaattgcaatttattataaacattttccattatctttcctgatgtttcgttgtttatcgtccctcataagtaattttgaatgagtgtgattttaatatttgttttttaaatatcaaatttaataattaatgacagcattaccaataaaaacaaacaacatttgtcgatttgctgctaaaaatatataatggaaaagttttctttttgcatcggtagtagtactgaagcactagacaaaaacactcatgtgttttggtttcattctcgcagtaaatcttcccatgattgaagtcactcagttactggacagaactaagccgaagaataatttaaccttttcttttcagtaacaaattaaaataattttttatttttgaataaaaaaacaagttaatagagatatgatctgccaaaactcaattatatatgtccctacaattatattgttctttttaatatagttatagctagagaaatttactgtaaaagcctttatgcagtgctttggtgtagttaatgcttcaccgttaataatgaaaatctgttaattaatatctagaaattcgcagcgaaattattacaccctgctacttaataataatatttgtttgaaaatgatgtaagcttaatacttttatctatgatacatgatataaactatgatcttttatttatagaaaaactaaaactaaggggcgatggtttaattccaccacaagctccatcttgaattaagttattactaaattatatatatatacatgtgtcgtttaaagaaattctcttcagttatatgtatactaggttgatattacgtcaaatgtacgtatcatttgcttttttcaattaagtttgattaggtgatactaagtgtaatacatttatgtttaacttattttaattaagtaatgtaatttttttaaaatatttacatctttgataattttttagttattgcggttacattagtgtgccatttagatgtgattatacacatatttattatatatgtacaacaaaactcaagtgagatatcttatgaatcgttatgtatccaattgagtagaattgtctaatataaaattattttaagtactttaaatttaaatttcttaatataaaatacgaaatttgtggcataaatacctattttcttttacttgttgctaataaacaccgagtgttaaaatttgcagtaaaaatacctaaagcccaatttctatttttatgtaggttcatctattaataattttgttaattaattctaaaagagcacatgtcattctctatctagaatggagggagagagtattaaaagaaattgttagttttatttttttaattttaaatttaattttctaaatttatataattagttgtttatttaaatatattttaataatttttcaaaattagaccgtagagaaaatgacacatgtcattttaggagtaattaacacaaatatctatataatttttacctacataatttatatctttaaatatatatgtaatattgtaaaataaataaagaatatcctgttaagtaataggatattcttttaaagttaaccaagtattctattacataacgaatagataataggataatattctgtgaaagttaacgtaagaaacaaaaaaatatcgttaaaccaagaattaattgtgttacatagccacattttatataaaatagatatataaatattatataatctagaaaattcatacataacactatttaaagatcaggtactcttttatgtgtgtatataaatttatgttatcaatagagaatcaaatggaaatagtggaaaaataaaaagaaaataagtaacactctctaatatacgataataaatgaaacaaaaataaaagaaataactaattgatacttagtccatttataagttctcgcaattttgaagatgttattttgtagaaataggagactcaaaactcttcattttcaagtatgttagaaatgagaaatgcaattgtaaattcaattcctctgacttcataaatcattgtatacgtgaaaaactagacgaacggtcgaaacgacatcagattcggacaagcagaacccagcgtaccaagccatttgttgacttgggcagtagatcctttcaatagagctcccgagattttatttttgatactttcaaggcttctaaacttgaggatagggtctcctcccccatttttgatcatgtcggattcaatggtcccatcgaatttggtatttgagcaattaataacggcaacgtcctaggttgattgtcaacctgtttgggccctatttttagggactcgggtttgtggttcaaagctgttttcacattatatttacatcagatggtattgatacataagcagtacagtaggttatttacaaggttccctgtacaatttcgtctcaggttaatcaagcactcactcgaccttacacaactacagatgtttttgaagcactaacttccatgatatctgatggtagtccaggacttgacggcatgtcagttatgttttactcgaaccactggcatgttgttggtgatctagttaccaaaatggttctcaaagttcttaatggcgggggagatccttcaagcttcaaccaaatagtgattaccttgattcctaaggtaaaaagccaagctcaatgactcaattgagaccaatcagcaattgtaacgtgctttacaaattggtttctaaattaactgttcttcggttgaaaccatatcttggtctggctatctctgattcccaaagtgcatttctaccttcctccacttataacagataatgtgttagcggcttttgaattactacattctctaaagcacttaaagagtggaaaggaaggttatgctgccatgaagcttgatatgagtaaggcatttgatagagtctaatgacatttttgaaaaagtatgatgttatcaatggggtttgatgcttctgtggtggatcttattctacactgtattcaaagtgtttcctattcttttttgataaatggcactgtcaaaggaaaagttattccaagcagcgggattcgacaaggggatcctcttttgccatatttattcatcatatgtgttgaaggtctttctagactttttcaagcagaagaaataagtggtttaaaggtttcatgaggcactctgtcagtttctcatttatttttcacagatgatagtttggtcctctgctgtgctaattcacgttcagccactgccttcgaaaactcattggattgctactgtcacgcttcaggacaaaaattgaatgttgaaaaatttgtgtggtccttctgttgggttttatgcnctaaataaaactcatttcatatataatcagatttacttattnnnnnnnnnnnnnnnnnnnnnnnnnnnnnnnnnnnnnnnnntgatttatttcatggttatatgtatataatgtatgaatt

SEQ ID NO: 62673 - DNA, 1760 bp, Cannabis sativa
agtctctctctcactctatcaacttataagaggtaggcatcgaaagaaataataaattaggacaacactcctaatttaaagcccaactaccaacaaataaccttctcctaaatcaagaccccactttttactccctataaaattagcaactccattctatatcataccacacacatataccaacaaattactcaatattcaaaacacaacttcataaaaataacaatattgctattcagtccttagtgaagcacattattacaattatggcctcaaactcttcaagcatgaagctactctgcatggttgtcatggtcatggtggtagttgcaccaacgacacatgccctaacatgtggccaagtgtctagcagtcttagcccatgcatcaactacctcaagagcggcggtgctgtcccttcaccatgttgtaatgggatcaggtcgctgaacagtgcggccaagaccccagctgaccgcaagactgcatgcaagtgcttgcagtctgcggccggcagcatcaaaggactcaacttaaacctcgtcgccggacttcctggaaagtgtggtgtcaatgttccatacaagatcagtccctccaccaattgcaacaggtataaataattatgtataaatttttaatgattaacaattgttttatcaatctaataacataaacaaatttatgttgttacttatgataattattttttttttcttaattaatacagtgtgcagtgagcttgtgaagaatgcacaagatgattttcgagcatatatatatatatatataggttatataatatatagaaaaacataagaataaagtgtgtgggtttatagtttatacccctacacgtgcgactcttgctatatattttataattatatatattgctatagggagtcgttttagtttttatttatagttggaatttcatgtatttttaattatatcatgtgtaatgaagagagttctttttatgaaatcttattttataagctgttagtgatttattttgatatatattatattaaaatatgtgaatattaatattgaattgtactactatactactacctactaataacaataatactatatataatgatcaatgaaaatagtttctcattattaaaaacacttcatttaaaattataagcttaactcttactttattagaaaatctcattattaataatgtatgtaaagataacaataaaatatataaaatttatgagctacgtctttttattattaattaattttgagataaaacttctatgtatcttacaattctaatatagtatatataaagtcgaaagagtcaattataataattcggaaatagtgagtcaaaaagaaccactaaaaattccaaaaaataaagctaaaagagccattaaaaatttaaaaagtagaactaaaagaatcacttatgattcagagataaaaatagagccgcttgtgatcgagctaccatatcttgaggagatgttaaaaactctcatactgctaacatataaaaatcttatgcttcttacaattctaacatactttttctataaaaattgattttaacatctttaaattacaagcaattaatattatttttttcaaaaacaaaatagcaaaaagaacgacgtaatacatgatgatgacttttttttttcctttttttgttaaggatatataaccgttataagttaaaagaaaaaaaaaatcgtaagataaagtaaagaattttttttttttttttt

SEQ ID NO: 62674 - DNA, 502 bp, Cannabis sativa
cctctgccttcgaaactatttggttgtggaggaatagaattcgatatgggaggataatgaagatttcggttgatgagatgctcaacaatgccttaaaccgttttgtggaaatgagtgatattcacaagccatcttctgaacagatgcttactgtctctaacagcctcccagttccgggagttgtattgaaggtgattttggcaaatggttcttttaaggatgggaactttggagcaactattgtggctactgatgatgtcaacaagcagtggcttattcgaaccattgctggaagattggattgctcgatagcagcagaacttaaagctgttcatttagctctgctttgggctaaggaaaaacaatgggaagatatgtgcatcttctctgattctcaggtggtggtgaagtctttactgaaaggaatttctccaagctggaaatgttggactcttttctctagtgttctagaattgagaaatagtttagttaattgctcttg

SEQ ID NO: 62675 - DNA, 720 bp, Cannabis sativa
  modified_base (598)..(598): a, c, t, g, unknown or other
aatattaattaaatttggataggtgatttgtattaaccactttaggttaatcacagtcttattttataaaattgaaaattattatatgataatgaggttgttagtttgtttttctgacatatatgataaaagattcaaagttggatgtatgagtcgaatttttaagtttagtatattaattcatacgtgacaagaatagaactacggtaatattaataataattaataaaaataaaatagaattttattataattaagaaatggaataatgatattaattataattgagaatattaagattatcgagaaagttctgaaaggttatcttatagaaaaacgccaaaagaaaaaaaaaactgaagaaaaatcacacttaattaaaataataataataaaaaaaagatgaatcttattgacataatgttgccatgagaacaaaaacaaaaacttataaatatatatgtaataaattaatgtccgatttgtgatagctagtagtattataatcttgttgtgatattttttagctgagaatttgttagagtcttgatatatattgtttgtttttttatattgtaaagaaataaaagacctaagnctaggaaaacagaaccgacaactctatgaattataatgatctgttgaggctttgtaaaaaaggtctaatttatttttccttgtaacttatttatgtgacagatagtatgggaatttatccaa

SEQ ID NO: 62676 - DNA, 911 bp, Cannabis sativa
aaaaaaaaaaaaaaaagcgtaatttatttacctctatccataaaacaaaaggtaattccatcatacgacataaactaaatcactacttcaacgattctagaaaaggcatcttatttgacaatgagatctccaatggcgttgatgaatggtgggttgaagatgaagagagtaagctttgaatacgagattatgagtattttagggttcaatttgatttctagaagatgtgaaattaagactatgtatggaaaatttatgtggtttcacgagggccaatgttgcaagcttggagaccactgaactcccacttaccatgagagaacctccattgtcagcgaccaaaatgtaggagttccttgtggtggatattcctttagagtataatatactaatgggtcatctagcactaataggaatgaaggcagtaagctcgataaaaaatttgtccctaaaattctcaactcattatggagtgaagacagtaaaaggcgaccagctaatagccagacaatgttatgatttagaaatgaagaaacaaagggcaacccaccaactactggtaaccatgacaagagaaaatgaggtatgcgagttagaagacttggatcccaagattcaagatgaataaaattaactcaagcaaattaaagagttggaagaagtgaaattagacccaaacgaaatgaccaattgtgttaacattggaaagagtttgaggaagaactaaaatagcaattaatcattgttgaccaagatttttggcaatcaattaaatgagataataatgagagctttgggataattaatgtagataatttttatgtggttctggcattaatgagctgtagtccacgagtctctattattaataagagtatttcttttatagagaatgtttttggtctgttttt

SEQ ID NO: 62677 - DNA, 1368 bp, Cannabis sativa
tccccaaccagaggtcgtttttaatgttccaaagacaatttacttggctgactaaaactgtttgtcaagacatgagcacaaaggttgtgtccctcaataagtttaaactttgcttaagcatattggggacacaagttggtaaaactcttaatgggttcgagctaagaccctcagatacacttaaacaacatcaacaaagtgaatatggggcattttgagttcattacaacaaaaagattcgaatatatctccagatcagaatattacaacaaaaaccagatcagtacaaaattcatcacagaggggcatattgagttcttttggaggaaacttacagtggaaagatttggaacccttgggttagggttcggatttccaaaatctcaaggtggttgttcatgcaaaagaaaggagaagaagttaatactgatttagtgataaacagagagaaagagagagtatcaaacactgtaaaatagggattaccaaaatacctgtgtattttggaatcacacccattgtaatctctgatctttgaagatccatagtggaacgaggcgagctcgaagaggacatacccagcacaattttggggaacctctataaaatttagtgtgttctctctatttttcttttctgcattttacaattacatttatctgtttgtgtttgtttttttggggttttgattcggtctgaaagggggttaattttttggggttagattcaaactgggctaaggtttgatttatggttgtgattaattctggggtggtgttcttaatgttctttagagaagaacattgaagaatgaggactcggctagggcttttatttttgttggttgtgttaatgtgtttggacaaataaaagatgatatatatatatatgtgatatgattttagggtttcagattaaatataaaacgacctgtaggaaaatgataatgggctgtcgtttttttgggggcttcaaaatctgattgggtcaataaggttgtttgactctgtgggaaaggttacatttgaccttggaattattgacttgtctttgctctggtgtaggttaatttaagaataaattcctacaataatgtatctaatctagtaggacattaaaaacacatacactcaaagagtcgaaaaaatatgcacatactaaatgaatctaaatgaataacgaaagggtgacaaacataataatatatgacattacttatgtcaagacagttaattgtgtcagttagttgttatggctgttagttcaattctgttacagtttctgtttggtttgttttgcttagtcttagctcagtgagctttgtatataaattgtactcttcagctcaagtggtaatgagaataacaa

SEQ ID NO: 62678 - DNA, 625 bp, Cannabis sativa
tgagttgaaataggcctaaggaaaaaagaaaatttggacccctattataaaaataaatagtatttttaaaaattattcaaaaaaatatgtctatttttaaaaagatattatttttatttaggaccctaaaatgggtggttcctaggcacgggcctagcccgtcttagcctagggtcaaccttgatgtgtaatataggggatttctaaaagagtaattatttgcgacataaatacctaagttaaactcccagttgcagataaatacttaagtttaattttttacggtagtaatatctaagttatatttttaaaacttccgtaggtacttgatcgtgaagtgtcaagtcaatcgcacgtggcagttcctaattagtccacgtcattcaatttttatttaataattaatttaaatatactaataagaaaatgacgcttggataataacttgaaacttaacgatcaagtacctatggaagttccagaaatataaattttggattattatcgtcaaaaattaaacttaagtatttatctccaaccgagagttaactttacgtatttacgccgcaaattactcaacattgcaacacctaaaggttgtaccttgtgaatggttagcgatatt

SEQ ID NO: 62679 - DNA, 1020 bp, Cannabis sativa
tctgtgaaaaagctcaaaaaaagcctcctaacataaaagtgatggatgacaccacaggtaatagccctcaagaaggaatcaatcatcgtcccagatgagaaccattgagtcctcagggatttgtcaaattatcgcatgaacagaatgcaagccccaggaagacccagccagtattggggcccctggcttgacggactttggaagagcaacaataggtcactctctaactaggttgatgaggatggcgcttaccaccgaaccagatacataccaattgcagaattagaaaattgccatcttaggtatcgattggaggaagcaaaccggcgtaatactgagttggagcgtgaaatggctgccgtaaaggtagcgctgggagatgatacccaaaattaacctgaccttgggaagaaagatgcatagggcaaacctcacggcttgcagaccaaaggatagaggataacccagagatatgctcaggaccctcaggaaatgcaacctgagggaacttaggaaaaccttgagagacagactgagatatgtggaacatcggacataaatcgccaactcacaatttgggctcatgagaatgaaactcgtgcaaacccttgtaggaagaaagaggtgagtcaaaccatgagaggaagggcaaggtccggtcacaatcatgataagggtgatttacgagaacatctgaacctgaagaagcctgacctccgtcaacgactcagtttaacgcaacaggattcattccctttacggatgagcgagttggagaataagttcagagtgcatcgtcacgaaatctaggagacaaccagagcatgatactgttggaaaacctaatttggaggcctcgggattaaaaaaaaaagacaatcccaaaaggctactcaagaataagaagcccaacagatatattcctctttatgccgaatgtaccgagctcactaaaactcagaaaaaaaatctacctcacacatgtacaggaagccgtttttgacgagccaagacctataa

SEQ ID NO: 62680 - DNA, 2877 bp, Cannabis sativa
  modified_base (792)..(792): a, c, t, g, unknown or other
aacaaattaacaagaatacaacataaaaagactgtattttctataaataaaataaaaaaatcgtaaaaatattaaaactctattaaactatatttttagaatttttttttgttatttttgtgtatttgtgaaataattcccaataaaaatgcttttttatttttagaaagaaaaattaaattaaagttatatgagtttgggagttacgtttagatggagaatggaccgcgaaaggtgatccattacaaatacaaacaaacacagttaaacacgaaacacatggcgcgtatacaccacgctctcgccacacggcacctaatcggtgacctaagcctctgactctctgacccctcttccctctctcactttcatgccctcatttaattaatgacctgtccaacactactccactctttacaatactcgcaccacatccgcgcgtgtctttcacctaccttttattatttattacctccttcactcaatccacttgtaaaaataaaaccttcaacattaataacttagtttatttaaatattttagtttaatttgtacagtaataacatttacttttagaactctcataaatatatgactaattagaatttttgtcttataaattttaacatatattaaatcatgctcttaaatttttctagtcgctaaaaattttctttgaactattgagattatcgaatttaaggatttttgtctaatttcattcaattgtactaatttagtgattgtttatgtactaaattatgttctccaaactttaatatctactaaatnatgcccctcgaactttgacatgtgtcaaattatgtcccctaaactttcattcatgttagactttccttattaaaattaaaaaaaaagttttaaattaaacaatctcaatagttcatgggagaattttagcgaccagcaaaatttagggagcatgatttggtacatgtcaaagttcggcgggtaaaaatcttaattagcctaaatatattattattctattttttacttacctgatgtgacatgcttacatggacaatattagtgttatatagcaatacaggtcacaaataagaaggtcaaattagagcctgagccaacgggagcaccgagactcaaatagaacgacaagtgacagaccagccacctcaagagggttggtcggctactcctgggcgaccctatgtcagccagcctctacacaacacaaggccgtccagcttgctccctataggtgcctgaccgaccaggactggacctaggaggatcttgtggatagttttacacgtgaactgcgaattaggccttaatagcccaataaaatagctaaaatatatatatatttaaggacaatttaatctaatataaatacctattattatttattaccttcccactcaatcctcttgtaaaaatgataacaaaacattccattacaaataatttaataattaagtttaatttcgattacaaataaacattttagtttaatttttgacaataataatacttaagttatatttttaaaactttcataaatatttggtcattaaatatcatgtcaatgaccacatgacttttcatctaagtcattaaatttttattttatttaaaagttaatttaaatacaccaataagaaaataatacgtggataatgacttgatacttaacaggaagtttcaaaaatataacttaggtattattctcgtaagaaattaagcttagtatttatccgcaaacgagagttaaacttaagtatttacgccgcaaattactcaattataatatactaataagattagattggatcaattattggatatcaataaaatctaaataaaaattgatctaatctaattacatttaatatacattaacaaaaatatttatatttaaaattattaaaaaatgaaaaatatattttaattatattttaattagttttttttttttttgttaatattgaatttttaatatttggttattttgtatatttatgttcatgatgtttatttattttattacttgataatattattgctttaattttttttttaaaccttttgttgtattaaacatgtaagtacaatgtttttatggagtattaaatttgaatgaatgctcatatatattttttacatatattttttttatgtttctaagtttatataaaaatgtaattgaatatttaattaaaatagtgaatcaatccaattagtaattatattggattatatttgattttgagatttaattcaattctgataattttctaaatctaattattgattagattggatcgaattaatagaaaaatgttaaatttaatcagatgttcaagcctaactatagttaagtaaaattttaaaaaattcaaaataatttaccgttaataaaaatagaatttaaataatttattttatatgcgtataaaataaaagatacaagcattgaacataatatttaaatttattttcaacattttaaactttttaaaaatttacaaaatctcttatatatatagttacaatatatcatatcaaaaccactaaaaagtgcaccaacatacctatttttaaaaatacactacaaaatttctctcacattttccccctccaatttagcaaaataaaaataaaaagtaaaaataacaatatataaagttggttgggtttgcttaatggggaaagttaattatgtaaaaaaagttttcttcttttagaaaataaataaaaaaaattaataattataaaattaagaaaaaaaagttctccttttttttgacacatttgatttgacaccattaattttactcttattgatctctccaccaagttgaaggggcatggccataaaatatatatata

SEQ ID NO: 62681 - DNA, 3331 bp, Cannabis sativa
tcaaaataaaatttaaaaataatccgatctaaaagtgttatgacaaaactgtttacatattctatatctgttcgtattttcaagttggctatattaaaaaaagaaaaaagttgtcaaaatttaagttaagggtcctatttgtaccattttaaaaaatacagggtccattttgtcatttaataaaacagttggtccaattggtaacttttgtaaaacacaaggtccaaaatagtatttaccctaaaatatttatcctgatgtattttttgttgttttccaataaaattcgattatttagcaatattcaacattaattaaaattattttaaaattgtggtggtaaatgatgatgactctgatgaagattttaaccttagtatactttgataatttttcagtgataataacaatcctactagctttttgagacgatgataacttcaacaatgttttggtaactttttcggtgttcacaacgactccaattattttatggtgttatttttttcattcatatttataaaagctgttttattttccctaaaatattattactgtatgcaaactgttattggaccactttgtccataacatgaaaattacattttcattagacttgaactgtggggccaattaagttgatatttttggaataagtagaattatacataaatttactgtccaacctaaatgattcgcacaaacaaaatcggaaaattcaatagaaatataactcgcataatttgtatacctggacgagttaaaaataaagtcaatctactcaataaattcaaactaatccaattaacctgattaaagttttttcatatttttattaaattttggatggtttccattaaaatttttgtaactcacacattccatgctttacattggattaaatagattaaataaaatgtacttaaagagatgtacttggtttggtggagtaaagttattactactaagctaactcaaatgtttaaaaaaaaagtgtaaccaaaaaaaagaaaaataataataataaaaaaaataaaataaacagaaaatagccaaagaggcattttctggttcatgctttgtcattatcgacagccctgccaaccttcggcgccaaatttctgtttcaatgaaaccctaactctaattagtttccattctgaatacccaagattggaactcaagccttggggtcctgctcttcaaggaaaggtaaagtttttagttttttttttccttaaaactttgcatcttttactcaattttgctgttctttaacatggtaaactgataccaatccatttgtaaaattcaattgctgaaccagttattggtttctatatggctttattctcatttatgtacttatttatagcttgataaccgttgtttgtctcctatctcctttggtctccttgcttgttttcttttcacttgtatgacctcttaaaattggcaacactaggaattgcgttattgatgaacctttttccttctttggaattttccactatcacattgatatgaatgagataatgattacaattttaagccagaagcaagtaaaaatttttatggttatgtttcatatatttaacgttcttcttttgtgtaaaagaagtagaaaagataaggatagaaaagataagctgagtggtcacgcctttagtttgaggtttgtgaggtttgattccagtgggagctacacacactagaacttcttaactcttgaagattttattgttcagtggtaggactagtagtttcagaagaagttagatgaagttttgttctacggctcactgaaagaagagttttccagtgtaatactctgccatgtgggaattacaatattttagtttgatgggttgcttctttaagtgtgtgttgactgttaatcttaagacaacttctttctttgagtgagcaattttcaatatgtcaagacagaaactcaaaaagaagaaattataatgctggactgtaatagtttccctttttgagtatctgtctttactaatttactaagaatatgtatgtacaaccagacattatatgcataatttaagaactttcttcttggagaagttggcgattcatttgggtaatacaggctatcccatttgtcttctaaaactaacactaaacccaattatcagtttgcatgctcatgttggaggaaaaccaatctagacgggacggatgtaaatctgttgccatcaagacactggccaaatggaaggaatgcaatggtcctcatgattcatcaaaggatgatggtaaaccaacaacatgtagagttccagccaagggatcaaagaaaggttgtatgaaaggtaaaggggggcccgagaattctcgatgtaacttcagaggtgtgaggcagaggacttggggcaagtgggtctctgaaattcgggcaccaaataggggcagtaggctttggctaggtacattttcaacagccattgatgccgcacttgcctatgatgaagctgcaagggctatgtatggttctggtgctcgccttaactttcctaatttttcaaatcccggcacacaaaaggattctacgtcagttccaacaccaacggggtgttgcccagaagcaagtcctgcaaattctgagtcctctcgaacatcaatccattcagaagtctttgctgttgaggatagggcgaagcctgtttccaccaatgtaaggaataaaggtgtcattgatcatggtaaagtacacgagaaaagggaacataaatgaaaattcagtattaaaatccttttcatttgatgatgtatacttggttaattgctagaaatttcatattcttaccctggatgaaagtatacacattggctatgtttgtatcttttagtctctctgctctaattattgcaagttagagatcctgtttcgaattgacagacttattctgcattattaggaaatgtaatgattttcatattcaatttcctccttcaagtctggaaggcatcagtaacacttgatacagttatcgtctcttattctttggtgccaaatttagtaaccagactgaactagtatatacatcaagctcgaactcattaactaaattggtttgttttggaagcatgaaacttagtccaacttcgtatagttataataaataaataaaaagaaaaaaaaaattctctttggagacaaggtgaggataagatttgacagtggagggtccaattgtgtagacttgctcgtgcaacgtaaaaatcggaataaaacacatttttcttgctgtcgtttctataaaaacatggaagggtcaagttggacatggacaatggacataatgca

SEQ ID NO: 62682 - DNA, 593 bp, Cannabis sativa
ttatcacaataactaaagtataactaatgaatgtgaaaaaaaaaacattagtgctcggtttggacgggttaacccgactaaatcgaccaatttattgggcgggttgaaacgttttttattcttaattgggtttgttgcacttagatttttgtaacccgatctttacattgggttaaataaaatgtaacgtaaaccgaccaaactgaccaacgtacacccttagtaaacatacatatctcaatatttaaaaaatatagtaatgatccttttttatgtatagaaaaaatacttaaatataataatatttaaatacttagatctccactacctaaataattattacaaagtttttttttttgaatggaaatttcatcttttattgaaaagttaaactctcacatccgctaccaaacaaggtagcaactcagttggaacagactcaaactgaaagtacgatcaggatataatctagcagctttggcaaacgtatgagccactacattagctgatcgcttaacaaaagacacaacaacattatgaaaagaagcaagcaattttttacaatcttgaatgacactaccaaacaaggatat

SEQ ID NO: 62683 - DNA, 1159 bp, Cannabis sativa
acagagacctttagtccagttgtgaaaccagttacaataagggtggttctcaccttagctttaatgcaagggtggagtgtcaggcaacttgatgtgaataatgcttttctaaatggagaacttcaagaggaggtatacatgactcaaccacctggttttgaggttcctggtcaagaacacttggtgtgtaaattgaacaaagcactatatggccttaagcaagctccaagggcttggtttgacaagcttcaataatgcttactgtcctttgggtttgtttcctcaaaatcagatcattccttgttcattcatcactctagtcactctactacacttgtgcttgtgtatgtagatgacattttgataacagggagtgatcctacagctgtgactacactgatttccaacctcaacaagcagttttctcttaaggatttaggagttctatcctattttcttggcattgaggttaatcacaccaacactggcatgcatctttgtcaagcaaagtatgcaaaggatctgcttataagggctcagatgtttggttgcaaaccttctccttctccaatggtcagtagtattcgcttatcagctcaccagggggaaccctttgcggatgttcaattgtatcgctctatagttggtgctttacagtacctaactatcactcgacctgagttatccttcagtgtgaacaaggtgtgccagttcatgcaaaattcctctaactaactcattggcaagctgttaaaagaatactaaggtacattagtggcacaatgaactatggccttcatcttaccaaaccagccttgtgtgacttggttgccttctgtgatgccgattgggcctcggatccagatgacaggaaatcaacttctggttttgctattttccttggatctaacctcattgcctggaaaagcaagaagcagcagacagtatctcggtcaagcacagaagccgagtatcgtagtgttgcaaatgtcacaggagagttaacttggctgcattatttgttctcagaacttcacattgagcttcctcaagctcctacaatatggtgtgataatctgagtacaataatgctcacacagaatccagttttgcatgcccgaacaaaacacatagaacttgatttgtactttgttcgaga

SEQ ID NO: 62684 - DNA, 1797 bp, Cannabis sativa
aactattccatcattctgaagttttcctatcactagggtatttccctagaaggacttaggcctctactagtaactaatcatagacctttcattttcatcgatatgcaatccaaattttttgggacgtaagtttggatacaatttgaagatcaacttaatgatctttgaactgcataaccaaatatttctccagccctatcagttcgcaagatctttaaccacctaccttaatggttatcaccatagctagaatcaaacatttcaaatttctttaacaaggtaaatgtctatagtgatcgtcttaagaatttaacgattaactcatgtccatccctggatgtacatccatatgtttgaatacagatgatcctactatcaagtggatattaacatttaataatgcatgaccttttatcgctgcgagattgacaagtgattttgaattgacctagatctactacccatttgagaaggcgttctgacacttcgggtttcatcaaaacttgccttggtggttggccaatttacactttgactggatgggcttgaaagtacgaccttagttttctcgaggccaaaacaaagtagtacgctagtttatcaatgaaagggatacctagatttagcctcaatgacatgcttgcttacgtagtacactaggttctgtattccttcttcctcacacgccagagtggcactcgatgcatgcttgatgttagccaaatagatgaataactctttgtcatctattggtgttgatacgatcagaggtctggctaagtcatgcttgagagcttccacaaaagtaacatttacaagttttcttctccctagacttcgatcttgattgagagtgatggtgtttactctttgaaattaattttttggatgatatccctctttgtaaatacacttattccttcttagattccttttccaattgtacttcaaaatctttggacttgagtgcgacaagacatctgccaatgcaatcacatctctgccatatttgatggcagtcttggcttcttaatactcgattgggagatatctcaacaaaatgatagtttggctttcttcattagccttattatttatattagccaatcaataatcttattaagcctgccaatattataatctaaagaaagagaagaaataattctaaaaacatataacttttctagcaaatgaatcttgctagaaatcgatgactttatgtagaattcttcaagcttattccatattccttttatcgtcttttctttgccaagatttctcctcacactgttggacaagtacatgatgatcgtgtaataagccaactcctccctttctgctttctcttctggtttctttttagccggtaatttctcatctccaagaactttggagaccttctggtgcaccaggatacctttcaaactttctctccatagcacagtcccctgttccactgaacttatccaatttgaatctcgccattgatgacaataattgtttcttcaagaattgtagtggaaagaatcttaatcttgtgttcttgatcgattatcaagctatcaaaccaattaaaacttaatcaacaaatatttaataatgacaatattaacaaatcacacacaataactagagattataacagggatgaatagagtaataagaccaaaaataataaagcaataaaacaataaaatgaacaccaagatatatactagttaaagtcctatagatcgatgtgatctatagctctactccagttctagaacacctccaaaatcttctttattgattgag

SEQ ID NO: 62685 - DNA, 1030 bp, Cannabis sativa
gttctctctcttattttaatttagaagaatgaattacttactttatttacatacatacttattttttaacttttatttttatttttatagtttgggttgtttcgataattactcgttgcgatttatattgctctgctaattacgatgtgggttgctaagtgaagttctgtaaaaatacaaaaataaaaaaccaatttatatattaataattataaaaaaccgctaactaattataagacatcatgctatagatgtgctaggtactttagtgtccaatagcaatgctcgtgagtggacggaccacatcgtacaattatccatattggttactaagagcatttttaaaggtgctaaaaattttcacatcatccaaaaatgaaatattttattttatcttttttcacattatttttgacactcttctaaaaatacttcaatggtatagcacccttcaaaaaatactataattattatttcacacattattatttatatattatttgttttaattataaatgttgcaatactaaattttaaaaaatcatgtatctcttatattgaatatgactatcccttgtggccatataaggtttgccaaacaatgaatgggtgcttcgggacggaaagagagcaccaaatattgtgataaatccaacacgcaagttaaagtttggcagaacaaactttgaacggatttttcggtcacttccggtattcgtttgacaagctgtcttaaccactagactcagctcgtcgaggagaacaccctacactaaactatttcacccaactcactacttttgccagtggtatttttgtagctccgccccttttcggcgatatcgtgtaccgtttagacaaacggttggcattggtgtgatctactcatcgagatggtcgttttgatatatgctacccatatttttggcggcatattcaagacaccaatttttattgccaccgatagctaatatgcaccgcttggtgaggttttggaattctaaactttaaatatagtcatattatatgt

SEQ ID NO: 62686 - DNA, 1667 bp, Cannabis sativa
acatttactaacttagtttctaaatttagggtcattttgcatctcagcccttaattttaatcattgtatccaccaactagaaatttctaaaacattgtattaattttgaaaaccaatctaatacactactcttattttaaaagaacagttaattttttatatattcaatagactttatttttggtcattgtattcactattcaccaacgaaaacagataaacattcatgtcctagtctcttactatattctaaatagtactagcaataccttataaatttaacggttcacttaaatagcattatcaaacacaatatcttaagtacattattacttagtaccactatggtgttgccttgtcagtttcaagacatgcaattgagggctacatacttgatagtagcataattacatagtattaataagagtcataaacaaaagtcataaatttatacacatgtagtattttaggagatgtaaaacaattataaatttattttaggttggattattaaaacaaattgaagcaaaagaagaaaagactcggcagcagttatcatacattgataactctttattagacaactcaccttctttaatcttctccaaagaggcaaagagtgcttttcttttagtcttctttaaccactgtacagaagaaatataatgataatgtgtaatatttatttctcaagtaaaatactatattataagctattaaatgcctttaaaagcctatttactcataaaacatatcaaatatatctccaagtatttttattctttttgtctttgacaaatatagggcatacctaccacatttaaatctcttaatttatgtgctcataaaatgtaccaaaaatgagcattatttgctctcaaaatcctctcagtatacactataccgagaaaaatagttttcctattccaagtgctcaacagtgtaaactaagaacaaaatttcctcaatttttgacatctcatacagcaccttattactattaaaggaaaactccaaacaattctatgcattcactaaacaattgcatccatttgcttggaatagacactaagctgctcaagtttttcaaggttaaatatatgtaatcacatctatttttttttttttttgaaaatatttcaaatgttagctctttcttccctttcaatatttatgcaaatacatgtatatctagcagccaaatgagttgaccaaagaaaaaaggaatgaaaataaaaataaaacctataattgcctattttatttacaagctgcagcaacccctgcaatacagctgaaaaagaaagaaagaaagagaaaaaaagtgcttgttaattatcctttacagcctcttttaataacgtggttgttgtccaaacaaccttgacaaaggcactagagcttacaaggtcaccaaaagaagccttttattatttagcaagtaggactctccaactatccaaatcaaaggatccttgccattcactaatcacatcttttttttgacttacttaatcataaaacattgtttgatttaatcttctactgacagaaatctcataagcaacccaacaaatacaataagaaatactttaaaattcaacttttcttccctcaagtttattatacaaataaatagcagaggcaaataaaatcttgaaacttat

SEQ ID NO: 62687 - DNA, 1051 bp, Cannabis sativa
tagttagggtgttacagtatatcttaaaaaatataaaaaataaagataaaaattaaaacatgcaaaacaaaataagaatgcaatgtaatttcctcgtgaataacacgagaatcattcgtgatctatatactaagttattgttacgtgcctctcgaaagccagtcgtgccactttgatcaaatcagttggtctcgctctctcagtatatgtaatgcaaacgataaaatttttgaaaaaaatggcgtccaagattgatgaaataatcaaggactttttgtggggaggtgataaaggtaataggagcttatatctgaaggcttgggacaaattgtgccttcccaaatctagaggggggctaggacttcaaaaagtggtggagatgaataaagcttttatggctaagtgggattggctgctgatcaatgaaaatcaatcgctttgttgcagggttcttagagccaaatatatgaaagatacactttttgaattgctcctataagaattcagattcctgattttggaatataatgttgtcaaagctcaagatgttttaaagaaaagtgcatgcaagcttattaacgatgggaaagatacaaatatttgggaagacccgtgggtatcccatgaaaaagagttcgttccaagaccaactaccaatcatcctaatgatgtgcgaaatgtttctgatatgttgttaggtgatggtgattgggacattaataaactttattccctttttgactttaaaatagttcgtaatattttgaaggggaaaaccgagtggtcaggaaaagattggtggatttggaccaaagagcaattcagcaagttctcaagtaagtctgcgtacgtggtccaagccctggatcgtgcttctccgtcggtcgtggcaccttccctttggagtagattgtggaatagtaaagtgctagagtgccataagtttttgtggtggtgtatcatctggatgtgcttcctattcgcgctcttttagcaaagagaatgcacatcgatgatgcttcctgtccagtttgtgggatgggaggagaat

SEQ ID NO: 62688 - DNA, 939 bp, Cannabis sativa
aggtgaatgagcagctggctggggctgataacgacctgtctctggagctggtgatgggaggagtcctgaaggagtttacaagggtaagtctttcctgaaagtttcctctttgtccttcttcacttagttcagattttaatgttatttctttgtgcaggccggtttgaagatggcttatgcttattcccaagctaagtcagctgcctctaagaacgctgccatttccaacactatgcgggcggaagtggatctggccaggaaggatgtcgatgaagcaagggttcaacttggggaagaatggaactgggagaagtcaacaagaaacttcttgctgccgagaagaaggtggtgaagctgactaaagatctacaggcctctgatcaacttgaaactgccattgcctccttctcaaaagaactgaccagcctccaagaagaaagggaggttcttcgagctgtcttccgcaggttggaagcagagaagaagtctaaggaggagcttgaagctgaggttgagaagtacaagtcagtggccgagcagcaaagaactgaagtggcgaggctcggagggaaggtaaatgccttagagagcgcaggtctcaagattttttttgacttttggaaggctaatccccatgaaaattttgattacccaggcgataccaaagacattttctcgagtactgtgcttctcacgtggcttatggagaacctgaggcaattacttctaccttcggccagaatgttgacatgcctcctgctcaaacaaatgatcctccacctccaaccagcccagaagacctgtacaaggagcctgggactccagccgtttgaatacttcctctttctatcttttttttttatatttgttcggacatagggccttttttaagaaaaagtgaccagccaagcggtctttaaacttggaattatttttcat

SEQ ID NO: 62689 - DNA, 700 bp, Cannabis sativa
gccttgagtggatcagcaccaccctcaaacactggtgggttgtgcttcttgaatcgctcatacaacggttccaaacgattccctacatccagtggcactaccagacgtgtcggagcatcgaaattagggtttagagaaggctgagctcgctgctcccttaattctctaatttgttcacccgactgcctgatagtctcttgcatcgcaagatataaatcttccgagtttggtggtggtggagggttctcgccctcaccagcaaccccgagcccagctagctcgtggttacatctaccagtccgcctcgagtgcataatctatacacctgcggtcacattccaggtaataacaatactgataagtatttcatatatcataatccttcccgcacacttccatatattatcataattcatatactcatgcaacaagataattaacaaattatctattaataaaaagcttactgaaccatgagtcggacgagtcttcgcagccgatatacatatcaaactagtcttcaggatctaaaaaccttggcgctctgataccatgttgtaacgcccggtccaacaaggaagccatgtgtgtgtgtgtgtgttattataaaattcttatttaaatactatataattataccaaaagtgtgggtaattaaatttttgataattaaagccaagcatataaaaacttctttata

SEQ ID NO: 62690 - DNA, 1062 bp, Cannabis sativa
gtaagtttttacacctcacatttaacattcttgaactactagaaaaagaattttttgattttgttacatagaactaattttatttatttatttatttttttttttttatagatttctagttttcaagaaaatcgaaaaacttaccaaaaagttttgatttttgataattttttgattttttttgtttgatcatgtttggtttatcatatatgagctattagaaaagattttgcatcaaaattttgcataaaattaatttttggcaagtaagttgtttaaaataaccttctatggccaaaacgagtcaaacttgccaaaatttctcatttttttgtttttccagcttgtacactttatattaatcatgtttaagctgctgaaaaagaaattttcaaaaaggatgcataaaactcatttttgatacatatgttgtttttacttaaatttttgaaaaacttactaagaaatttcaattcttgtcatctaatcgatttaagtgcatgaacattttttttttatatatcatacttgaggtatgagaaaaggtttgaaatcataactattccattcttttacttgtctctcttactttcaatgattttgatatgatttttagtagattaaatgttaaacttgttttgactatatgaactttcatctctttatgcattttgaaatttctgtttaccttgtgctttattggtataaatcatgtcttgtatgattaagggcgagacatatattttgtttgaccttgcctcttatgctaattttttttatgaaatcaaaaggaggagaaatattggaattgattattttggcattaatcatattatactttcaaatattaacaagtttatttagtatatatatgattaatgaggagtttttttatgtcaagaaaaagtaatgataaatataaaaagataaaacagtataaatcaacatatggatatattaaggggaagctaaactcaacatgtttcaaattactttttctttcctttaaaataatcaaatattttaatatcatcaaaaggagagaatgttgaccaaaagtca

SEQ ID NO: 62691 - DNA, 1245 bp, Cannabis sativa
aagtcatgagctctaattgtctaatgtatgcattgcacaaaaacaaaacatggtatcttgtgcttctttctcttcattacaatgtggttttgggtttacaaagggaagtataatgttgatggttcctttcaacatttcaaagctcgactagtggccaaaaatttatacaggaggcttggtgtagattttggtgagacatttagtctagtcatcaaggcatctacagtttaggttgtcttaactatagccattgccaataatatggatataagacaacttgacattaataatgtgtttttcaatgatactcttgattaggatgtatacatgacacaaacataagaatttgaaaatcctatcaagccatgttatgtttggaaattacaaaaatcaatctatggccaagctcttagagtctagtattaacaaagctcactctactagagtgaaagtttaagaactcaagggcgtatcccttattatttatgttgaaacaccctgattatgttgttacggtcttgatatatgtagatggtgtcatcattactggtagtaacacaaaggaactatagtgctttatagttcgattaaacaagaccttctctctcaaagaccttggaggcttgaattataatctaggaattgaagcttatagagatgatattgtcatgggcttgtctcaagagaaatacatcagtgagctaattcaacgaataaacatgtacaatctgaagtcgagttctacccttatgacaactagtaaaccttgtccatttatgatggtgaaccaatgacagacccttctcattacagaagtgtcattggtgcactgcagtatctcaatcatacaaggtaagacatctcttttgcaataaataagcttagtcaattccttaaaagaactataagtgtgcactagaatgcaatcaaacatgtgttgagatatcttaaaagaacactgaaccatggcatacacataaccccttatgatcggctgactttctctagtttctcaaatgtcgattgggcatgatgtccaaacgataaaataccaatagtaggttattatatgttcttaggggtctctctcttctcatggtcatctaggaaacaaacagtagtagctcggtctagtataaagccctggataagttggctgctgaaatgacttggctccaagaattacttaaggaaatgaagttcaagcttcctactgctctagttatttggtgtgataatatgagt

SEQ ID NO: 62692 - DNA, 837 bp, Cannabis sativa
  modified_base (612)..(619): a, c, t, g, unknown or other
tatatatatatttggttgtcttttgtttctcgactacataatagcatcttcagtagtagtgcttggagaaagtgtttgatgatgtggctcaatgcttgcaaaagagaaagagagttgctaagagcatcttcaatgatagtattctttaaagattttatatatctccacatcatctaatgatataatattttatttttatttttgttccacattattttttggtacccttacttttaaaaacattccaatagtaacatttttaagaatgttataattattacctcacacattattataattatatatgtaaatcttttttttattaaactattatatatatattccaccatttttattttaaaaaaaaatatagcatcaatggcattgtgtggtatcaatataaaatttaagaataacattcttttatctctaatggtatatcatctttatattttgccaacgaagcttttcacatcattaaacattctctaaaatgctacaattggagatgctctaaaatgcactactagtgcctagcatcctcctcggtgtcataccgttattggtataattaagtataacaggtcccatataacttaagaaaataatttnnnnnnnntatcgctaaccaatcgtagaacgccacctatagaaggtgatgggcaccactagtgcccaataacaatgcttaaagagaaagaggaatgctataaagtatcagtggtgcttagcacctcctcctaagtgtcaatatcgctattagtacaattaagtatcagatctcatataatttaatataagaacttttagggagtatcggtaattaattaggaaatg

SEQ ID NO: 62693 - DNA, 2090 bp, Cannabis sativa
ccccgggacaaaccagcttgggaatgctgtgtgagaaccgggtggcggccttcattttcaatccatctttcgtagcgtttgctacgatcgagatgagctcttcctccgtggtagggtaagccgtggtgcttgctcggcatacactgcggtcagggaaggctccgtaggagttggtgatggtgcagtttgagttgcctgtggaacacttgatggggtcttcgggaggagtacaacaaaccaccatgagtagtaacattagacagtttaatcggagtacttgttgtcctgacatggatctttggagctgatcgataaccaattcgcattaatctttgattggtcctatccttagtgtagaaataattaacgaaagaagttatttatagatatggaaaaaaaaaaggtctctctgcaaaagaataataataattgtcaatatatgtctcagtgtgatctgcacaactttttttctatttcttctgaaaggagagatatgaggatttcatattttacttgtttgatatatatcgtgtatagtataagcaatataatatataaaatatatataattgtcaataaattaaaataatggagcgctataatgtagcactcgtttttgccatttaaattggtaaataacaggtgaaaataatgataacctgttacacacatcacaaagcgtacaatagtcattataaaaggaaaaacaaaacatataataattcatcatatttcatatatgttaaataaataattagagggatgtgagacagtgagagaactgaggactagaagagaagagtgtgaaggtacattaacgttatttttatctttatatcattatattaaagttttcctaaaaaatcaactattttagtgaaatttttttttagttataatataatttttcttttaactaaatatgatctttagtcacaacaaaaaattccttatgactaaaatatagtatttaactacaagttgtcactaatttagttttaatcacaacaagtatttaaaaatacatttagtcaaaacaaattataatttttatgactaatacttttagagttttaatcacaacataagaatgattaattataattaatcacaatatttttacttttagtcataaattttgttgtggataaaagtaagattttattgtagtgtttggctatttattattgttacctaaatggtttaatttttgttatttttttttaaattaacagttagttaaataaataaattaataaattaatcagtttttgaataaatttattaattatttccctttaaatatccaattcaattatttattttatttattattaaaatataaatctaattctctctcagtagtaatggaattctcgtaaaagcgcttaaatctgattctctctcagtaataatggctattaataacataaaagtgttcgcaaatgagatgagtgtgttgttcgaggatatcatagctttattgtctaaatttccgaaaacaattttgtcctatatatgtgtctcgaaaagataacactgcggcccatagtttggctaaacatatatacccttaggttagacaatgagttatactggttcgaagaggtcctaacaccgatggttgacgtcttctcgaaaataataatgtgatcaatatcaatttttttttttaaaaaaatataatttatataattataatttaaaagtgtaaataaaataaggtagatgtatatatttattaggtattagtaacatgcaatgtgtgtttgcttagagctgtattagagttgctattatctaattattaatttaaataatactataataataaaattaaatctaatacaattcaattatattgtttaatatatataaatttaatctaattttaaatttattattaaaaaatgtatctaactaattttactataaacaataaaataagtaaataagtttaaatattttagataatagaactaataaatttgttataaagtatgaataattaataaacgtataatttaaattaaaattaacatttataaataaaaataattatctaattttgttgatacttataaattaaa

SEQ ID NO: 62694 - DNA, 974 bp, Cannabis sativa
ccaatccaatccaatccacacattgtaattaagtgttggaattaatgagaaccagaaaggatactaaacatcaccatatctctataccttcctttgagcaacatatacttcctaagaatcccttctcttaaaaacccaactttctcaagaaccctttgagagcctatattttccacatctaccaaagcctcaagtctcaccaaatgtggccattctttgaatattatctcagaaaccattttcacagcctcagttgcaattcctttaccccaatatttggtcccaagaacataaccaagctctcctctgcatttatcattgcccgaattcgcggtcaccgaaatggcacctattggggtgtcgtttatgcagattgccctgaaccaagggtgagggattaccttatccttgatgaaatttatgccatcctctttgcaggtgtaaggttcccaagtacaaaaacgagccacttctttatctgtggcccataccatgaaagcatctatgtcagaaacattcaatggcctgaggttgatggagattttcgacaatccattgtcaccttctgtgaaacaagttccatgatcttgtttgctaggactttcctccatgtttattggatttatataataaactgcaataagtagtggcaatgaaagtttaagctttgttgagaggaaaattttaacaatggagatgatagatcaaggaagggttcctttgaatttatatgcttaggcatccaaataatggtccgaagaaattgattggaaataaaggttgaaaattagattgagacaaaattgtcttttggacatgtcacttttaagtgaacttggagtaatgggcaagtaagtatattatgtatgtaatataaattatataatatatagataagatatgtgttgtcaatattgtacaattgttgtaagcccccttggttgaccaaataattgaaatgaaaatgttaaaag

SEQ ID NO: 62695 - DNA, 2246 bp, Cannabis sativa
aatatacatacacacaatatatatagacacatattcaataataaaatataaaatatatacataaatatattatatatcaagttaataaatatttaccttataaatgtaattcggcgataaattacgacaaaaatccggtcacctatagcacacacaatataatattaataaaatgaaaaaattccaaaaaaaattgacaaaaaagaaataatacgaatgtacattaataaaatgaatagaaatcatatttatatcttaatgaacgttgagatttaacgttttctctgggaaaattggtggtcggagttataccaccacctttttttaaaataggtttgggtacagtgcaaatggggttaaaaaaaaacttttttagtgtatgagattagatattaaaaatagaaaattttaagacaaaaatgggatgaaatggttaagaaatgagagagatgtgggagtttttagtggtggttggcaaggattttcatgggttttcaggtatgctatgggtggctggttatcgtggagaagaagaagaagtgaggaagatgaagacgatggtttattttaatagatcctatgccgtcggttcctagctaataaccgacggcataggtgcaaacatgtcaataaagtctgcacctatatcgtcgtttattaactagtaaccgacgatatagggtttattaagaaactcccaatattttcaaccccacccgatggtatagggtttattaatatctatacctacggattttaccaaaaaactgcctctaaatgacaatttcaaatcaggcacaccatttagcttccctttttataaaatgggttgaaaaaaaggaagctaaagccccaaattttgaatcataattttaagaacctaatattttgaataggggtcccttatatacaccatcatatatatatatatatatgaaaagtaaaatattatcacttatcttgaaaatgctagaacaaccatagtactaaaaaatttcatcttcttcttcttcttgaagcttcctacaggctcggctttggtacaaccctaagtgcaattcttgcctcttcttttaccttaatctttccttttttcttcttcaccatgcactaatctccgtcctgtactatttctcctctctttattcattttatcatcaaaaccaaatcgcatttattaccacgacgtctcccgtaatcattatgagtatctccctaatctctcaagcgcaacaactttttaatgcacactctctccctcatttgcatttaattttggcggcacaatcccttttgcaattaatacatttgtagtctctatatttcttcctctttccccgtcgaatccaaagaaaaacccacaccgtcattcctctctttaggttaagcatcatggtaatcattgcttcacttcagttcactcagaaaacccttgcaggaatcgaagagatgttgcagagatcgattcaatcctcgagacgacctttgcattccaagtatctcttaaactctcttctttatctgtttgtttaattaaatctctgtcctcaactcctaccaccacatccacaatcatcgtcccttcctgaccttcatcatattcctttcatggcgtcgtcttcaaacacactcaataccctcgcctctctcactgatgaagaaaacccggttcatgaattcgatcatatttccttaaaccaccctatgattccaactctttctgtttaatctttaaactgctcactcccaaatcaatcaagcctgcttggattgagaaggccatgtctgatgcatggactctctgtttcccttttcaaatttcggagtatccctctggcttatttctggccacttttcagtgtgagagatcgccgcaaagtcttagaagaacagccatggcatttcgacaagtttctcatagttttcacccatcccgatgtttctcctaccctaactcctaataaaatcctgtatgttccattctgtgttcaagcccacaatattccttttgggcatagaagccctcaactggctcagtttatcgctgatgaacttggtgagctgattgaaatctaacctctgtcctttctcgaaagctttggcccctatcttcgtattagggtgttgcttgatatctcgaagtccttgcgaaggggcatgaatatccgcttccgagctatttgttgggttttataccctaaataaaactccaattcaatgtaatccattttattcaacatcaataa

SEQ ID NO: 62696 - DNA, 2462 bp, Cannabis sativa
tgatcttcaagaggaaatctatatagttcaaccacctaggttcgttaactctcaatgtcctgacagagttttcaaactcaacaaggccatttatggtcttaaacagccttctagagcctggtttgcaaaactctctactattcttcttgaatatggatttcaattctccaaattagatccatcattattcattaaagccaactctaccagctgtatctatgtgcttgtctatgttgatgacatactcatcatggggagtgatgactgtttagttgattctcttgtcactgaactcaacactagatttgctcttaaagatcttggattagtgtactactttctagggatccaggttactagaactgcagcaggaatccatctcacacaaacaaaatatctccaagatctcttaaccaaagctggtatgaaaaatgtcaacactcaatccacaccaatgaacagtggtttaaagttgtctaattatggtagtgaacctgctctagatacaactctttacaggtccattgtaggggcactccaatatgccaccatcacaagacctgaacttttctattgtgttaataaagtgtgccaatacatgcaaactcctctactttctcattggactgcagttaagagaatattaaggtacattgcaggtactctagactatggtctccacattaaactagctcacgactttgccttggatgtgttctgtgatgctgagtgagcatcagacttagatgatcgaaaatcaactacatgctactgtgtgtactttggaggtaatctcattgcttggaaatcccaaaaataggttaccatatctcgatcatcaatagaggttgagtttcgaagccttgccagtgctgttaactgaagttgtatggattcaatcactattgcaagaacttcaaattcgaaatcctgcatctccatctgtgtggtgtgacagccaaagcacagttttgttggctaccaaccttgttttgcatgctcgaacaaagaatattgaaattgatctatactttgttcgagacaaagttctccaacagaaaattcaggttaaacatgtccctgcatctgcccaacttgctgatttcttcaccaagcttatcagcagcaccaagttcaatgatttcaggtccaaactcagtgttatttctcttgccacattgagtttgaaggggttgtgaagggagtttagttagttaattctgttagtactgttgagctgtgtttgtctagacagttaggttattagttaggaattagttactggttagttgttattcgctgtgtatatataacctcttgtaaatttactctttctctcttcaaaactttcttctctctttcttttgaaactcacaaacgctgtatcttgtctcttcttagttcttcttcttcttcttcttcttcttcttcttctttttttctgcaatttggaggaatggattaggtgggttggggggaatttttatgtcttctttattttggggaaattatatacttggattttcgtatcagctattttaaaatctagatttacttggtgatggcattggaggatcagctttgcttttggtgagtgtaattaaaaaaaaaaaaacatgcttaattatcattcagcatagagaacaagatacctgtaaaaatttaaggagagtaattcctcttacagtttgtaattgaacatgttatgtacactgttacaaacagtgcatcaaatcataatagactcacatcaaatatgatacctctggtaatacaactcatcaccatagtgcatgtacaaataacgtttctttatttgataaaataaaagcataagcttaattacactaaccttacttatataattctcacataaattaccatttatctataatctgacccactcaaatttattgaatcaaagggttaaagccaattattcttatagaatagcaattatttaacaaggatccctatgagtgagttgagaatttacctaatgttttcccccaacaaaatatcagacaactaatattactggattagggtaggtcagcataatctgctggtccatatggctgaaaatattcagccaaaactcctttctttcttttagtttcacatctcatatccttcaacaattggtcattgtaccatatatttacagtaccaatacaagatctcctaacatactttccattgtataatttcatattattttcccacattgtcacttctttctccatctctcctatgctaggtagttcaaacttctctccaaggtaatgtgctagccattgacatctaatctgagaggttagtaaattggagaagccttctgcatatcctattattgctagctgtggtattcttggatgaattacctgcctggaaatgttagacaaagatgttaagaatttatggaagcctacttttgcaaaaggctaattaaaaattttgtc

SEQ ID NO: 62697 - DNA, 1383 bp, Cannabis sativa
tatttatagttaaatttgtttattatccattaatgggtaatacccattaagaagtcttccatacatatatgtgtgtgtgcatattacataatgtatataataatatatgatttataattttctattgagtgaaaaacataatttacaaataaaatttaaagaaaaataatataaaaatatgatgcttacctcctatacccaaagctatatgaatgaatatattatcaaatattgcataacaatagaacctctctaattttataaaagcatatacataggtatatataataggtatgagattagttattaaataaatatgttataataataataataatgggagttataaaaaataaaaggtcaccattgataataaataattattaattaaaaagaatgaaaagtcaccattgataataataataaaggactaaatatatagttaaatctttaaaaatatgagtaaatctagaaaattgagagattaaaaaagaaggacatataagatgccacataaactccactaaaactctcctttatatatgtactagaaaactgggctgcgcgttgcgcggtctgaaaaaaaaaactatatattataattaataaaataatttattaattaatattaataaaatcgagctttgcacgaataaaaaaaattctttaataaataaaaagatgtaaaaatttttaaaataaaattataaattttttaaaaatatatatataaatatttatactatgtagaaacgttataattttttaaaaaatttaaattgaagtagtaacaaaaaattttggtttacttattatttttaaaaaagaacactttttttttaaaaaaaaaaattatagataatttttgcgatcaataatagaatattatctctttgcttaataaataaaaaatatctatattaaattattcatcatactttgttaatttaatattataattttataaaattaaaattataaaatattctttaatattctcactgatatgtatgtataattcgattcatttatgaatagtgatactttttttaatgattttttattttatattaataataataacatgtaatagaattgaaaaaataattttacaatattgttgggatactttacctactgtaatagcttccctggttttggaagacttgaattaataaagtttcttcatgattattcaaaaaaaaatagttttacaatattattagattactactaataattcataatgagagaataaataaaatagaatttttaaacacagttagatgtctatataataagacttgagatattataatattttacaaaattgctataaataattttataaaactgctacaaattatttattttcattataag

SEQ ID NO: 62698 - DNA, 1094 bp, Cannabis sativa
ataatttccaacagatcggacaggcctgagcaatcaaacggcagatccgagttggccatgagcggatctgagcaggtgcgggctcctactccacctttgccggtgcttccagaggccaagaaaggcagagagatgcttgcccattacatgaaccggttggttcctaagttaagtgagcagctggccggtgctcataacgagtttccctggagttgctgatgggaggagtcttgaaggaatttaccagggtaagcctttgttgatagtttcctttaattcttctttatttggttcagaccttaaagttttttctctgtgtaggttggtcttaagttggcttacacatactcccgagctaagtcttttgcttcctggaacgcggctttctccaataccatgagggcggaggtggacttggccaagaaggatgctgatgacgctagggtggagcttggagctatccgactagagctgggtgaagtccacaataagctttttgccgctcagaagataaaaacggatttgactaaggatctcgaggcttctgaccgacttgaagagaccatcgacaccttatctccagaagtgaatagccttcaagatgaaaggacgacccttcgagctgtcttccgtcggctggaagaggagatgaagtctaaggaggaggagcttacagctgaggtggcgaggctggaagagaatgttcatgaattagagacagccggtctcgagctcttttatgatttttggaaggctaaccctcaggcaaattccgattactttggtgaagccaaagacatgtatctcgagtagtgcgcttcccaagtggcttatggtgaacctgagccgaccgcttctacctctgaccagaatgttgatgttccttccgctcagacaatagatccttcagctcctaccggccaagaagacccgaattgagagcctgagactccagctgtttgactatttctctttttatccttcttttttatatatgttattcagccataaggccttgttttaagacatcatgaccggtcaagcggtctttaaacttggaactatttttcattttacagacaacagactgaccg

SEQ ID NO: 62699 - DNA, 2292 bp, Cannabis sativa
  modified_base (57)..(59): a, c, t, g, unknown or other
  modified_base (302)..(304): a, c, t, g, unknown or other
  modified_base (464)..(464): a, c, t, g, unknown or other
  modified_base (572)..(576): a, c, t, g, unknown or other
aagtggttacagaacgcatttttatttttcaaaaataaaatttttaaaaacaaaaannntactttcattttgtgattaaaaaaatataaaataagtgttaccaaacagcatctataaaaattattttaattcatttgttttcattcatgcttagctggatttcataaggtccaaggttcatcaactcactccttctcggaagatataattttgttttatttttaatggaaaaagttaaaattaattgaaatacgggctcaaaataattttttattgggtaatttgcagcataaatacttaannntaactctcagttgcaaataaatatttaaatttaatttttgacgataataatacataagttataattctataaattctgtaagtacctgactattaagcgttaagtaaattgccacgtggcaatccttaattagtttatgttattaaatttttattttttnttttaaaaaaataatttaaatataccgataaaaaaatgacacatggataataatttaatatttaatggttaggtacctccagtgttccagaaatataacttaggtatnnnnnccgccaaaaattaaacttaagtatttatttgtaatcgaaagttaaacttaaatatttatatcgcaaattactgttcgttattatgttatgttgtaagcaaaatactacttgaaatactacaaattgattaaattattctttttacattagggtgctaatgaaataaatataattttttttaaaaaaaaaaaagtgaaaagactttccactcttgttttttttttttttaaaaaaaaaagaatcaattaatagcttagaagcttaaagatcttgagtttgaactcattacctctcactttttcccatcctcccctcaccactaagctagccttagtagcttagaaaaggccttctaattaattcaagaagagaagagttacttaggagggagaggtagagtcacacggagagagtgtcgaaaaaggccttctaattacttcaaagtattttaatcattctagtgttaacaaacattatatttaaaactccttttcacattctctaatttgaatgcttgacatgaaattaactaaaataatttatattttaatatagttgaaactgattattgaaatatacatgtcaagttaagcaaaaaaaaaaaaaaaaaaatacatgtcaaacaatactgtagaaaagggcacaaaacagaatatgttaaattattattattattctgatttcaaatgagctcttaaaacaatgtattctttactttctggtgcagtatgtaatgtattttatggtgctgcttaataagcacaccaagttgtttctttagtagacaagtaatctatccatatactctattacaagtactctatagttgaaaactgtcgagctttagtgtccttaactggtaagcatgactatgagaagggtggagcctagtctctctctctctctctgtagtttatatatatatatatatatattatattatattatatatatttatacatatataatctcagcaaaattatgacactataaagaagaggagggctaccctgtacctgttaactgaagtgagtgagtgttcatactactgatgattctaattgattcaaggtagctacatggacatgatcgctcaattcgcgacccttggtttcaaatgggaagagcagtacactgatccctgaaagaaaaactacaatctcaaaaagaataaccgcctcagtttgatggcatccgtgtattaatcctattgcaacaaggggacatgtcattccaccaattcttcctactgagctcgcaagtccgacacctgatgttctgactgaggttgggtatatctacagttcaaattattataataacagcgaagagagttagtatttgtatgaacttaacaaaatcgaagtaatcgtagtgaacaaggggcaaagcaaagcaactttgaaacattttatatatttttgtgtcaacagagcacactatgggagtaaagctaagcagctttgaaagggtcaaaaattaaaactgagaagccaaatactatagtcatttctcaatcgcaaaagctatcaagtattgtatgaacttaacaaaatcgaagttaaggacagactaaacatagagaaaagaatagcaagttcaaaacaatgtccctttcctgctgagtttgagtgtttaataaagctttaatgtaagggattcccatgttagatcaaagttgtatgatggtaagtatgacaaaggcaaaagaattga

SEQ ID NO: 62700 - DNA, 1041 bp, Cannabis sativa
tccaatcaacccaagttttaataaaaccaataaaatataatgtaagcccaaataaaagtctaacattaccaatgtcccaatgactgtagatggtactggaaacgtatagtctctgtgaatgatatattcaaagccaaagtgtcctttggagttttcctctctcagaactataccattaaaactggtgtagaattgatggctcctcaagaagtggaaatatcatggaggaagtttgattgggaatgggataggctcattactcccaagcactggttcattatgtggattttcatgggggaaagattgaacacaaaggaccaagttgctaaatacaatcccaacatgtctactttgtggagatggatatgaaaacatagtacatagaacacatttacatacaataagaggtgtttggaggtgattaaggattgactcaaggggagggctaagtctaatattcttggccgattactccattgaatttctcatgcaaagcacacatcgaaaactcataagcgcatattgttagctattcttactagcttgtaatgtggttttttctaggtgtacaggggatggatactgttagaattgtcaagtatatggagtgaagctagagttgattgagcaatataatgatcttatatttcattaaaaagaaactcacttatccaacactccaaacataaattgttttttctaattttttttttttcagaaaaatagaatttttttccattaaataactttttggagaataagtatttgtagtcattatataaaaatccataaatatgtaagatcctctaagaacaataatacttttgatttcaatcatgctattatttctacagaaattataaaaataagagaaatcatccaaaataatttgttaataaattacatcatcttatacgataactaattagtttttaaaataacaaacagacataaaaataatcggtatataaaaataataacttgttatattacatggcaactcattaaaattacatgaaatatgggatttcataacaaagt

SEQ ID NO: 62701 - DNA, 907 bp, Cannabis sativa
ttcatctgcatatctagttcaaatccctttgaagatttggctttgaaattagtagaagacttagagttactatcattcccgttcccatcctctgtggtagaactactatcatccatcttctcattctctgcgatacaagagactgataaaaaggaccatgatctgcctgtcctctctaagtcagagaaagtttctggtttagcattgactaaaatcatgatgtcaccaggaaaagttttgtaaggctctttgctcttatcattgaatctgttcctccagtaatcaacttgaacttgataaactttttctccatgaggcttagtttcatcaaaagcaactgccttggcataaggtaatctatgcagcatgtccatacttgagtataactgcgctcgagtttcttccaacaaagggtagacaaaagatcccaaataatgctcaaccgattgaaatgattcaggaatcttttccacctagaaaggaacaaaggtctagttaagtaaggaagcttgcaaagtctacacaaaatgaatggtaaaaagctaaactagtttttgtgttttaagagttttttagtcaacattcagttaacaccaacaaatcatagtaagtgagattggaagcataaaaaaaaagcacaatcaaaggatttgttcacatcaaatgtaaaacatgaagatcccatatcacattcacatgatcaaaaatatattttcccctatttcattcaagctctatattacacaattaaaagttaccaaaaggtcaaacaacaaagcttcaagtatccaaaaagttgaaaactaattcacaagcagggaaaaaagaccaacatgcatattaaaaaagaaaacaaaaacaaaacccaaaaaaccctaacaaaaatatgaagatggataaacagagt

SEQ ID NO: 62702 - DNA, 2164 bp, Cannabis sativa
ataactaatcagattgtaaagggttttatttaggacacaaaacccaacatcgacttggcataccaaggacataattgaggcatcaaaattagattcaaagcaagttgagatttgagcacttaggcctcggggccccgagcacctagcgcttaggttagcaatttgtaattctgggcaccttccaagcatctgatttaagatctgtttttgtttcattgaatccatagtaatggggaaataggtcctttcagaggaataacaacaattcctgggcagaaaaaatagggcctaatgcccaggttgataattttccaacctgggccacaaaacatggagttttcccaaaattctttcaatcatcatctcaatttttagaaaatattgagaagcggctatttttcagggaaaaaatagaacttttgaaggggcagaagagggacccagcgcccaggttgacacttgggactaggccctacacctaacttaacattctgtcaacctgggttgtttctaattctgttcagtaaatagtgctctaggcatcttcaccatcatcaaaaataatgaagattcaagtgaactcagcgagaaaagcacaaattctaaatctgatacgtccaatgaatctggcattgtcaaaaaaggggggagaccccatcctcatgtttagaagccttgaaagccttggaactatcaaaaacagaagcccgggagctcaatttaaacgacccattgcccatgccaacatttggccttgttcgttgggttctgcttatccaaatcttataacaagtgcaatgatacatgaagtcacatcatccaaaatcataacttcaattttggctcattcagaagccaaaagtttggagtcttacgtatccgtaaaacagtagtatcttcgaaaataagtgatcagcttcaccaaacatataaaaggactaacgggtgacaaaccatcacataggcatctcaaaggactcccctcaaacgtttttacacatttacagcgtccaggttgatgttcgatgtcaacctaggcactggaacgtcaacctggcgctagaatgtcaacctgggcgctggaacgtgaactgccttctgtaaaacggccataacaaactactcaatttttatcatctgatgattgttgatgcaattcaacttgaattttgaagatatttaagccctctatcaagtcatgtgtcataccctaggcgtaatttggaagctatcattgccaaaattcaccccaagtgagttacaaaaacaagctccaagtatcttacagttggcacccgccagacactaaaaagaagatatcatctccaaaagctaatttttaccgttagatcatcgccaaaggtggaaaacactttatttaaatatttatctactacttttgtgggcctcatttactgataaaggagagctctcttagctcattattcacatttacaatactactacaaggtcagagtttctctctctagaattcaaagcttccgattcttaaaccgctgctgttatcaacatctcgtgagaaataaaaactcaaagtagatgtagccccattactattgggatatagggtgtgagctactataaattgttgtctctctcataaatactttacaacttttccaatctagcgatcgggtgtggcttagaagtctagtccagatttctgaataaacatctatggacacttcagtaaaactcagtaaatattattctataattactaacatttcgattccatatttatagtggagtactcatggaactaataaacaagattatttgattaatgagattcaatcaataatttaatttattggagctaagaattataggcccatggtcccctaatcaccattgtgaaacactgtcaagggtaggaatagaagttgtatatttaattatttgaataaataatttatttttcaaatttattaattaaataaataggtggaaagacaaaagttgtgtggacaaagacaccaccaatgtcttgttgaggcatagagggtgccactatcactgtgtccgaacacagtgataggcgcctatgatatagggttgtccccactagatttgttgttggattaattagttaattaattaatttaaaagataaatattatttaaatttgaatttgaaaag

SEQ ID NO: 62703 - DNA, 2290 bp, Cannabis sativa
  modified_base (1745)..(1764): a, c, t, g, unknown or other
tccaatccgtgcaagtgcggatattcgcattttgcggattggattggattggatcggatacttagtgaacacccctatatataggtgagtctcctccctaactctataaatacatattgtctcatcacaattgtatatttttgacaataaaataaataaaactgtttataatttagagatctagagagaaaaactttgaatcaatcagatatacttaattaattagagaaaattacattgtatacccactttactttatttgtttgaatttttacctttattttcatattctttaaaatatacccacttttatagacgatgtttacattataccccttaagttaatgtaaattatgtgctagatttaagtggagggtgagagtatattatgaaatccactcataaaagtgagtacattttaatgaaatttaatatgagaatatttttgatgaatgaatacaaaaaaaaaaaaaaaaaggttttcctcaacatatccctaattattatctactattattttgtgatttaaattatatatataccaatcttgtatttgggtttatttatgggaaatttacatggtatactaacttttgctaattttttacaaaaatactgttaggcggtattttttacttttatactgtattttttataagtttcatactgcagtatactgtgttaaattttcactagtgttctactgatgttttttagttgttctactgttgttttgagttgttatgttttgtgttctacttatattttataaaaatatagtatttttgaaaacttttccttgtgacagtatttttataaaaactttcagagtattttttgtaagttttctttatttatttatctaacattagaaaccgtttgcccacaatatgaatatgcttataaatatttcctttttttgaagtgtatataagtggttgttcttttataaaagtcaaagcactaatttgattaatttaaggctgtagtggtaatgggtaggtacatatcttttatggctagcgaaggagctatccatatatcaagttgtctaggaataaaagccatcgtagagttaatgaagcatccaacagtcatgttacttatatcttccatggataaggtgtttatttggtccaaaagatcgattcaaattaactcaatgcatataatgtttttctctaatagaattcatgaaagttctattgactttttttttaattgtcccttattaatcaatgcatacaggtagccggttgaactttatcaatataaatatttaagtggtgatgataatgatgatgatagaggttatgaagaagcaccatctcattttgatggggctttaagtaaaaggtaaatgattcaatttttcaagttagtcaaatgtaaaatattgtatcatatggtgttataccatataatacttcttagcaatattcaaacaattatgtcatggcattaatactcacgatcaagccattatcaaattaaaagtatttaaagcatgaactacaaaaaaaagtacattttacctccgtataaaatatgataaaaggtattttagaacttttgatcacccttttgtgtttgatgaaagcacatttagttattaaaaaaaccgagtaattatataaattattattttttgtaaaaaaattatatttttatgtttaataatttttttttatatatttttatgatttctcgtaaaaacaacacgaaaacaataagaaaactacatnnnnnnnnnnnnnnnnnnnnatctaaataatatcaaaacaacaacaaaaaatcaacaacaaattaacatgaatttaacataaaaagactgtattttttgtaaataaaattaaaaaattcgtaaaaatacttaaaatttcttgaaatcgtatttttgtaatttgtttgtcgtttttgtgtatttgtgaaattatccctaaaaaattacacttttttatagaaaaaaaaaaaaaaaaaataacacttttacttgattattcggtcatttgccaaacacaactttgtatttttttttagattaatttgcagccatgcaaattttttatatttttatgtttgttacgatttaacgcccttactcaaaaaattatagctatactccctaaactcaacaatcgttttgttctgtacttctatccatattttggtccgttaagtgccaaaatagactgtcacggtgtacacaactgtacacatggtaaatttctattgatccacataatgttaataatttatatattaaaaaaatagtttaaaatatttaaaa

SEQ ID NO: 62704 - DNA, 1470 bp, Cannabis sativa
  modified_base (50)..(55): a, c, t, g, unknown or other
  modified_base (87)..(91): a, c, t, g, unknown or other
  modified_base (234)..(251): a, c, t, g, unknown or other
ctcaattaaaaaattgaaaagtaacaacagttttatagaacatgtttttnnnnnntattttcactttttcaattttaaaaacaaaannnnnattaaaaaagtgttaccaaacggcacctatactagtcaaaacaaagaccatagataattaaataaagtagctttcttactaatttagttaaagaaatttgttgagataataaatttacgagtattgttattgggtaccggtgnnnnnnnnnnnnnnnnnnaggtgacaccttacgattggttagcgatatttttttaaagttatatgaaagtcgttacttaattacactaatagtgatatgataaaaaaaaattatattaaacacaagtacatataggttagaaggacatgggaataaatcccaatgtagatttatttctctaataaattaggttgggtgtaatcacaacaattaaagtgtggacccatgatttaagcctacggatatatatactcataagcaataaatattgagtgtgttgtgagtcatgaacttctcatcccttaatctataaaaaaaaaaaaatcataatgttttaattaagagttttgctcccgaactataatatatgtattattgtatcctttaaattttttagtccgttataaatagtatttaaactattcacaatattgtaaatttgtcattctgtcaatttttatcacacgtggcaaacaaaatgataatatgattacttagtcaattgtcacatagtgccatgtatatactttaacaataaaaagtaaaaattaggcattatgaaaaaaattattaaattaaaaattaattaatgattaaaaaaactacgtaaactaaattaaaaaaaaaatatataattttttaaatttattatgtgtgtagcgttgacatgacactgacgtacaaactggctaagctgtcatgtcatcattttgtttgctacgtgtgacaaaacctgagagaagagttaatttacaatactgtgaatagttcatggactatttttaacgggctgaaaagttcaagacacaataatatataagtcatagttaaagggcaaaaaatcttaaatagtcatgtttgttaaattaaaatatataaaagcttttgatgcgtctctctaggtttctcgagggtttgagtttgttgccttgccatcaccggtggtgttctccttcttctctggccatggctcaccaaatctactttgggtttggttgtggtcatggttgggggttgttgtaagctagcttatttttattgaatttgatcgatgaacaatttttatatgtaatggacgactatgtccattctaaaattttacttttcttattaaaaaaataataaattaaaatatttgagattcaaaacaaaaataattcaatttcaaaatttatttaaataattatttaatcataatttattttgtatcatcttttattaatattcattttatttt

SEQ ID NO: 62705 - DNA, 1162 bp, Cannabis sativa
atttacaatttatcttattaaaatagttttgctgatataatctataaaaaaaatttagtctaatttttttttagagttgtatgcgttataattatttaacaagtcttgtaaaattatgagaaattcaaaataatttacaatatataaataaatattcaaaccgtttattttaaaacatataaaataaaaaagtttcaagtttatttttaatatgttaaatttttaccaattttttaaaattttattaattttaaataactataatgtataaaactacacaaataaatagatgtacctttaaagaaggagtaattgagcattttcctatatatatatatatatattttttttttatgaaattgaataaataatatttgtgtgtgtatatataaagactcaaatcttacaatatgtttggttcttgagcccagtcattacactggggtcgagagagagaactaagctatggctctcattttcccgagaaatctgaatcgcggaaaccaagcatagatgtttccgttctcttcaaagttttcttcccatgtttaacgattcttaatttcaattttctagggattgattttgattatttatttctatatacatttgattaattaattaactgagaaatatttaaaatggaaggtggaagaagaggtagtactaataacagggctgagtgtggtggtggtggtcgcccaagaactactctcttcgatcagatgtcagcagtagcggacggccgagatttaacaggcttaactctagacgacatcttaaccgctgaaaaacgagccctacattcctcatcaccgcgtcagcctcacgcgccaccacctattcccggtcccgtggttcggactctcttagatattatcagagacgaagatcctaaatccggttcttgtaaggaattcgctgcttctagagataagaaatcctggaaatctttcaaggatcgactccgattaaagcgttccggctccggtgccgcctggacttcctctgttcatactccgacttctgatattctcatacctaattcgcgatcgcaagtttttcgccacaactcggctagagaacgaagccttgtcgactcatttaccgacatgactcaactcgacgagtcgtctcccgataacggcggcggtagtcgatt

SEQ ID NO: 62706 - DNA, 1159 bp, Cannabis sativa
acgaaagtattgggggttttgccgtcatttacccgattttttatttgttttgacatctaaaaaaaaattagtttaatcttttttcaagatcgtgtacattataattatttaaaattaaaaaattcagaataatttacaatactgaaaatatttaaatagttatttactatgcgtctaaaaaaaatcagtcacacatataacaaaatacgtaaatattatttttagtattgtaaactattcataattttcttaaaaatttacaagtaatctttcttggatgtcaaatagataaaaaatttacctaaacatccttaagtagttgctcacacttgcccaaaaataaattatacatcaataagatatttattacatgtatagtgactagggaatgaatgaaaatttatacttttttttttttgacaaattataaaatattaaaataatataagagaaaatttatttttttatattaaaataatataaaaatagctagtaaattctatacaataagattattgtattgtcatgccttggtcactttacccatttagatggggcatcaaaggtcaggtaagtcctacagtaatcgtgatatatatatttatatatatatgtatatagtttacattggatttgagtcaaaaagagaagatcaatccctattataagatgaggaatgaggatgatgcagtacggcgtcgtttctaccccaatcgcactagctagctatgaatcaatgtccatatgattgagcctatgactagaaacatacgtggtgtccctatcatgcaattgtccaaattttaaggccaacttacctacaacttgtggagtactattatactatatagtatataaatacagagcaaaagtatgttggagctagcataaatttcctacccagagagaaactttctcagccatttatttgacatcagtaggtgatataagtataatataaggtgtaagattagtacaataaacacaataaaagtttctatattattataacagtagtttttaataaatgggtcgaacaatataattaaggggggctaagatgcaaaatagccataaatctaacaattaagttaataaatgtccctttttaaaaaaaattaacaaaatgtcattttagttaaaaatttgatgataaaat

SEQ ID NO: 62707 - DNA, 686 bp, Cannabis sativa
  modified_base (635)..(646): a, c, t, g, unknown or other
ttcattttagtgaacaagtccataacttcttgaatttggccctgtttgcagagcgaagcgatttggaaagctttttttttttttttaatgaaattcggggaaagggtttgggtgggtttgttagattggaagagtttggagattgggaggaagaggaagagaagccatgcatgaagaattagatgatgatgatgacatgggcatggccactgaaacacatacatccatagagaagaagataattggtgtactactgctagtcaaactctagtgcaacttcagagagaagggcatttgagtaataaggtattaattttttttaaaaaaattatatttttaagttttaagaatttttcttttatatttttacgatatattttttttaaaataacacgaaaataataaaaaaacacatcaaaacaaaaaatatatatatatatataaataataaaaaattaacaataattaacaacaaacataaaaaatcgtattttttgtaaataatattaaaaaaattacaaaaatattaaaattatgtgaaaccgtatttttgtaacttttctattgtttttgtttattccttaaataatcccttgagtaatagaataattacataaggcaccattttttgtaannnnnnnnnnnntttacgttcaaagaatgttttttatatttttacggttttc

SEQ ID NO: 62708 - DNA, 1042 bp, Cannabis sativa
aaggcttatgcgaggaaaagatatgcaatctgttgtttggtgtattaacgagaaaccatatatcattgaaggcataaggtgaggcgtcaactccattatatctgggaagacgaaagtgatgcatatcgactgtgaaaacacttagcaaataatgtacaaactaagtgtaacagtcaggttggctcgagacctaatagacgaggtgcatatctcgttataggaatgctcattcctatagctttcgctgattaacttcagacatcttcttagcgagactgataatctcaacgaatcagaagataacattcaaatgagcctcgagaaactctctgttaacaagaacttcgattatcccaaataaagcgataagcttttaaataaagaagtaacaaggcgtgcatcgtcgaccttggaaggaaaaaggctccagcttgctattacagtcacttgaaccaagcttctgtcgagacatcctcagacacaacaattaaagatgtgttaaaacacacaattattttgacccaataaaagtgggaaaatcatagctatatgattttcaaataataacgcatttacactacgtgatatgtaattaaattccatgattttaagggatggtcgttgtaaaaagattatagtcaactttgtaattaactgcgtactatgtgattataaatagtggcaagaaagattaaaaagggggacaaaaaaacatacaagagaggccctgagaaaactatcagaaatctgaataagattgacccgtggattatgcagaattttaactgcaaaaccacgtaaaaaatcttgtgtgttcatacttttcattttatatttttatcttttctgtgtgagattgtcactgttaggctcaaatttggttaacgaaaatatacgttacagtttgcattacttccgagccaaatgctagcgagaaagaagtgagtcccattaccgttttctcggtagttatgtgagcccagagtacctgaggtagctcgtcgacccacctgcctttggcagcgtctaacttcttcttgat

SEQ ID NO: 62709 - DNA, 845 bp, Cannabis sativa
  modified_base (471)..(474): a, c, t, g, unknown or other
  modified_base (779)..(780): a, c, t, g, unknown or other
atctatgagttctcaactcgcttgttttctgcaattttttttctaatttttgacgatgtcgcaaaatatcgctaaatgtcgcaaaacatcatgaaatcatgaaacatgctaaatgtctcaaatccacaacattacgaaacacatcgctaaatatcgcaaatcatcgctaaacttcatccctaacctcatatttgttctatcattgcaaatacatcgctaaatatcgcaaaatatcgtaaaaaaactggtaaactagaagaaagaaatgcaaaacacgagagaggccatgagagaagatgacgttgagaccttgcaactggggttctgggtttgtgtgttcgacggtaggggttttgggtcgggttaacgctagagtgagagagataagattttttgaaatgtaaggatatttttgggaggaaaaaatattaaaagtatatatatactatttctaatttggtggtatattannnnaatatattttacatttaagcatactaaaccaaattttccaaccaaaatgaggatgcttggcatagtgaagattataatatcatagcaaataaaaagataataatgtaatcgtgatcaattaataacgtatgctttagcatataatattcaattttcattattctcaataaccaatgtcatgggtgcaaatagaagtaggatcaaaatcattaagataaaaaaatttaattatcaataatcaatatcattgatataactgaaaaataattaacacacactacaagaaaggagaccttttatcccannttttatccttaacaaaaataaaaagtgggataaaagatatgttacaactttttatcccactttta

SEQ ID NO: 62710 - DNA, 626 bp, Cannabis sativa
tgaaatcctataaagctttcatgcatgatggacctcttaagttccctcaatcaaaaggattgtaaaagtaatttgaatatgaagatgtcacgtatagatacctataaagtaggctacgtctccctaaatgttacttcagcagaaataatatggcagccacatggtatgttaatgttatttcagcagaataatatggtagccacagggtaggttaggaaaaatgtatacctgcactggacgatcaccaagtatcaccctaccaccatacttcatagcttcttcgtatgccacacgaaactcagtaccaggaaaaacttctaacttattagcaaccttcagaaatcaaagaagagaattattatgcatgaaattattaatagttttaatcaaaaataaaagaaattattaatagtattctaaatatctaataatcgcatatatatcaaatagaaaaactaaaactctaattgagatgtggaggcaaaccttggcgagaaaccagctgtatagtattccaaaaaggttgtgatttttcttccacaaatctaccatttctcccattgttggtatctggataaatgaagtgagaatatatgcaatttgaagatcaaaaatttacagtgtgc

SEQ ID NO: 62711 - DNA, 1279 bp, Cannabis sativa
gggtaggattggaatttttgtaaaaccaactctccttttttttattattatttcaaattaatttatgtttcaaagtgtcatatgtgatatttgttattctgtaatgatgttaataataatgttgtgattataccttgtctttattttttggctggaagtttaatgaatattcttcttcatcttaatctctcttctttgacttttttgagtggtcagattctccatcttctgttatgtctttccaatacagaaaaaaaaaatgttgaagctttcttctgtggtttgaattgtttcaatgaaacatctttttctcataggtgctatccaagttgccaattggttatgacttcattgaataaaccaacttcaaacacttgtagaatgtgaaaggttttttttttttttgattttgtagaatgtgaaaggttactttgaataattggctgagagaacccaagtattgcaatccccacattctgacttctttgttcaactcaaagttgcctccctccataatatatataaataaaaacatattatatttataacaaggaccgaaggacgttgagaacgactattccttggttgatgatatgcttaagcaaaaggggacaaaaaacaatattgctttgggtaatggggtatctcaacttttgacataattcatcttattcttatcttacatttctcaaaaagaaatgaaaattttaagtattaagaattagaaaaagtatagaagagggaagcagacaggtcaattgcttcatgtacctcatggcaatgatgcaaggaatagatttatgaataaaaatccaaattagtggttgaagaggggacctattattatagaggtaaacagtgttagtgtgtgtatatttgtatataaaatagcaaaacattatcattaatccatgggccatggcagcttaaacaaggtcaacaaaaaattacaacttacaactttgaagataaagactctttctatttggcctataaattgaagcactttattgcattagttgcctttaatttctttcacgggaaaaataagataaaatacataaaaagaaaaaatgtacttggaaaaataaaataagcttattcaattctgtcatcttttttgggacaaataattctgtcatatgggtttcccttccagccaacggctaatgaagtccaaagcctcgtggggcttgtattcaggaacagtatgccctgcaccctgtccccatcaaataaatttctattaatttcaatccttagttagaagggtatttga

SEQ ID NO: 62712 - DNA, 973 bp, Cannabis sativa
cagaaaagataaaagtcatgaaaataattccttaagcatcaaagtgagaggtctcatgtatgttctggtatgcattagaccagacacatgatgttgagacagatttttttttgctgaacatgttgagacagagttatgatgatgaaactgatatttttattttaagtatttatttttgaattgattctctataaataattttcgcttctttaattaatttttttcatctttactatcaagtatattttatagttagaaattattaaagttcaatttataatttactaaaaaataatattctttgatcttctgtatttatattaaattgtttcacatttaatactataagttataatattaaagcgagtgaaaatttatcttagtaaaatagttgagattgatttctaactatacaagaatcaatatattaataaatcttattataattatatatggttagatcctataatttaattactgtacaaactataaattattagttttagtttgttgtttttatttattaaacactttatttgttactaaaatacaaaatcaaattattaaaactaggttagaattaaattaatttatgttagataagtttttcttgaacttcacccaattcctatgggtttgacctcattcttcacaatctctacactacaataaggattcatgcacttgagaacgtactacttttggtaacaatagtaattctttaggaaaaaaaaaaagtgtatcatcacaagcaaattttatagttttgttgttaattgtttgtgttcagtaataaaatctagtggcaagaggtataactatgttttctttaaagaaaaaatggacttgaataaaattttaaaaagaaattaagttatgattttttttttttggaaatttacaaaaatacgggaatttgagtgaatttttacaaaaatactgtcacacggaattttttttttcaaaaatattg

SEQ ID NO: 62713 - DNA, 995 bp, Cannabis sativa
ttatagaaagccatctcaactctcctaatacttttcttgagatatatatatatatactaaaaaattaagctgcacttcacgcgatattgtctaattttcataatttttttatgtatatattatacttatattgagtgatataatttaaaatataatattttgatgtgtgttattatagacaaggtcagagtattaaaattataaatgtgatttcttatttttaaaatatatagaaagatggtgattttgtgacaaatatcaaagatcgtaaaattaacaaaaaattacatgtgtttttataataaaagaaatgatcatgaatttaatacatggtcttgtgactgatgttgtagttatttttaaatgactattcaggctttctttacttaataaaaatatacagtttgactagtttttattaaaatttttatattttattttgtagtgtcgttagaatattctttccacaaaagtgaatgtagtatagttataattcaggctttctttacttaatttatgattagtttttttattattttaaaaattcagtattattaatatttttactaaataagttaaataatattataattcatgattattgacttttttttttaattatttttaaatacaaatagaataatcttttaattcctatgttatcacctttttttcttatacctcatttaattattattagatattattgttaaattactataaataagtttgattacatattattaatttaaatatatttagattttattctattattaggtatactttattgttatatggaatttttttaagtatatcaaacatcacataaaagataaaatgaataaaagatttggaaaaaataaaatacagaaatcatgcctcaagtttattggcttataaaaatatagatatattagataaatatataaatttgttttgataactccaaatcaattaataaaaaattttaagtaattgagcaagaccatgtt

SEQ ID NO: 62714 - DNA, 3223 bp, Cannabis sativa
gctatactccacgtggcatcaatcccgcccatgtagacatgccacgtcatgtgagaaaaagtagggataacagagtgaatctctattaatactgaatttactagcaccactctacaagcataggatatgttgcgagagatccacactcaagtctttgcatctctcatggacagaaattcttttacaaaactagttttggccattattcttgagtaatattccttcccaagaacaaataaatgcttcgacatatagtcgccttgtcttagaccactcttagcttcaaagaaatcatgcaattatccattaaagaacaaactaaactttgatgtacaaatgaataccattacttgttgaatgaactcctttggaaattgaaaagcttgcatcatctctttaagaaaatcttccccaattgtataattagtctttcgtaattctagcttacgtatacaattaggtttcacattcttcctcttgtaatgcttaactaaatccttgcataccttgatgttataagcaataaatgtctcttttacgaatcctcctttgttttgggcaactaactctggtagaatattccacaagcaagcataaactatttttgctgcaatttataaataattttacaacaagaaatatgtataaaatcacttacattatctggacatgtggtcttacgaatgagagtaattgtagttgaatttatttccttaataattttccctctgtgtaggaaagataaaattgcctcacatacttcatcacccactgtattccaattatattggtaaaaatagttgctaaaacaatctcgtctaggagccttctccctcggaataacaattatttcttctttagcagcatccatcatatatggttgaattagtatctggttttgatcattccataaaattgggcgaacatctattacactctacaaaactaaattcttgttcatcattttcaaacccaaatgttgattgtagaattgttaaaaggtagaatttcctttgcttggatcctccacctatcgcccaaccatatctttgatcaaatagattcaattagcttgccttctatctctaatgcttgtaaggaagactgaggtgtttgcactcccttctttagtccaatgaattttttctttttgagctaaaaatgataagtaatcattgtgagtattttatggtactgctcgttggctgccatttcattctcaattaattaataattggaaagaatcttgtgtagttcctcttgacaccaattaagtttatttaatgcttgtacttcctcaatttgaatatctccaactctaagtttgttaaactcccctaatgcccctttcaatctcttcaagttactaatcaacatatacatgggagtaccttaaacttcatgagtttttcaactatctataagcactttagtaaaaccaatataattctaacaaaatctaaagtactcaaattgccttttcctcgttttaagctccggatagatagatagaattgttaggcagttatcaaactggccctctgcaagaaaaacaacttctactgcagagaatatatccaacctctcttgattagccatagaattgtcatgtttagagtaaattctatctccactcccctactatttattccaagtaaaaaaaaacatctcgaatatctcacatcttgtaacatacaataatttatacattctttgacggttgtcatccttgtaatgttcgcattatcatccattctctcttccacactaagaaaatcattgaagtcccctatcactagccaccatttcaaaattcatattagaaaaagacttcaaatccttccaaagctccatcattaaagtcataaaaaaaggtaataaaatatctctcctttcctactcttcaatccacagctagatgcatcaatatgcttgtacaaagacgaacattaattgaaaatatgagcgaattccagcttacaatatttctcttccgtggatgccacatattatttgtgcagagacacaaccccaaagcattgcaacataaacaactgccaattttgaagcctttatttttcttttaaagagaccaaccaacccgacatgcaaagaagagattaatatactaaccttttttttattcactttgtttatccccgtaacattctaactcataattatatccagaaattgtaaggggctttccctcccccctccctacccttcccctacctttaagaatttatcttcttcccttagcacatgaaaaatattctcaatcacacttatagattgagcgtttccaaacttttcctgctattttttttgcttttacaacttggaaaccatcctcaaccaccaccacgaccttcttcggatctaaaactttcccctcatttattttctttggagcccattctttcctttgactatcttctttttgcaatccaggaagtttgcacattgaatcagaatccattcataatgcacttggacatccatgttcacatctaactaattcgtaaaggagatcatattaggaaaagcttaatccaatttaacctcaatcaaaactcgaggattagataacctctcctttgattgaataatttgataagcttttagtggttcccaatctgactagcaatctcgaatagtgccttccctccccaatacatgatatcaaacccttgtagttgaatccaagttggagtcgtgaggacattcttcttcttataatttgtatgttccattgcatgaaaatgaactataaactccccatgattaatcaaacccaatttatcaacctaatctcccccacatccttcttgcgaaaatagcaaatggccctatgggaggattaacccccaagacaatgcacactaaagaggaattccaaaaggcaattatattttcaatgcccactttaattccctcctttttcttactcttctattcctcattcataccataaatcacacttatgtggtattaagttgggagggataaaaatatagaaataggaatgggaatgggaataggaataaaattcaataaaattttaaatgtataaaattattgataaaaaataattaaaatttttctcatcgtgcatcaaaataatatttctttctatttcaaaatagaatagtcattttaccaaaatggtggaaaggttattctattggtatgacattctaatactttaatatgcaaccaa

SEQ ID NO: 62715 - DNA, 1039 bp, Cannabis sativa
aataggaaacaataattgtaagggcgtcataattgaaaagaaagacaatagttaaaagaaggcttacacaatgtttagtaggagggagaagtgaaaagatggaaataagaggtgggaggagataacaaatcctctgttttacaagagagatttaaggagagaaaagtatagtaaatccactccaatccccaatttggaatccctctaataatagaagcattggaactctctttttttcaattattgtaaattataaaaataccctcaacaaatattattaaaaataattataaagataaaatagtaattttaaaaattatagtaattatctattctacaatcactccatccttcctatcaaataacattaaagaattattactctcctctccttctctgatattctctatacttcattgactctcaattaattttacgcttccttcttcctactaaacatagccttaagcctaagtgacctacccttgagtccttttatgtcatatgttcacaaaaatattggttggggaataaatacaactccagtaaaaattatgtacaaataataacttaataataagagtaatataaactttaaaatttcgcatttattttacatacaacaatataacttttagtataaattattatagataccatattaatattattgttaatattaattacacatgtaataattattcataataaaactaatttattcctaatactgtacttacataagccactaattcattaaaatattagttaacgctaatgattatgatatataagacgatttttattaggttgtgtaaattttgtattaaaatctactaaaaaataagttaatgttatatttggtttaaattttacaagtgtatttcaatacactagaagtaaaaaaaaatatttaaatacaaagttgaaaaaattcaatgaaaacattaaatttttgttaaaagtatataaaaataaagtataaaatattattaattatattaatgagggccttgtacgtaaaaaatgatatttattg

SEQ ID NO: 62716 - DNA, 829 bp, Cannabis sativa
atctcgattatgcttaaccacgacgtttgattctactgagctttgattttaaccccacgatatttattttcacttatccatttggggtttagtgagaatcagattccaattcaaagttttgaacttctaagtcgaaaatttcgtttcttagtgaaatttatatttttgattcctcaatcaaacctggtctgtataatcaacctattgtttattcattgccccgaccaattctcatcttcttgtctcctaccttttgcagatgaaatccaaggagttttaggaaggtaaacaccttatcaaccaggatttgcttcaactgttgtacgaggatcatccttgcctccgtgccagttcgtcctcatccagtgataacctttctaactctagctttgaagactggaaagtaagtagtgaactcacgacttccctagaacccgaggtgcaacaccatttttatcgtggccagatccaaggtcaagggtacgatcgcttcacttaggaacttaagaaggggtaaagacgctatcttatgtccgactggacatacatagtctgtccagacatcattgacactttgcccaagggccatccaaaccctaccgttgtaggtaaacttattgcaacttttattgtgactgtcactaggcacacaaacaaagtttcatccaagcatagaatgatggcgcgaaccaagcaaactgtacggaaatcttcattatctgacccacatatcacccatattgccaccctgctaaggactgaagaggcccagcgtgctactgaagaggaggacacagctgaggacattgaagtctaagagacggaggac

SEQ ID NO: 62717 - DNA, 561 bp, Cannabis sativa
tttttattactttcggtttttttttttctattatttgattttagcgttcgagtactacaattcctatttattttttattcttgataagtgttaatttacccgatttaatatagaatttttactctaattttggccttcttcatcaattagaagttggagcctcttatgattttttttttctactccaaactattatctttcacagttggaaataaaatttttagttatttcatattacttttatatatttacataacaaaaaaaatattcaaatttattttaactgtataaaatattggaacattaattggtaaaaaagtatataaagttgtcaaacagtgtttgtacttaatatctaaaaaaaaaagaacttgtgaatttaaacattgaaagtaataaatttaaactaattatcctacaaaactataacctatggtgttaagtaaaatatctcatgatttttacagctttggcttgaatttagaatccaaagaagccaagctcactagctccctccttctcgattgtctcgaaatattggtaaatagttgtcacggcgag

SEQ ID NO: 62718 - DNA, 585 bp, Cannabis sativa
atattgttgacaatggcatagaactaaaaaagaaaagtaatgcccatttctttcacatgcttcatcagaactacactcaccactcacctccttgtgtcgttgtgctattattggaagttcatatatgctattcaagccattttagaggtgaaggtgtgaagggatggcaccaaattatctgaatctaacaatttttatttttaaataataaaaaataatttacagcgtaaacatttaaatttattttacgattgcagataaatatttaaatttaattttttacagtaataataattaagttatatttttgaaacttttatatgtgcttaatcgataagtgttaaaatattattcacgtgtcatctttttatttaaatttttaaataattttttttttaatgaaatagactaatcaagtattgttatatggtcattgacttaacacaacagccaagtgtttattgaagtttcaaaaatataacttaagtattaagtattattatagcaacaaattaaattaaaatatttatatcgtaaattactcagtacaaaaaattggctttttttttactaattcccacctct

SEQ ID NO: 62719 - DNA, 942 bp, Cannabis sativa
tatccatttcgagtgctcactttttaatttccaactccatgagtgaaattcttagctgtgaataaatattttcaaacatctgtgaggctaatggagtttagacttctacttaatacatttttcaaaagcatttatgtgctatggtttgtggtaagaaggtttaagtttggagcacacactcacaactctagatttattaaaagtaattttgtatagttcttattggcttgttagtaacgtttttctgaatatttatgtcatttttaaaaatattgacctgaaaatatcatcttcacattctttttgtttgcttgaattgctagagactagcaataagctagttggggtttaaatgctctaattaatacattttaagcctttatctgtgcacataaaattaatataaattaaatattccttatttttaatggtgaatttattttaattggaaatatttaatttaatttaattttgtgttatttttcagatttgagtaaagtgttacaaataaaaattgggtttcaaagccaattgaaagttgaatggccaacgtattacacacatatatatatatgatatgtctattgtaataccctagagttattaatggattagcaaaaccctaactagttaattatgtaatattgtggaattatattataaaataatttaatatatgagaatttatatgatttatgacatgttaagaccccgttggtgagctaggggtattttagtagttttgacccgagaagggtaaaatcatgaaattaaattatttacgtgcttatagaattatattattatatagtatgcctatgttgtctttttcagatgtgttctaacaacttggcgcagtatagtcacaaccgggtattctgggtcgaactggattcgggcccgaaatacaattttggattgaattattggcattttatttat

SEQ ID NO: 62720 - DNA, 1389 bp, Cannabis sativa
gctaccttttgttttccttatattcatttatatcatatatggtatgagttacttttggtttatgcacatgctccttctctcgattaaatgcttattacctacaagaatttacagtttcatatgtatgtcataaagttccaaatggtaattcattttgctcaaaggattaaaaaagctctttgatgaccaaggtgccttcaaagcactcacatgactacttaaatctttatttcttagtcggtccatctttaaagggattatctcggccgccttttaaacagttgtttgtttggcacaccgtattatatcgtattgtattgtatggtactacaaatcagtttcaaatttagtaatatatataaaaatattgtatgcaatacaatgtaatacgatgtaataccacgtaccaactttccctaagaggttattgacaacttttaatttgcgtcttcttgccatacaatgttgtgagaatttaaaatattttgagtgtggagtgattcataactttaattgattgattatacaagttttcttggggtgtattctgccaaaacagaagtctgaagcatgtcagatttttttcctggtgttataaaattatcagtagctaattcgtcacacaagctcacacattcattctcagaacaggaaggaaattctgagttgtgaactcatttcctatcatgtttatttagcgaactgatcttctacatagaaaaggggctattttcatgatgttgtgcattggtacctctaaaaaatgaggttttaataaccataaaaaccaacttatagacacctattagagttgcttgagcttcgctctttcataagaaccacaaaaaatagtggcaaagcttgtgaaaagaggagatgagaactgaatattggcatctttcctgctggcaaagagataccactggcaaatatgaaaagctttagagaattattgttgtagtgagtcgtgaggcattagtgaagaaaggtaggcccaatctaaagagtaaaaacctagaagttgaagattggagagatttttttgatgggggatcttgtcatgtggagaattaacacttgtgtttgacaagaacacgacagatattttgtaggttcgacacgaaaattatgtttgtcattttgtgtccgtattttatcaatatttcgtgtcgtgggttgtctttatgtttgtgccaatcatctaaaataaaaatataagaactccacatgacacgatgataccaaaacaacacgaacgacacaagatttcataggttcgacatgcaagaaatttatacaggttgtgttcgtgtcaacaggttttaagtaaaattaagatctcaacacaacacgaacctgacatgtcaatacgaactgccacccttagtg

SEQ ID NO: 62721 - DNA, 731 bp, Cannabis sativa
  modified_base (511)..(539): a, c, t, g, unknown or other
gattattgacagcttgccaacaaacgaacctgtatttcagaatgaccattttgtgccaaactcttgcatcttaattcactttttgaactgagataagctgagcatagaaatgtttttccttgaatcacccatttctagttgcattgagaacctcttccttgtcaatgatatttctaagtcataatagcttcttgaaataccaactagcatcattcttaaaagggagctgccaaaagtcttgatctcttaagtatgtagaattcgcccatcgaacccacaacttatcttgctttttcgatatggcccaaataaacttggccattagggtaatattccatttcttcccttcgcaaaaactaagaccaccttgcttcttaggaaggcaaactcactcccaagaagaaagataaaacttgcttctattgccattcaaaccccaaaggaagtccatgcaacatttatcaatagcagaagtaattttctgaggaagtaattattattattattattnnnnnnnnnnnnnnnnnnnnnnnnnnnnntattattattaattttaaataccattccaaccctaatatttttcataatcgtttttctttcattctcaatcgcttaagtctttcgatttctaaggctacccaagccatggctgccactcctattcctggttcgctgtaacaccctactaatttaggcatgttaacgtaatttttaacttaattgtgcagctc

SEQ ID NO: 62722 - DNA, 1284 bp, Cannabis sativa
aatttaagcttgtctttaagaacacttttgaagataccttgtttttcaagttctgttaaccctctttcacttacatgacctagcttgaggtaccaaatcttagtactatttcctatagatttgtcaatagctagtgcaattgatatagtgactagattcccctcaagatagcaaatgtcattaatgagtttttcttttctaataacaagagaacctttagtaaccttgagtgccctatcatctatcttgacagtatatctatttttttttcaaaagcaccaatataaagaaaatttatttttatttcaagcacatacctcacttactgtagtgttctgatctcaccatatatcatacatcctcatttcgtgacaattctaattctctcaatttttttatgacttactatttccaagaatatttacaccttgtttttctaagagtgaaatgaaaaaaattattcggtgtcatatgaaatgagcaccccgagtccaagatccattcctcacacgaaatcaagcttgatgcaactagtttatcaactgattcataaccatcagcgactatgcaagcttctccatttgatttgtttttcttattttgatccctctttagattggctttaaggggaaggtaatcatctctaaatgaccttctttcttacaatagtaatactgcttccttatggagttcttgaatcagatctttgtttttatcccctattcccatgatgattcttgttacccttgtacttcttttcatgcttctagctctagtgaatagtcctcctccattgttttcaattttttcatcactttctttagaatctatttagaacgaaggggtgcctttacttcagtcagtgagtgtatccttcacatagagaattgtgtcaacaaaatattcatacgctcttggcaatgaacttaatatatggtctagttttcatcatctattttaacccatatgttgttcaaatccaggatgatcttgttgtaatcatccaagtgtttctttaacttcttcaagtcatccattcttaaagtgtaaagtttcttcttaaggtataattttttttctaaatacttcttcatgtatattgcagagagtttattccacaagcctaaagctttctcctcattcaagacatctcttaatacctcattgtctaaactcttacaaaattacactatgtgctttggtttcaatctcatacctctccttcttatctgcaatggctttgaaagctctctcatccaaatcttccaagacaccttgatgccc

SEQ ID NO: 62723 - DNA, 987 bp, Cannabis sativa
  modified_base (107)..(132): a, c, t, g, unknown or other
gtgattaaaaaattcgtggctaaaggtattaattacaaaaatcacaattttttgactaaatgtggttttattaattacaataattgttgtgactaaaactaaattannnnnnnnnnnnnnnnnnnnnnnnnnttttagtcacaagtaacttttggtcgtgactaaaagtcacatttagtcacaaaacattatgttgtgactaaaaaattgtcacaaaagagaattttttttcgtagtggatctagaatctaggtcttatatgtgtgtcatgtttaagaactgtaatggcacaattagagaaaaattacagttttacatatattgagtacttgccgctaaaataattatggataaattttggaccctgtattttgaaaaagttacatattggactttctattttgttacatgataaaatagaccctgcatttttcaaaatggtacaaatatgacactgaactgattttttatcaaaataaaatttaataataatccgacctagagatgttatgacaaaactaattaaattttttgtatctgttcgtgttaggaattgtctttaagttggttacattaagaaaattgtaaaaagttgaacgtagagtcatatttgtatcattttaaaaattacagggtttattttatcatttaacaaattaaatttaacaaaatagattattcaatttataacttttacaaaacataaggtccaaaatatataatattaacttaataattattgtatttacaccttttataaactcaaaactttaaatagtgctatttaaccaacaatattataatacttagcggcaccctttttcatttctcaatccattatatattatatccattttataattaattttaaacaacttgggttgcctttgcttatatcttgtgcaagaatttaactcgatattaaacctttagaatgtttgaaaagaaattaatagcacaaccacaacaaagttaagtggttcgaca

SEQ ID NO: 62724 - DNA, 1269 bp, Cannabis sativa
ttggaaccttattctgtcatgttgccattgtttttctctctgttaggtgtttatgatgagcttccttaccttaccagcatttgtgaatcctactacacatttcactattgtcaatgctgaagcacttcctgaacaagtggataagtatgaatttttattgtttctgttatgttttaattttgtaattttattgttattttaacatgtcttatattgctgtttatttttgttgattctagtgattgtggggcatttgttgctgattttgctgagtatttcattgaggggaagaatatttctgctaactttgatgttgaagagtatcgcctaattaaggctttctgtgttgatatataagtttggactaataaaataggttgagaatgttgaaagtgagccagaaagcccacctaaatctccaaagaagacgacggcaaaagcgagaggaaaagcggaagaaaaagtgaagtgatttgaatttaaggaaaatagtttatgtttaacttttgttgtttagtcaggatatgatagaatatgttgataacttactgtatttttttttttatttttgtgtttatgttgtttagccacaacttaaagcaaatgttagtttcttgctcatggctttttttttttttttgttagcctcaactacaaagcaatgttggtttattccttaattttactattctatataatgttgattttatatatagttgtgatcaaagttttattatgattttttttgtttgcattttaaattattattaatattttttatacaatgttaaaataaaaaatcaacatgtttatccgttttctaatgttttttttatatgattctaggtaaattaagcttgattttttttttaaagcatttagtatctagaaaccaatttttagctgttttaagggtttgttctttaattttttgtaaacaacgttaacattaaattttaatgtttttgtaacattaatcaagccatttgatgaaattcaaaattaaatcattcattatcaaattaattcatttaaaatgcaattcagagttaatctattcaatagccaccaaattcaaagttaatcaattcaatagtaatcattgtttaaaattccttgttttttgttttttctctttgtatctgtaaaattattctatttatgttgttttttttttgttgttgtagtattttgtagctgatgttttttcagtctagacttgggttcttgcatgtcctcctattgtgtccttttcttccacatttggtg

SEQ ID NO: 62725 - DNA, 1297 bp, Cannabis sativa
  modified_base (209)..(234): a, c, t, g, unknown or other
taaaaataaactatgtcgagggtgccacatgtttttgctttttatataagtcacttaaatatttaaacgtcactatttttattacatcattttttttcttaatattatgacatgaattgcttatttattttattttattttttctcttggtgatgtttagaccgattccaaatacattgaattgagttgataataataataataataannnnnnnnnnnnnnnnnnnnnnnnnnataataataataataattaaattgcttcgatagagatggttgaaaagaagataatgatacaaggaaagagagtggtatgaagataatattttatggtgtattgataatgacaagcattaaaaatagaaaggccactttatttatttctctaggtccatttaggtaggagaagtttttgacttttgggttaaaaataatgcccaaattactactaaatatattaatatgagataacatttttccaattataataattaaattaaaagatattgaatttaatagaacatttctattaggcaccagtggtgcctagcactttctcgacatgtagcattgcgattggctagcgatactccctaaaaactattatattaaattatgtaggacccgatacttaattacaccaatagcgatattgacacatagaaaggtgctaggcaccactagtgccttttagcatttctcaatttaataatatcatatgcataagttatctaaaatggtgaaaggtgattagtgacgaacatcacatttaaatcattattagcacgtaatttaatttaataattattacgaaataacactaattatttatatatttttttaaaataatgttaaggaccactgataggctataactatactcataagttattttaaaagataaataacgatataagtatctaaaatttaaatttgtaagcgacataaacttaatatttattttaatggcatgagtagttaatgtttataaaactgtaactttttttttttaattttatcagtacagactttgtttgaaattataaaagaatatttggaagtaactaatagtacattgagtacaaataaaattagaaaaaaattacaattttataaacattaagtacttatgccgctaaaaataaatattgagtttatatcacttacaaacttaaaaatttaaatacttataaaattatttaccttattttaaaatcaatcttgaaaagctgcaaagattaaattaggtataatctctatcatgacaaagttaaggtctcaagtacttatatcaagtatt

SEQ ID NO: 62726 - DNA, 1112 bp, Cannabis sativa
attattctgagcatcttgatgaaaagaggtctctttccaaatttttccaagctcaagaaggatatcttcaagaactggctgagttcgcctctcacgacccaattaaaagaaaagcgggtctatgtgacattggtgttcaaccgacttctgaaactaatgagagaaccacatcggtgaagaagcggagacttgatgttgagacttactcattaaagatcgtgcctaaatggaatatgaaaagagtaaaatgtgtggttagggattttcctcgtggtgtaggccccaggggcagtgagtcagatgtgtcttgtgaattgcctggctctggtaattttgaggagccatctttgggtgatgggagctctctagtggtcgtctctgctggttactcctatcacgtggacagaccaatctctgccggtcaatcctcgagactcactgcttggaaggcaagggtcaggatgatggatattgctatttttaggaaggatcatgtcattattgaagatgtgggctcggtggtgggttctcctatcaacattattacccctgtggaggaggtggacaaccctcctccataggcaccatgagaggcgttgcttggaactgtagagggttgggacagacctctacagttctagaagttaaagccctagttcagttgtgctcgcttgacttcttattcatttccgaactcaaaagcgaccccgctcactttgtacgttctctaaaaagcttccacttttattttaatactattattcctgtgattggtggtgcaggtggcctcctcttggcttggaaggctgggtttgaatttgaaacggtatgtataacaaagaatcatatctctggttttgtgtactcggaccctgcgcatcatccctggctgctgttgtgtgtttatggaccgccctacttcaatgaaaagaatacgttctggacgaaattgatggagcttggtctcaatttcggggggccttggttgatccttggtgacgttaactttgtgttgaagagttctgaaaggatgggctcaagggggagagatcaattcttgcctttcatttatgatttgatcagtagatctggcttaattgatctgccagtta

SEQ ID NO: 62727 - DNA, 782 bp, Cannabis sativa
cccttctccactgaagactcctttctccacgaccaccgcggcccacagacccaatgtcaaaggttagtgtttttgaatctgtgatttctaggttagaaaatgcattttctaggcaggcccgatgcatgtacgatgcaggctcgatgcatcatgatgaaaaaaattgaatctgagttgaagacaaaggcccgatggggcccgatggtcagtccgatggggcccaatggctgtgtaaagaactagaatttaatatggcccatagtgggtctgatggctatgaaataaaagagagaagaagagagaggggggtgatgtaaatggaaggtattttaggaaaattataaaatgtgtcatatcttacaaatataaaatattatgagtttagaaatatctttacaagttgttatttcaggacataaaccctaatagctttatccggctctccatgcatgaccactcatgagtcctatctgaaaagaaatgatccctttcagcccttggtacacatcagcatattcaccactaagcactgtggtctagccttttgcactgctgtcaattgctcctgcattctctctgcataccgttaggattgcaatcattagattatgatttccttttgtattgttagaatattccttttcaatattctgtaattgacagctgtaatgagctgaaggctcttccctttttctctgtaaacttttctatataaagaatgcatttactcatgctcaaattgagctgagattactaaaaacatttattacaaaatcttctct

SEQ ID NO: 62728 - DNA, 789 bp, Cannabis sativa
attattttcataaataaataaaattatatatatcaaaatgaattattatcaataaaaatatacttttatcttataaacaaatataaaaaagaaactaaataaaatacaacatatattttttaaaaaattaaatatataaaaatatttttgataattaagttataaatcaattatatactatatttccaatagagacgactttgtttcaaatatgttaacaccttttattgtttatttttaaaatacatttaaaagattttaaaagtaattttgaaaaaaattaaaacctaactcttgatacactttgaaaagaagaattaaaaaattcattcattaatgactttcggtacatctaaatgatgtcatttgaaaatgtttgaaaaggttgaggattcaatttatatatatttatttttaaaatcttatggtgccttttttttttgaatgaaaatcatcaatttatcaatcaataacttcagctaccaaaaaaggcagcaaatcaattgggacagacctcatattgaaattgcaatcaggatagaataacgaagctctagcaaagctatgagccaccttattagctgattgcctaataaaaaagatagaaacacttttaagttcttttaataaaaccttacaatctttaaccacttgaccaaacatgtcatttcaatagaactacacaaggcttgtataaagactaagcagttggtctcaagaatagcttggcaaggttgatttcttttaatccaactcaaagcttcatttacacccattgcttccactaat

SEQ ID NO: 62729 - DNA, 1569 bp, Cannabis sativa
aaaagtgttctcaaataattataaggtagacaattatatatagaataatttgtggtataaatacctaagtttaattttcagttgtaaatacatatgcaagtttaatttttgatcctgattggtccaagttattaaatttttattttaaaaaaaataatttaaatataccaataaataaaataataatatgtgaataacgacttaagtaaacttaagtatttatttaaaatcaaaagttaaacttaaatatttataccataaattaatcttatcttatatatataaaatacatgaaaagtttttggcaaataagataaaaagtactcttttatacattaaatttggaaaatcatttcatgcagtactaataatgtatttgtattaatatagatatagtatctcactcatatctattataaccatgttaaattatcttcaacttatcttgattattataataataataaatacatgcatatatatatatatatatatattatatagttgaaaatggtttcatacgttacttatcatgatatgctatctaataatcaagattcatttatattatattaaatcatgcataagagttttgtcacaactttcataaacattgatattagtattaagtttaaaagtattaatgtaataataataattatatttgtttttgagacagggatggaaccaagaggcctacaatttacttctaatgagtatagtactgaacacagtggtctcaggcccagtcttggcccttttaatgagaaaagaagagaaactctttgcccaagcttcacacacaactctccaattccaaaacccaggagaagacataaggacccttggatgcgtctacggtccacgccacgtgtcagccatcctagccctcacttcagcactaaccgggtcccaccgaatccctatcacaccttacattatgcacctcattgaactcacccaaaaacgacgaaccaacgtgtcgtatcacgagctacaagaagatgagctcagcgacgacgaagactacggcggaaacgacgtcgttgagatcaacgacgccgtcgacgccttccacaccgacaccaaagtcttcgttcgcctcatcaaggcagtctcctccttcgctaccctatacgaagacgtgtgcagcgctgcggaggacctccgcgcgtcgatcatactcgcgccgtttcacaagcaccagaggatcgacgggaagatggagagtgggaaggagggggttaggaccacgaaccagaagatacttcgtcacgcgccgtgctccgttgggatcattgttgagagagggttagccggtgtgcctgggttttcgcagcttctggattcgacgacggttcagcaagtggcgacgctgttcttcggtgggcccgatgatcgagaggcgatcgcgtggagtaagagaattgcgtcgcatcagaagattaatctgacggttattaggtttttgtcgtttgaatcgtctcggtcgaggagtgagagattggatgatcgtgatgatgtggtggttttcatgtcgttggcgagtttggagactgggaaggatat

SEQ ID NO: 62730 - DNA, 713 bp, Cannabis sativa
actataggaatgacacatatcttcccaccactaacttcatctgacatcaacaactccattaaagcatccatatcagtatctctaccgtagatttcaggttcatctggcagagaagtcttaccgcgtgaaccttctgatggtttcacctcaacaacattatttccaagattcaagtttccaatctgattggctaagtactccaacctcttaagaatctcttccatatttgcattccttacacaatgtgttgaactagaaggtttagagaaacaagagagtaacttactgatcatcttccttttctctttctttgactcatcaactttgttgggtttcatagcatcgtattcaatatcgccaaagaagtcttcagcatcatcgacagcatctagaagatcatccagccacttctccacagcagggtttttgattctcctgttctccacttcgaagcgaacagcagcaagagcattgaaggttgacttcaacttgaaaagcctctcagaaacaacagatgcactttcattctttcccttgaagaagaactcctcaacataaggagaagcaatcttttcaagcaaaaaatcaaaagaagcagagagaacagcaccaatcacaagctcagccatcggtaacaagctcagtcactacacacaattgtcaaagattcagagaggaagctatataggagagaatgagagcaaaagagtagt

SEQ ID NO: 62731 - DNA, 1184 bp, Cannabis sativa
taaccatcccattatggtagtgaataaatattgggcacatagttaatgattgtgattatggtattatattagtccacaaataaataattctaacattatctattttatattacaactttctttctaatttatatattttttataaaaataaataaagattaaactataaataaataattttaataatatattggatataaacggtttaattcatgtcaatttagtgtcacatgcgtttaagtccaatccaactcaaataataatcgtgtcattggagttcgactaaattgtcacgcgtctatttttatggtcttaattcacaacaattcgtatcgatcgagttcgtattttattattgtgtcataacttgaattgccatcattatttttagctttggttaaacaactatcactaatcacaatattaacttaaaaataaaaaaaggtaacgtaacctaattacatcctgaaaatgatgaattgagttgatataatagtaaaagtaaaatgaattttgttacgaaatctattcacttaataaataacattatttataaatgtcttttacttcttctacacttcaaaacttacaccatttaaattttaaatataaagaatcaagataaagaaaattgtgggatactaggattaattatgcaatgtgggagtaaagaatttgtttagttggagggaaaaaaactggatcttaactcctaaggaaaactttaattaattgccactatatattttttttaaaataaaatgatttaaattttactttcatccgagaaactattttattttctattacgtgctcattacttttcttccttttttaactaaaaataaataataattaagtgttatttctaaaatatctttatttttattctatataaaatgtaattatctaatggtgttaataagattaattttttattaatatgtttaattttaatatttttaaattttatatttatttatttttctttcaaattttttaaactttaaatattatttttttaaaaaaattaataaatagtttaatttataaaattttaaaaatacacataacaaaaataaaaactaaacatataattaggtatatatgcaatacaccaaataataataatataataatatagtaaatatatatttgatgttatgaatatgtgttcataaaat

SEQ ID NO: 62732 - DNA, 969 bp, Cannabis sativa
gcttcctggtgtcatacaaagacttagcagttcttctcaagtaatttgatccacgtgtcccttcctgattggtccacgtacattgggcgattttaggagcaacattttataatattcaaaaatatttcaaatttatatttttacagatttaatttttttttttacaaaaatacaagggactatttcacaaatgcacaaaaacaataaaaaaaatttcaaaatacggtttcacggaatttttaatatttttacgatttttttgattttatttacagaaaatacgatatttttatgttgtactcttgttaatttgttgtttaatttttgttatctgtatgttattttttttattattgttttgatgctatttaaacattatttttttgttattttcgtgttatttttatgaaaaaatgtaaaaatataaaaaaattctttaaacttaaaaatatattttttttacaaaaatacagaagactttattttcattatttttacgttgctgaacaagtgaaaaacttgtaaattttaaaaattttgtaaaaactgtaaaagaaaaagggttgagatgcaaaatggccctaaatttaaaaactaagttagtaaatgtccacttttaaaaaaaaattaagaaaatggccaaatctaataagtcaactaataaaaattataaaaatacatttatcacatatttttttaaaaaatatatatattaagttacataatttttttagtattacatattattatattgtaacaaaaataaataagtatattagatcatttaaatatatacagcagtatgagatatatcgtagtactgaaaattaatataccgtagtaattaaattatataccacaaacaaattacaacaatagtaaattaattttcaaaatatatatatatatatcatcctaacaaaattatatatactaccattaaaatatgaatacataccaaaaaattta

SEQ ID NO: 62733 - DNA, 1042 bp, Cannabis sativa
gcattttaaagtattagaatgacattctaatggaatgttctttctactattttggtagaatgactattccattttaaaaaggaagaaaagactattaaaaagagaaaaaaattaataatttttttatggattttaaattttaaattttttttttaattatatatatttaaataggagagatgttaaaaggagctagcattgcttagcattctgccacattatcattattataatttttttttaaataagagaagtgttaataggctctctttaagttacactaattttcaaactatttttatagttctagttggtccattaacctgaaattttgttttatataattactaacggattaatcagttaactttttcaattatcatacacgattaaaaagttatctgattgacgaacaatttgatggatcaaattatttacagaataataaaaactaaaatgcttgtaaaaataataacatagtgagtttttacatggttcaacttcaaatgacctactccttaagacacacctatataagaaaaattgatctgtaagagattcgaagataaaaatgtattttcaacatcaatatatcaaataaaagtgagaaaagtcacctacgagtatataactctcacatgcaaccattgtcatctttttggccaaaaagatggtagtgctctcttaactaattggccaagaaccaatgtggataaaatgattttctagaatccatatgattgaaataagcaagaaacaccatctaagggttccgataagctatgcctaaccactgttattttttagccccgactgatggcaatggtcccctattagggtttcagacgctgaaatgagattatgaggtcccgggatccccaaaatatgattcaacattaaaaaataagtcaaaacacaccttgagggatccaggaacatgcacggtcgagaactgccacttgaccgtgtcagtgctcgcatcttgagcaaaatagcacaaatttccctttagtaaaacctctcaatttttatccaaatgact

SEQ ID NO: 62734 - DNA, 1264 bp, Cannabis sativa
  modified_base (759)..(764): a, c, t, g, unknown or other
attctagggataggacccaaagcagcctcgctaaccaatacaaagtagcaacctggcgagaaaatcaaggcgtacttaagtcattttagcacggccacgacaagagttaggaatttggatgacaacacgcaactcacaacccttcaggcgagaatctctactgatccattaactgtagggggttgagttatgggacttacaaggacgtcaagtgagaagcattactgagttcaacggaagggctcaggtgttcgttcggaaggaagaagcctaaaaggaaatgaatctattgaaaacaagctcaggaagcaaacgcagccatgtttcaataggtactgctttcacgagaattgataactcgggggcttctggtttaaagagaaaggacagagttaaggaaccgttgaaggataaaaaaaagtagaagaaggatgataagtatgtgccagtgtatactatttataccgagcttaataaaactcgggagaatatttacctcacacatgagcaaaaggttgccttcagcaagcccgagcccatgagaaattctaggagcaaaagagatcctaacaagtattgtgaattccataaggatattaggcatacgaccgacgaatgtcgccaattgaaagatgaaatataaagtctcatcgcacgaggccattttaaacagtacgtgaaaagacagggccatggatacaaccagcctagtctgcccaataacccaaacaactaggggttacaacctcttcctgttgnnnnnnaggacatcctggttatttcgagagggccacatatcgcatgggagagcaataacgctcaaaagagatatgtgaaagaaataaagaacgagcggtcggcattcgccccagaaccttccaagaaggtgaaaattaaggaaccttcaatcatattcatggaggaagacgagaaaaacgtgagatatcctcacgtcgatccattggtgattaccattcaactcgtcagtaaaaggataaagagggtattaatagacaatggaagctcactaaacatcctttataaggaaacgctaaggaagatggggctcgaaaaggccaaattgaggccatgtctggtaaatctttgcgacttcactggagacagcattgccagtctaggcataatcgaaatcggattaaccttgggcgaggcacccctatccgccactgttatgcaagacttcctatttgttgacctgccatggcttacaacatattgttgggtctgttgggttttgtgccct

SEQ ID NO: 62735 - DNA, 1056 bp, Cannabis sativa
ttttatgacacccacatagccaacgattttaggaaccgatgagaaatagtataaaagacagttataaaccgttggaaaaaaccaattttgtagtattgataccttggaattcgatcgactatctaagtttgttggtgatctggtaccaacagacttcacccgaaaataaaagtatgtgagaggactgaatgccacaatcagtcgggacttgaaaattatcaccgctcacaacactttatacaagaaaatggtcgaattagccttgatagttgaagagaaagagcaacatgtgatgaaagagcaaactacaaaggatgtcgccacggcatcgaatcctcttgtgggtggtaatgtcagtaaggggatcgacggtggtaacgctgatcacaaacgaaaggctaagcttccggaacatcagggagtaatgaaaagttttagaggaacaaaggtggccgtcaaggctgcgggtcctcattcagatcatatccagagtgtccgaaatgcaagaaacaccatcagggtgagtgtcggtccaagacttgctttcagtgtggcatggtgggccactttattagagattgtccacaggctaaaataaaagagccaaagaagaacaccaatcaaaacccggggcatctatttactatgactcaggttgatcctgatattactccgtcagtggtgaccggtcagttatccattaatggttgttcttattttatgttatttgattcagtagctactcactcttatgtgtcggagtagagtaattaaaagttttcataaaccatgtgatgtgtatgcttcggggtttggtaccctgttaccctcgggagacctaattgtatccacttggcggattcgatttatctttttggattggcgtttatgagttaaccgtcaatctaattgagttacaactgtttgattttgacataatcctaagaatggatttcctttctaagtatggggcaacgatcgactgcaagcgaaagatggtggtgtttgagcccgatagtgccaacccaacaatgtttgtgggtaaagtttagggga

SEQ ID NO: 62736 - DNA, 1115 bp, Cannabis sativa
aattataagacaataccagaagaagatatctaatgtataacttctccaacaattgagctcaaatatgaaaaatacgtgcttattataaatttataaattaataagatatattccctaaactttttaagtcattataagtgcaaatatcttcttttttttactaatgtactctcatttatgttggtcatgagtcgcgacgactttcttaatttgaaactgtttaccgagattttcagaaactaattataaataataagaactggagaaacaaataattaaaagagaaaaaataaaaagacacaaacaattttttacgtggttgagacgtaaactagccttagtccacgagtaagtgttattcagtaattctttaacttgaaaagcctttaggagtacaatgaatatatgttctcaaatttgtctaagtaagttttataagagaattcaacccttaatccatggaatttgataggtatttatagtagtttgagaattacatttagtttctcttttccttctattggggagcttacagtgaataacacacttgagatgttttgtgaagtcaagccaacgaaggagagaatttgctgattagtcagatcaaatttggttagatttggtcaaccacgtgtactttgtttgtgggcaattaactgtgaattaattgtttgaaatctattttaggaagttttttcatttagcatgataagatcctctgtcgagatttgaaagttattatttccttatttgtgctcaggaataaaaagggaaatcagatgagtcttctaggaacacgttgtctcacccttccggcctcatggtaccggacttgcttcaggcatgtgttgtcaatggcagaaggctctatggtaatagagctagagaacgttcctagaaggaccttttcaaatgggcttggcccactttatcttctttgtggggcctactaatgggcatttaatatcaacttggattccacgtgtccactgctggaaacgcatataacgtagatgatcctacggaagtggtcgatcctagaactactctctcggagggtgagaacttagataacacgactcttccagcttctggtgttccttctgtggccaatt

SEQ ID NO: 62737 - DNA, 844 bp, Cannabis sativa
gtgttcttcatactttgatgacaccaagcatccattattctatcaccattgacatacacatttaccaagaagaagaaaccattctctattcttttcttcattggtttattattccgaaaaatattacaaccacgattgttatcaagtttatgagtattgggtctcgtatgagccttttattcataagcttcgatatggatttcgcctagaaatctatatttgtactattgtgcacacactcttgagaacataattctagtgtgtttgaattgattaataaaaaaataaagtagacgtaactacattaccatcgcgacatggggagtgaactactataaatctcgatgttctcttttattttttacgactttatttaaccaaattgattcaatgttatccttttattttttacaattttcttagatcagttgacaaaaaatctcgtcaacaataataataaaacaataaaaaaaatatctattacatgtggactaaataggatttgtgcatatgaactatgattcctgcagagtttagtctcataaacgtttcttttttttttttaaatttttttttcttaaactataaaaatcattgcaaatattctcttttagttactaattacttattttttaaaataatttgttgatgtaaaacctgtgtgatactaatttagttagtttaagaaaatatatatgcattcttagagttaatgtttgtatgttttatgtcaacaaactgaatctcaagtagcttaaagttgttaaatcgattcttgttaattgctcacactgtataaactattcgtatcgtattaattgcaatttaaactcttttgcaatgc

SEQ ID NO: 62738 - DNA, 726 bp, Cannabis sativa
taaaataattaagctaagggatttatatataaataaaaaaattatttataagttttaattgctaaaaaaggtcttcttaaattttttttttaaattaaagtcggtgaattattgcataactgaagtcctaagtcctaactacaaaggctatatttttaagtaagtgcccgagtggggttcagttttctctcttttctccagtgcagtttccctctctttgctgttttccccttctttcgccggtagtttcctccatgtcctcgcacttttcttctcaatccgacttcaatggagtcgtgctccacaatgatatgagtctcaggcagttcttatggattcctggtgttatatatgaatcacagttctgcatttatgccttattccttctctttctgttcgcttactttgttcttctctcttttatggattcgattcttcttgatatggattcctgattggtgctttcagaaaaggaaagtacagtccatgccttgacttctgctgatctcactgatgagaacaatgctcccaaatttttccttgtggcgcgatgtctatctaatgctattaacccaaaaacttttattaagaaaatgggtgacttctggaataacaatgccgcttccaggttgaggtttctgaaatgcattctgatttatttctactaacgattggttgagtaggtgataagttgaggattcagaatggggaaccttggcattattt

SEQ ID NO: 62739 - DNA, 660 bp, Cannabis sativa
tggtagttggtggggttggtggtcaccaatatatatatatatatatagccaccacaaatacaaagccctaccttttttttcttgttaagtaaaagtctcatactttaagagtaattttatggagcattacacgtaaagaatttaataatattataaaaattatttgtgtagtgcagggttcacagatgcgttatttttaacatatagacaatacaagggaattttgtcatacaagtgtaccaaccaaaacaaaccatgttgtctttcacaaacactacaaaatcaattttgttagatgccatatctggtgcacaaatcactcaaaaggaaaattgaaaccttcagccccaccacaaaggcaccattaacttggtattaaattacctctttatagtcttgtttcaagtcaaaattgggaaccatatatgtatatattatacatacatataaacattttaggagaaaggtcattcttgttctgatgaatatggtccctagatttttttgggcctttaagtccaactgtatcccaagattacatagaagtgtccagctttcaggggtacctaatttggttgttcttgagatgtgaattcctaagaatttaatatgattaacaagcttccaaaactaagcataaatatactgcaccctatatcc

SEQ ID NO: 62740 - DNA, 841 bp, Cannabis sativa
aaatctgattatattgaaatgggctttatttagggcacaaaacccatcacttccatagaggattcaaagttggtggagtgtttggtagacatgtgtaacagcggaaaatggaaagctgataatggaacattcaaacttgaatatttgcaacaacttgaaaaaatgatgaacgatagaattccaaattctggaattaaagcacaaccacacattgactctcatctcaagatattgaagagacaatatacgacaatttctgatattttaggaccttctgctagtggttttggttggattgaacaacttaagtgtgtggtagccgacaaaattgtgtttgatgaatgggtcaaggttagttactataaaatagatgtactttattaattgtttaattaattattcattatttttttagtttaatattatataatttcgtagagtcatccaactgcaaaaggattactaaataagacatttccttattatgatgaattggcgattgtatatggaaaggatcgtgctactggagatggtgcaatgggattctctgaaacactagatgaaattgcaaaagagataaataatggctgaaatgatgactttgatccttttgatccacttgacgagatcaatgctaatgcaagcatgaataacaatataccatcatgtcaaacaactcaaaaggctaagagaaaattaaataatggggattcattagttgaactgctttttaagtcaatgcaagaatttagtactatgcaagcttctgcgagtgtaactattagaaaacttgctgattgtttttaacatgaagctaatggtgctgctaggagaatgaaat

SEQ ID NO: 62741 - DNA, 2303 bp, Cannabis sativa
aactttatatgtgtttgtttcattgttttagagaattcatattaagatggggaagaaagggggcttcgtgctcacctaatacatatatatacttttaccggtgcataccggtaaaagtgtttaaaaaatatattctgacctaggtcatgaacgctcgtttagttgaatacttttttcggcgcaattgtacaccggcaaaagtacccccacctagcacaaaaaatccacgcaggaattttcccttgcatttttttgagacttgcaccggaaaaaatgaaatgaaaggcagcaaacttctcatgccttttggtgctttattttttcacttttatcggcgcatattaattattgcactgacattaagaagttttgctgccacaatactgtgccagcgaaagtgaaccctcaatgaaagtgggaattcaagctttatgccaacaacttttaccggcgcatttgacgaaatgcaccggtaaaaatgccttttcttgtagtgtcttagtgtggccgaggtggtcacccaaatgctctcctcttggtgtatggtcaccaagaggatctcctcttggtgtggccgagatgcatgctctctaggacttggtgagccttttacttgttgggaatggtcgagatgcatgctttagggtgtggctgagatgtcttttctagtgatggtgtcgagatggtcaccatcgtcatcacttggtgcatgtgtagatgctctcctaaagcatgccgtgatgcttatctcttgaagcatgtaaagattgtcaccatcaccatctgtttgtgcatgcaatggtgctcaagagtttgtgggcgaggggctcttcaagagtaagtcataataaattgaataaatttcgtgggaaagtttaagacttgtaacatctccttaataaattcctattccacagtattgtaatcgttttacaaatctattttaaccatgcaacaatattttccattctttctctcattatgctttacaagatcttgacaaatcatgatgttgttgtgagaaaataaaatctccaatggacaagtcccttgattttatgaaatataagatcaggaaaaatcattgataatctctcacaaataatcttagtagctattttataaaccacattacaataataagccaaaattcactcactatagttgaacattttactttcgaaataaagggatgattgtggtagcattaagttccttcaataaagctactaaatgtaagaacgataacaccacctttgcaaagtatgagtgtaccactatggaagttttcttaaagaacgagctactatagccatccagtcctaaggccttgcaaaacaggattgagaacaccgtctttttaacctcctcaagggaatagtcttgagcagaaatgcagcttgatcagttgtaagaagaggtcccattttaatgaatgacttcagaattttctgccttttttaatatagtagatctcaacaagtcttcataatatccaagaaatttatactcactagttggtgatcatctatccaatctccattgctctttttagtagctaaactttgttttggtgtctttattaggatatccacatcacattctgttaaagttagttaggattactgttagttagttaggactaactccttgtcagcttgtaacaaccctctgtataaatactttgtttccattattatcaatcataataaagatttgattacactaatatggtatcagacgaattcaacactctctgattctctctctgtaatttcttcttccaccgtcttctatggcgagaactcgagctactggttcacgaagctccggcaaaactccattgccgagcaacttttccaacattccagatgctccacccaatcctctgatcattccttcggtttcaaatgtcactggagaaaatagtacacgacaacctattgcccaacctcgacctgtacacaaagacagttcaagcccttatttcttgaactctggcgatcatcccggtcttactctggtttcacctcctctctcagacaagaatttccagccatggcgtcgaaacttcgagttatcggttggtgctcgaaacaagactggtttcctcaaaggaactctgcctccaccaccgatggatgaccctctgcacaaccactggcttcgatgcaatcagatggtcatgtcctggattttacactctgtttcaccagatatcaagagcaacatcatattcttggacacagctgcagatatgtggaaggagcttaattcccgatatgaccaaggtaatggacccc

SEQ ID NO: 62742 - DNA, 599 bp, Cannabis sativa
gctgtgttatatgatcactagggataacctttatttgatttaatctggccttcttgagtttttgactggacaaacaaatttgaatttatagcgcatgaagctttatatatcccacagctatagtactcttggaagtcaatataggtgtaccaccaaaatagattttaataggcagtttcatcaaatttaagtagcacaccaaagtgtagaaataactcctcccccctcccctaccaaaaaagaaaaatacaggtatatcttccaacatatagccatataggtatctgatatcgagaattaactcgaagagaaatactataaggcaactgtggcgaccttcatcggtgttatattgatatttattcgattaagtattgggtccagtataatttaaggtaataactttaagagaatattgctaactaatcattgggcgtcacctctagattgtggtaggcactactagacccaatagcaatgcccttaattaactgaaataaggttaaaaaaaaaaaaagaaaaaagcaaaaacgcacaccagtggtgcctagtacccttccacgtgtcaatatcgttgttggtgtaattaattatcagat

SEQ ID NO: 62743 - DNA, 1100 bp, Cannabis sativa
  modified_base (973)..(1001): a, c, t, g, unknown or other
ctttttcttttttttacatttttacgaaatttcacacaaaaatttctatagcaattaacaaaacaatttaaatcgcaatcaaaattcgaatagcaacccatataaaaactaccagagcaatccaaattataaatttaaacaaaaaataaaaaaaaatagtatataaggtaattctctatttttttaattatttttttcataagggtaaacgatacaagttaaaataataaaagtaacaaagttacgcaattagtagataattttcttccatctataaaaaaaaaaattgtttataaataattcaatgattgcatttaatgacatatattattgtttgaaatatagtttttctgaaaaaaaaaaaaaaaaaattgtactaaatgtttttttttcttttaaatattaactatttgatttatgtcaattttataaatatatattgtttttttttttttaaatgaaagaaatttttcattaggcctaagccaaaaccaaaagacttaaggttaggaataaaatatagttaatggtggtagtaaaaaaggtgtcttttttatttttttagcaagttatactaaataaatatccctttatagatttatgttgtttcatataaatacatgtttgattaagatggcattttgcacatttacattctttaattaagagtgagagaaattgaataattgaagtgaccccataaaaaatattaatcaagatttaatatttctttttgtgtcgactgatgacctggtttatttatgcaattatgcatatgactcactaactaacccaaaatatataactattttattaattattttcatagaaaaaacaaagcaaagtggttacatattataacatataataaccatgtgatgtagatggggacatttaatcttctgaatctagtttctaacaaaacctaatggtggtgattgttacaacttataagggctcgtttggaacgccnnnnnnnnnnnnnnnnnnnnnnnnnnnnntatattgaattggattatatatcatatttttatacaatactatgttaaactttaatttatattaaaattttatatatttaggtatccataaaagttaat

SEQ ID NO: 62744 - DNA, 643 bp, Cannabis sativa
  modified_base (395)..(399): a, c, t, g, unknown or other
ctagacaaggtctacccacctactacttggcccataggtggaacctgtgactggggatttggcggctgaccatttgtagtctgtgaggtattcatccttgcatcttcgtctgtttctcccaaaggaatgacattagcaggttgctgcccgacactctgataggattttcgtatcagcacagtggcttgccaactacaattatcaatgactacatgctgagcccttaatgcttccatctctttgtccctccattcggcaaacatgcgcctctgctcttcaaacgcgagatttattgcagcacgaagctcctcctgataatgatgtagggtgttggtatgattctgcatgagtctaagagcagcacggaggttctggatctcagtgtcatctccaannnnngtttgaacattggtagcgggcgcaacaacagtgctatgaatgcccttgtgggctgctgaactggtattccctgtctcttgcacaccaggcgcgatttcatccacaagagtcgtcacaccgtgtcccgcagttgatggctgtctcggatttatggctggcggaacccttgtgtttcctaggttctacagtgaacaatccaccacctgtggatttgctggatcaaccatgcccctacgagtctgta

SEQ ID NO: 62745 - DNA, 918 bp, Cannabis sativa
  modified_base (264)..(264): a, c, t, g, unknown or other
tccttagaatttttctcctcttccagccaacggaggatagctcgaagggacgtcctttcatcttgaaggccatccacttctgcagataaggtctcgatggtctcttcaagtcagtctgaagcctcgagatccttagtcaactcggttattttcttctgagcagtaaaaagcttcttgttgacttcaccaagctccatccgaacagctccaagttccaccctggcgtcatcaacattcttcttggccaagtccacctccgccctnatggtgttggacaaagccgcgttccgggaagcagcagacttagctcaagagtatgtgtaagccaacttcagaccaacctgcacatagataaaacattagaatatgagccaagtaaagaggattaaaggaaactttcaagaaagacttatccttgtgaattccttcaagactcctcccatcaacaactctaaagaggattcattgccagcaccgaccagttgctcattaaccttaggaaccaaccggttcatgtaatgggggagcatctccttgcctttcttggcctttggaagcactgacaaaggtggagtaggagcccgcatttgctcgaatccacacttggtcagctcggatccaccttttgattgctcaggcctatctgaatttcctcctcaagaatctttggacttagaaactttttgagtggaggggtttgcaacaattagctcctcggaaaggtcaataacctccccggttggtgccttttccttggaaggggtcgcctcaccgcccctggatttcttggctgggggagatgcgcttgagctcactccaactctcttcttcagagcctcgagcatcttctgagacatgtctgcactgaaaaaaaaagaaacctggttagagaaaacagacatcagaagcataaagcat

SEQ ID NO: 62746 - DNA, 842 bp, Cannabis sativa
aacacaatgaccgtagcttgagggactatttgctgcctaacttgacaggggtcagatcttgtataaggtcacctgccgttgataccaacaattttgagatcaagccgaccatactgtagatggtccaatcttcagtctagtttggggggctgccattagaagacccaaacatgcacctcgctaacttcgaagagctttgtcagacattcaagatgaatggagttagctatgacgccatcaggctaaggttgttcccattctcactaagggagcgagccaagagttggttggtatctctgccacctaattctatcaacacttgggaggaattatctttccaaattctttcctcctacgaagattgccaagctgagagctgaaatcaacaacttcacctagcatgacaacgaatctctttatgaagcctgggagagattcaaggacttattgaggaagtaccctaaccatgggattgaaaaagtgttgcaagtgcataacttctataatggattggtcaacaacacccgaacactcatagatgttgtagttggtggggcttttatgaggaaaagtgctaatgaggcctttgaactacttgaagagatggccataactaatcaacaatggtcaacagagagaggccactctaaaaaggttgtaggtatgcatgaagtcgatgccataaccaagttgacagcccaagtggaggcattaacgaagttagtgactgcacaagccaaacaagctcaagttatctgcgagctgtgtggaggacctcatactactgacacctgccatatagatgtagatagtttgcaaatggagcacgtccaagccatttg

SEQ ID NO: 62747 - DNA, 2010 bp, Cannabis sativa
  modified_base (770)..(783): a, c, t, g, unknown or other
aaaagtttttatcccactttttattttttcaaatgtaaaaagtgggataaaaagtctcttttgttgtagtgactctttacttaagtctagcgtataatttgcattaaccaaagggtttaatgaggatattatctttaaaagtgggtatatattaaataatataaaaatagaagtaaaaataaaaacaaataaaatgaagtaggtatattatgtagttttctcttattattttgatgttaaagcttcttctaattggaatggggccttctctccttctcatctggttgagattgaattgcatttttttttttaattatttggttgttgattaaagaattctttttttaaaaaaaaaaaaattatttttatggtttttaaaatttaagtttatcaaatatgattttttttctctaaatatttattttatatggaaaaaatagtattaagtacccggttatttttttattgtaactaattatccttcgttatcataagaataccttgtacctttatttgattttttttcatattttttggctttttctttagttttcttataaatgatatttatgaaaaaaaaaattcatatttttatacaaaaagtatgaaaatccatagtatttttctaaaaatattagagttagtatcacattgctaatgagtaaaaataaattgttatatataagatgaatagactactcctcccattgccaattgattttgagatagaatctcattcatctcatccaaattctaacatggtatcagannnnnnnnnnnnnngttgtgagcccaaagtgtcatcggtctaaaaacccgtttgtgatctgttgtgagctaaagtgctatcagtccaaaaagatatatacttccgatgtctcccttttaacctccatttgggaccttttagccaatgtgtgtcaatttctaattttggggtctttgacctattttaaaattctcaaatttcccgacatgtacacccacaaatttctcgatatttgatcttgtgggattctttcaaatgtcacgtttagccctgtggtcatttaaaggtcgttcgttacccacacattttaggctcaaacgtgaggagggtgtattagagttagtcccacattgataatgtgtataaataaattgtcgtatattataagatgaatgggctactcctcccattatcaattggttttgaatgaaacctaatttatcttatctcaaattttaataataatgctaaaaaaaaaaagaaattgtgtgtgatttggtattatgtgtgtacaaattataaactacactttgtgaaaacgatcactattcccttccatctttatgaaaatatcacaagtttttttatgtgaaatttaggggtgtttataaaatagtcaatctaattcttaaagtgtattggaggtcttgagttcgagtctcaagttatgcatagtaatatataaacgcttaaataaaaaaaatccgcaaagtgcagatatctgcacttgcgcagattggaaaatctaaaattcgcacttatgtcgaatattagatgttgattggcatgtaaaaatatcgatttaatccaatctacacatatttatataaaattttaaaacattagatatacaattactattttaatgttaaaagaaattagtaatttaaaaatctataatacaaaaattatataaaaaaatatattctaaaacttaataaattaaatgtatattcaattcttatctatatatgggtccatgatggttacatttttgttaacatgtaatagcagattaccaacatgtaaaaatttctttttttgaattaaattaactataataaattatttcttaaaataattaatttttaatttgaatattaaataagaccacttttagcaattaatattaataattttagtttttttttattttaagtctattataattttttttaacagttaagtcatttaattataatatttataataaaattctattttataaaatttaaactttc

SEQ ID NO: 62748 - DNA, 1787 bp, Cannabis sativa
tttcagtcagccgtgtacttgattaatcggctccctaccccaatacttcttggaaaatcaccctttgaggctttatttcataaggttccagattatgattttctgaaggtatttggggtggcttgtttcccttgtcttagaacataccaaacacataagcttcaaatccatactattaaatgtgttaatcttggttatagtattgttcataaaggatacaagtgtcttagtcctatcggtcgtatatacttttctaggcatgttgttttcaatgaaaaggaatttccttttgctactggtgttttaaacaattaccagtaacctcctgaaattaccatgacagcaccacacacttggctcaatcttccacttgatagttcatcctcttttcctacagagactcctcacacaaacactactccctctcattcttcaacatccagtgctgagttacccactgatgcagatcatggctgtcctcttgctgcaacatctcctctttcacctgcttccaacacggtttcaccatcaagcatcagtcccgactcttctaaatagccacatgaatcgactgtgtcacttgattttccaccagcaactcccactcctttgactgatattgttccaccacagaatacgcaaccttctcatctgatggttactcgtgctaaggctgggatttttaagcctcgcacctttcttggttccccttctagtgtccctgtgaactatgaacccgattctgatgctagtgcgcttcagcacgaggggtggaataatgcaatgtctgctaaatttgcagctttaaaaagaaatggtacttggatacttgttctgtatactgatgatatgaatgttgtaggctgcaagtgggtgtttaaagtgaaactaaatagagatggtagtctccaacggcttaaagctcgactcgttgctaagggctttcaccaaaggccaggggtggactttggtgaaacttttagtcccgttattaaagcctcaacagttcgaattgtcctcacaatggctgtagcaaatgactgggatgtacgacaactggatatcaataatgccttcctcaatggcacccttgaggaagatgtgtacatggtacaacctcaaggtttcgaagatcaggacaagcctaaacatgtctgcaaacttctcaaatcaatctacggcctaaagcaagcgcctcgggcatggtatgatcagctgcgaaacactcttgtaagctagaattttcaaaattccaaggcagacacctcattcttcatgctgaaacactctagctatgtgataatggtattaatatatgtggatgatattgtagtcacgggtaacaattcaaaggagctggaagtgtttattactagactcaacaaaatgttttcactgaaggatcttggatctctacactacttcttagggatagaagtatttagagatacaacagggatatatttatcgcagggcaagtatattcaagaattgttaaagaggtttaacatggagaatgtcaaaccaggtcctaccccgatgacagcaggaaggacattgtctctaaatgatgggcaacctctgtataatgccactgaatacaggagtctaataggtgcactccaatatctgagtcatacacgacctgatatttcctttgcggtgaacaaactcagccaatttcttaaaggccctactacagttcattggagtgcagctaagaggattttgagatatctcaaaggtacaattcatcacgggatacatgttgcacctagtgatcgtct

SEQ ID NO: 62749 - DNA, 861 bp, Cannabis sativa
  modified_base (751)..(751): a, c, t, g, unknown or other
tttttttttcaaaatttatagattagtgataataattttttttttaaaaagcacacacgtggcgtccctgagagttagggcgttacatattgtgtccacgtgcacaatccaacctggcaattcacagctaaatttagacggaagtgttaaattgctaacagaacacgagtattgggggttttactacctaaatttaggttttgggggttaagtgaaatcaaaataaaagttttgggggttttgctgccatttacccttacttttattgttattgttctagtttagtgatcattttactttctgttatctgatctacatgatattcttaaaggttttgccagtgttttgtttttgtgtgattttatatttttatgttatttttatttattattgttttttttagcattatagtaacacttatatatttactaataatctaggggcccgtttggtacacaggacaagatttgattagacaggctaatttatccaatctagtgtttgggcatgttagaagtctagataactaatccagctaatctcatctctatgggattatttatcccatccagcagggtgggataaataatcccaggtgagattttttttttatcattttttttaattttaattttattaatatattttaagtttaataagaatttaaatgaaagaataattatcacacatttatttataaatttttttatcaaaaacttattcactaaattagtgaaaatgtatatttttnaattattatacataatttttcaaaatttaaaatattattaattaaacaatagttgcataaattgattctaagagaaacaatatgacaataaaactatatattatttttaa

SEQ ID NO: 62750 - DNA, 643 bp, Cannabis sativa
gtcttttaatcctttttcccaaatgtaattgtatcacatgtcaaacgcactgccaatcatacggctcatggtttggcaaagtttgcattaggggtggatgagacttgtttttggtttgaggatatccctcaacctatttacgatctgttattgtagatgaactctctgtttaatttataataacaagtactttcactaaaaaaaaaaatattcataatgctcttagcagttatacatcacctaattagatcttaaaacgatattcatcagcatttattattactataaaaaatttctgtagacttctaataaagtgtcatgttacaaaatatttaaattttattttaaacattgtaagttatttatttttttaaaaaaatttataattagtcttagatagtaataatatatacgattatacaaaaaaataaaataaattataagtacatatatattttttaatttcagtagtatgctcgttagaaaagaatgaaaattgatttattcactataaaaaaattacttttagtgataatcttttaatcacaacacaaatttctgactaaatgtgacttttagtcacaacaaaaaattacttgtgactaaaatatagtatgtggatataagttgtcactaatttagt

SEQ ID NO: 62751 - DNA, 1005 bp, Cannabis sativa
gcgtatattgtagttatataggatcacttgtaaattttcaaaaaaaatcgaatagtttacagttccgaaaataaggttcaaatattttattgcacaagaaacaattttttcttatgtgtggtaaataactgtttgaactttattttcgacactgtaaactatttatttatttatttttttttgaaaatttacaattgatcatagatcgctacaacatatgcgatccccatattgaaattgcagatagtaaatgaattatgatgtataaaatgttttaccctttttccttactatcttaattcataatattatacgattatgaaaaaaattctaaatatcaaaacagataaaaaaattgaccgaaactatcttattataagaagtgtacaatagatatttctaaaatattatagtcagtaatataataatatttgccaatcaaacaaaccttgtactatttcctatctaccttatatcctaatgacatgtgatgcaataaatatagtcataaattttatttatttattatatgaatatagtcataacttcttgtttatttcgattttatttatttataatcttaatattatatgttttaatttttatatatttaacctctttttattttttagcgaaactcttttaaatttaagacgtcatttaaatatcaccattaaatattaactgaataattactgtgtatacttgtatatacataaaaggaaaattttgaaattaatacaataataattcagttaatatttaaccgtaatatttgattgacacttcaaattcataaataaaaaaaaaacataagaaaaatttgccaaaaataaaaataaaaagataaatataaaaaattaaaacataaaaaaatattgccgcaaattacttttacaattaatatcacaacattttatttgactcaagtacaatttattattattatttaatatatttaattacaccaaatacaacattactaaaattctattattattatta

SEQ ID NO: 62752 - DNA, 1144 bp, Cannabis sativa
  modified_base (187)..(187): a, c, t, g, unknown or other
  modified_base (590)..(606): a, c, t, g, unknown or other
gagtaatttgcgatataaatatctaagtttaactcccagttgtaaataaatacttaagtttaattttaagcgataataataccttagttatattttttaaattctgtagatacctgatcgttaaatattaaattattatccacgtgtgatttttttattggtatatttaaattaatttttttaaaanaaataaaaatttaatgactttgacaaatcaggagttgtcacgtgacaatttacttaacacttaacagtcagggtcctacaaaagttctagaattataacttaggtattattaccgtcaaaaattaaacttaagtatttatttataattgggagttaaatatttatgccataaattactctttctttttatgtgttaaagtttgaaacaatatattttgaagagaagtgtatacaaatttatgagagagaaagaaagagagagaagttgaagggatagttataggaaattatatagcaaaaaattaaaattaaaaaaattagaaaaaataaaataattttatatttcttggtcgttggattaaatgattaataatcatccaatggttattattattattattannnnnnnnnnnnnnnnnattattattattattaattttgaaaagataaataatatatgaagttttgtaacgtccattacactaggctccaagtaagtgtttggactttcgagttttcacatggcaaaaaaaatttaattaatgaataaattactaaagtaatattttaactgctattttttatttatttatttttagaaaataccagtgattaaatttaaagagttagctgcttaaattatctttacctaaaaatatttttttaacacatgaacagttacattatattaaatgggatttttatgatgggttaatttcacttgtatatatatatgttagagaatattgatgaaaaatatatattttttatttttatttattaaaaaaaataaaagtttgtcatgtttatgtttattaaatagtataaatttctgtacttttaatttttttttttttatgattcctcaaaaatattaaataggctaatttagatttttgactcctgaattttgacacgtaccaaatcatgcttaaaactattgagattgttagattt

SEQ ID NO: 62753 - DNA, 774 bp, Cannabis sativa
  modified_base (607)..(607): a, c, t, g, unknown or other
ggagatatgcttttatatttagccatgaagctagcaagagcttggccttttatggccatgctaggttgacaggtggtcttatattagttgagctcaatgaccctgatgcttcaggtttcggtgacacctgtcaccatggccggttggcatgcattgctttgggagttttggtaggagagtgaagcatgtgcactgctcctgcttctcccttagatttcatgacataagggaatcgttgattttcacttttttgccattatttttgccagagccattgttcttgtgcttgcctcaaatattctcattgttggaagattggcagatattgtctgcactggccggcatgtcaaacaacacttagggtagtatgataccctgtgtttgttcaacattgacctaccctcctgtttgggcttcctgaacagtcttccaactttatgaagccatcagctagcttaaggaaatccttcatgttgcttgttgagatccttgtgatatcatcctagaattcactcaacaacaagatgcctctgattatggccacatatcgaccttttctgttaggcctttgaccttcgtggcctcagccatgaacctttgaatgtantctttcaaaggctcatcttgtctttgctttatttcaacaagatcctccagttgtgaaggtatttgtcttgaggtagtgaattttctacaagcactagacttaggattacagaagccactaagtcaaggaagggccaccaattactcagcttcaggctcccactgatg

SEQ ID NO: 62754 - DNA, 870 bp, Cannabis sativa
gaaaaaaagttattgtcatttatgactgaccttttgttgaggtatatgttttcatagttttggtttttttttcaattcattattttgttattgttggtttctttcttgttttatttcagttgcattactatctttatgcaggtgaaaacatctgatgaccttgattcggatgatgttgatggtgttgttgttgaagatgatgatggcaaaggattaccagattcatagaatattgaaattgagtctactgatggtgatccgtccggtgaagatcgtggtgatggttctactgatgataatcattattatgataaggttggtgctaatgcttctgctgttgtggaggtccaaggtgttgttgttgcatgtagtgaagatgataattccaaggatgtagataatgtcaagggcaaagaagttgatgtaaagggagatgattttttcaacggcttaagccagcttgagattgatgatgaccaagttatttttgttggtttggaggctgttgcaaaaatcaatgtaaactgctttttgttttactaaagaggaaatttcattaaaataaaattgttccattcaaaaaaaaatgaagaagtcatgtgtgttctctctagtcttcttccatgttgaagacgcgaagggcgatccgaaagccagttgttcgagaattgagtgtggaattaggagctaggagtgagaaggaggctcgaatcggtcaggaaaatgtggtggaggaagttcgaacttcgcaggaggctgtgattgaagcgattttgaatgatggtgattgcgatctaataatggagaatgaaaattttgacctaggggaaagggaagagaagatcagtgagcattgttgggcagatattt

SEQ ID NO: 62755 - DNA, 1097 bp, Cannabis sativa
  modified_base (179)..(187): a, c, t, g, unknown or other
ccaaacccctgggtgctcctgatcaagtgccggtaatcctagtcacacaatctgggattttacaaatagggttaatcccaaattttacttttacaaaatataaagtttccattcaaaatacagataataaaaaaagagctcagaacgggctttccaatgatataaagaacgtcccaaannnnnnnnngagtcaaaagttatggccaaaataaaatcggaaaaaacagaatttctcactgccaaacccagtcgcgacggccaaaattcccgtcgcgacgactgggtttagaacacccaaaaactccatttttaaggcctagaagtgatcactttaccatatattcgaaccccaaccaaacaaaaggtaagcacacattaaggctcaaaaaatcacagctcaaagcatctaactaagatttaaacaacaaccaacatcaagctccccacatgagcataaatcatcaaaatttaggctcaagaacttgaacttcaactagttaaatctcttttttttttagcaaccacgcatcaaataaactctgaattcaaacatagaaaacattctaaaatctcatctaaagctcaacaatcataagtcctaacaaaaccatacaatttaaaccaaaactccctaagattaacaccaaatataaccacatgcattcaagaacaatttaatcttttcatgctctttgaacctaaaaattcagcaagaacttcaaatcaaaatcagtaaaagactacctcaaggtttaagcaagcacaacccccacaaacaagctccaagaattagctccaaatcacaccaatttcaccaaattaatttgaggccaaaggagtgtttgagagagagagagaggggtcaggttagagagagagaaagccagaaaattcatttccattttcctcaaaattcattttattaaacataaatcaaaggtcaaaaaagaccactttcccctagggttaataaaacttgcatacacacacacacgggcatttaagtcatttcatgctcatttaaactctaataaatttcagattattctcactaataattaaaatgccaataccatttcgggcccgaaccccgttca

SEQ ID NO: 62756 - DNA, 1001 bp, Cannabis sativa
ggaggtggggtcgtctcgtggtggaaggtgggggtcgcgcggtttggttcaggcgaagtgggtagagagagtttgtttgagaaggagagagaaagggttagaaattatgagaatattttaagggttttggtaaaagtatcctatttttaaaattaccctaattattggttctcctaaccaattatcccttataaaatgcataaaaagtcaaatttcccaattatttgtattatgctaataaaattatatactattattatacatagcaaaataaaaaataaatatcatttaagaataataatacaccatacaacaaaacagaaatataatgtacaacaaaatttatataccaacaacctacaacaactcataaaaaaaaatcgacataacttttaaataaaaaagattttaataaaattaatatagatataccataatatttaagtaatttgcttctaattctaaaaaaatatgaaaaaaaaattattaattttttttatgtgataaaaaataatataaataataaatagtggacatttctctacaaattttaatataaattctataattttgagtcatttgctataaaaagatagattgatgatagatttgtaatttggagtgtaatttggagtgtaatttggaatgttttgaagtttatatattttactattcaggccttctctttctagaagcatagaaaattttccttaaaaacaaaaaaacaaaaaaaaaactcttgaaattacacttacattatggatcttggcccacaggcctaggcctaataacgtggatgtaattatagatctatgcaaataattaagaatttttacacaaatttattaactttttttttctttttttttactgcagggtagaattttttttcacaaatactgtaattttttttttcaaaaatactgcgtaagttttatactgcgttaagtttttactgttattctacggttattttgtagttgtttcactattgtttttaa

SEQ ID NO: 62757 - DNA, 757 bp, Cannabis sativa
aaaacctcggtcaacagttaaactagtaaacaggtcgcgcttcgcgtgcgtctatttatagaaattttaaatttatatatgaattttaattaaagaataaaattttatattttaaaaagtatatatttattaaaaaaaaattatagagaactttaaaaaaattcttcgtacaatttcttgtctaaaaaataaaatacatacaaaatatcttcaaatgtatattaacaaactattaaaaaataaacaatactcaagcaaaatataaatgtaaaataaaaagaagacaacaaatctatagaaaactcatcatataatttcaaaataagtattatcatcatatcttaattgtacttaccgctatatttaaagttaatattatcaccgtatttcacttgtagtcatcattaatatttttcacttttataattaaaagaatcatattctgttataaatttattacttgcgtattttaaagtgctttagcagatgtgaagggaaagagactaataaagaataattaaaatttagggttttgatatatttagtatattaattaatattaattgtatatgttatctctctaaaaaaaaaattatattttttaatacatataattatttattagtgatcatgtaaaattatatagttttttttagctaattagtgatttttacttaaataaaatagaatgaaataattaaaaaattcattgaatagctaaaagtaactgcccgattctttagttttatagttttat

SEQ ID NO: 62758 - DNA, 774 bp, Cannabis sativa
gcagaaaatgaaaagggtagaaaaataattggaccaaaaaaataaatttttcgaatataaaaatatattataaaaacatattttaatacataaaaatataaatatttaattgaaaaaatccaactaaacgcataaaaaaatatgctataaaaaattaaagtctttaaaatttttcatactttgtgtaatttctacataaaaaatcttgtgaaactcacttatctccctaacataaaaagatttatttatttatcttattatttctttttagggaacaataactttcgttaaaaattatattcaatgttaaaccaacaaaagaatcatatagtgttatgtaagactatttaaggagaagcaacagatctcatctcataatggagatgactatgccttcttgtagatgtagatgtagttagatataatattgtagttattacattttcgatttttttgtttcagtcatttgctatgcctgtatgagaacacattggtttttgttttggtctctgcttcaaaccagtaaaaaaattcaaagagaccgaggttctatgatcatcattcataaccgtaatcctttgaagtattttaattgtttttttaaattatatatgtatatattatatatattttatgggatcttcaattctcgtagtccatttcccatttgtaaattgtatctgtatacgcacatacatagatatcactatcaataatatatgcaatccatatataatgggatgtacttacttgtagaaataaaagggtaagaat

SEQ ID NO: 62759 - DNA, 2521 bp, Cannabis sativa
tactaatagaattatttttctctcgaacaattaaagttgaaccaaaggtcagaaaaggtcgtggtcttgcatcaaatgctaaacttgaacaaagaaggagggacgctggtaagccattagagcttgaggtggatcttgaaactggcaaagtagttgggactgaagccagcgcttacgttcgatttatgggccagcaagtatccattttgtgtccaggtcatcattataatttttctgatgtaccccaacaatataaagatctcgtgcttaatcgaatagggtgagtgattttcaattatttatggttataattattttatatccttatttataaattaagttaaattttaaattattttattacatagtattattttaatattgacgggaatccccatcgagagctacttatggggactttatacgcggagatggcggagaggtatagtgagcgaaagaccaacagacacagatattttaaacaacattacactaaaccagaagattgggagaaagttcttcaattgccccctgactacttgaatacggagagttggaagcctatttgcgaaatgttcattagcaaaaaatttttgaaccgctcaagtaaaaacaaagcaaataggcaacagatgaaatatccaacgacgcaaggcacaagatcgttggcttcgatacgacacggatatgtaagtatgaatcctttaattgtaaaatataatttttcttataatatattataaattaatttatttgtttatgttcgtataggggggtcctcccggagagcatgcagttgatgcatggaaggcggttcatacgaaacagccgtctggcgatttcgttaatgaagttgctgcaaaagattatgtaagtgaataaaatattttattattaaaatttaaattttatattaattatatattctaataatttttatttaaataggaggaactggtaaaggagcttgataggaaacgacttgaaagacaatcccagagcgatacatctagtactgaatctcatgttggttatcagtacgacgttctaggaaaagttcttggcgaaagatctgactatcaaagaggcgtgggtaaaagggtcaaaggcaaaggaaagaagtcatttactcaaagtcagtcgacgatgcctcctccgccagctactgaaatgtttagcactatggcagaaatattctcaactatgcgtgacacatttgggagtgctttgacgcgtgaacaacgtgctaatttatataacccacggtttgagaactttattcaaatgtatagtcaatcgcagtcgcctggagattcgtcttctcagagttatgccgctcctccacaacatcaacaacaacctccttcgcagcagcaaccccaatcttttcctcaacagcaacaacagtctggtccgcaattaggaaattagttcttatatagaactccatcagagtctcctccgctcggctcaaattttattgattttggattatttgggagtttgtcgcaggagcaacaatttttttcgactcctattctcaaccaagatgagctgggaaatctaatactgggtttatcatcagatcagccgtatgttccttctccgccacggtcatcggaactcgtaatgataataatgcggatcaagactttataactcgagaccttaatagattttatggaataatttgtttatgttttttaataatttagtttaattttgagatattgtaatagaattgacgttaaaatagtttattttgagacatttttaaattattaataaatattattagagttaaattataatatttgtaatttgattaattatatttaaattactatttataaataattatttacataattattaatttttaatatattatatatatcattaatatagtattgtataattatttatataatattatttataaaataattatttttttatttttaaatgatgttagcggcagagcattagcggtggggtcctgccgctaatgccctttgccagttgtgaagtttgaaattggcagatggcattagcggtgggatcccgccgctaataattattagcagcgaacaccaatttcgccgctaataatagtattagcggctaattattagtggcgaacttttaacagggaattcgcctattgtggacgaatctggggttattagcggcagagtggtccaccgctatatatgttgtagtgtatgccactatatgtgaatgtgacttcataaacaagtaactagctaagagtagatagctccaagggggaccagagttacaaatattattaatccaaggcatgtttatgatatatatatatggacagtggttgacttagaatttaaattgaaggtgcaaaaagtaaactaaatattaaaaataaaaatatttgttagagatataattagtataatggaagaaaatcaagacattacaactctattgtaatataatgtaagaatcaataaagatataaataaatattacaatacataat

SEQ ID NO: 62760 - DNA, 616 bp, Cannabis sativa
  modified_base (493)..(504): a, c, t, g, unknown or other
aaaataatttccaacacatttgtcatagtgtcatttcctttcttgctttcctcttgagtaaccagatgaaagacacaatttacttcaggtaggggatccatgagaagcatgctgctccttgtgagtaagaatctgaaagtcccataagaaaggacatgatatactccatatagtgatattcttggattttcttaacaccaccacaagttcatccattgcagatgaaggtgggccgatagtgagacaattgttaccatatagtttttagtttagtaaagtacatactaacaccttgattatcctgctataagttcatcaacccttttcttaggttgtatatatgtggatcattcttttcatgaaattgaacctttaaatcataccatatggcagcagcagattaatcataaagaatgctagaggatatttcttttgaaatagtgttcaagacccaagaaatgacaatattgttattgttgggaatattttaccnnnnnnnnnnnntactaccaagtatgtttcattaaaatcctaatgtgaattactaaacaataaaataaacacatataaagtttaagaaaccttacattgggcgcagcggaatataatgactcct

SEQ ID NO: 62761 - DNA, 950 bp, Cannabis sativa
aaagaaaaatgggctttggtatacagtaaagagactttttgtgcagagatgacaactactcaaaggtctgaaagtatgaataatattataaaaaattatgttagttataagcatgatctactacgattttttcaacattttgataggcttataaatgattgtcgttatgaagagccacaagatgatttcagaacatctcagagtaacttgtcattgtcatttcttgctgaaatactgaaacatgcaacaaagatatacataccaacgatattcaaattgtttcaagttgagctatgcaatgcttatgattgtgctttgcatatttgtgatgaaaagacaatatcgacaaaatacaaagttactcctcatggaaagtcaattgattatacggttgaatatttttttgttgattgcacacttgtgtgcacttgtaagaagtttgagtttgcaggaattttatgcgcacatgctttgaaagttctttcttcaaagaatatttcaaaaatacctgataaatatgtattacaaaggtggacaaaacatgcaaaggttggaatcaaagtaaacacattgaagtctatcaattctgaggaccctaaggctagattgggattgcgctacaaagacttgtgtagaaggcaaacacaagtatcgacaaaggcagcagaatatgaagaaacatatataattgctttaaatagtttcaataaaattatggaggatgtagatgcattcttaagacaaaaagaaactaataaaattcctagctccagcaactcaaatgttaaaatattggcttatgatgggcttactatcaatagagatgaaaagaacattaaggttgtcaaatttaaggaaaaagtttgtggcaaatctactaggcctaaaagtgctctggagaaagctagaaaaaataaaaaaataattcaagagaatacatcccctgaaaa

SEQ ID NO: 62762 - DNA, 796 bp, Cannabis sativa
ctccttgcggtgtttccacaaagcctgacctagtgtacctgctgggtgtgcgaccatgcgaggatgaggaggcggattcaacgtcgttgtctcgcgattgaggtgtgctgcgagtattatgtcgttctggatcctcctccatctgggcctccttattaaggtttctcgtagactggtccctcgatgtgggttggttcaaatcaagttcctcctgattggccctacgttccctgcgagtacgattattacgacgtctagagttagttcctgggggttttctgtgcgagtagtaggtactcggggaggacgtcaagtcatgttttgtccgtcaacctcggcctccagagcgcatagctggtctctcacagtgccccgacctactccgtcgttgatcacgtctacgggaggcactctgcctcctgacagtgggacgttcataatcccaatattgatggattcgttgttaagacctctgtttgcttggtttccagccattatgattctccttctaaatcagcaataaagtatttctcgttcccacagacggcgccaaatgttgttgatggaattttacaacaccaaaataaaaaataacaataataataaagtaaggaacaagtgcgagtattcaacctagaatggtgagtactcgaacagggaacacgaacagtcaacaaaaactagaaatacaaagaacacgagggggtatagtgattcaatcaaatcacgatctgcttagtcaactgttgccaggattcagtatgtcccatttcacggtggatcactcctttatata

SEQ ID NO: 62763 - DNA, 738 bp, Cannabis sativa
ggtgtgaatttcataatgaccacgaacataccactccagagttcataacattaaggtatgaagtggctggactattgtgtaaaggtcaattacaagattttttatcaaacaagggaaaaacgaccgtgacagaagcagataagaggtcgacaacaccaccagagccaccttagcatactcgaacatgtaatgtcatcactggagggtcagaggttagcgtcgtaacatactcagcctctaagaggcatgcacgtgaaatagtcgggacagagggtaaaccaaaaaaacaaccaatagcctacagcggccagaccattagctttgtggacgatgaagctttagatttgcttaatcctcaccatgatgctttagtcatttctttatttatttcgaattgttttacttaacgtatactaattgataacagtagctctggtaacatcttgtgttttgaatgctcttagggagatggggatcgacaatgccaccatcatctgcaagtccatagtattggttggatttagtggagagtagaaacactcagtcgatgaggtcatactccatgtttatgcaaaaggagtcaacctacagacgaagttccttgtagttgactctccatcaacttacaatgcaatcctgggtcgaccgtagatccattccatgaaagctgtgacatccacataccaccaagtgatcaggttcccaaccaagtggggagtgaaagaaatatggggagcc

SEQ ID NO: 62764 - DNA, 747 bp, Cannabis sativa
caattagagtgtagggcattgtcgtttttggctgtagttgttattataatagccaaatcggtggcattgcttccttcacttccttgggaggttggcgctgccctcagaggctaactgtgtaaatactctaaaattttgtaatcaagcctgacgtacggaggagtttagtagtcaccaggtccccaaccttcaattgatcttccgagaaggccctatatcggacttctttcttgattatctcctccgtcctaaccctttgtgagggaagctctactacaaataaaaaagtgttagtccaagtatagaaattggcaaagtttaaaagcaagcaaaacttaagataaatcattagaatacctgggagttggaagcttaactgaagagatgacaccttgctagtaggaaacctggaggaaaagaaccatttttcttgggggtcatgagtgcgatccgttttgcaaacagggaagtaagagtccaagcatttatccagtcagaagaaccccagctttgacctatctgtcctcatagggttggccttgacactataaaaataaaggatctcctccggggaggaacctcaagtttattgattttgtagaatacgtaccaccaagccaagagccttaatgatgaagaaatcaactggaagggtgaaatcccaattttcgcaactaggtctgcaaataggttcttaagggaaggtgagccccactagaaatttgggacgaactccatgcactaaac

SEQ ID NO: 62765 - DNA, 683 bp, Cannabis sativa
gagaaggaacatatggttgatctgatgataaaccaagtgttaaattcgctagctgagcttggttgagaataggagtcgaaaaaaattgttgctcctgcgatgaacacctaaataataaaaaatgagcaaaatttgagccgagcggaggagactatgatggagttctatataagaactgatttaccaattgcggactagactgttgttgttgttgagccacagactggtgttgctgctgcgaaattttttggaattgatgctgcgaagatggctgaaattgttgctgcgaaggagattgttgttgatgttgtggaggagcagcataactctgagaagacgaaccaccaggcgactgtgattgactatacatttgaataaagttctcaaaccgtgggttatataaattagcatgttgttcaggcgtcaaagtactcccaaatgtgtcacgcatagttgagaatatttttgtcatagtgctaaacatttcagtatgtggcggaggaggcaccgtcgactgactttgagtaaatgatttttttcctttgcctttgaccctataacccatgcctctttaatagtaaaatcttttgccaagaacttttccaagaacgtcgtactgataaccaacatcagattcagtaccagatgtatcactctgagattgtctttcaagtcgtttccta

SEQ ID NO: 62766 - DNA, 723 bp, Cannabis sativa
gagagactacattcttccaacattaacaacggttcagtcatgcatcagaccaccagccgtggaggctaataacttcgagataaagccagccatatccaaatggtgcagtcgtcagtccagtttggcggactcccctctgaagaccccaatttgcacttgtccaatttcatggagttatgtcatactttcaaagtcaatggagttagtgatgatgccattcgcttgagactattcccattcttggtaagggagcgagccaaaagttggttgatctcctcgccaccgaactctattacaacatggaccgatttgggaacaaagttcatgtctaagttctttcctccagcaaagtctgctaagctgcgaggagaaattaataatttttgtcagctggacaatgaatctctccatgaggcttgggagaggttcaaagatctcatcaggaaatgtccacatcatggtattgaaaagtggatgttgctccataacttctacaacgggctgattggtaatacaagaacgatcatagatgccacagctggttaggcatttatgagaaaaagtgcaaacgaggcgtatgatctgctcgaagaaatggttatgaataaccaacaatggccaactgaaagaagccaaacgaagaaggttgctggtatgcacaaggtagacgccatcgccaagttgacagcccaagtggatgccttgacgaagttgatgactgct

SEQ ID NO: 62767 - DNA, 699 bp, Cannabis sativa
atctggtttgtctttttagctgttagttttgggcattaaaagagcacacattgaaaacaattactctatgatccaaactatagtaatctagatggtgagtaatgatatgattaaaagttaaaccccatagatcattaataaaacaccaatctagtcttttctttttttttttatagaaaccaccgcgtgtcgactcttaatccaagtgaaaggatcccttttaaaagattgctcatttaaattgcaattgtcaagagttccatctgagattcattttgcaaggctctccctagtttgttttaattggataaaatttcatttaagtctccaataacaagccaaggagacaagggtgccacatctttaagtttttgcaaaagtgtccaggtttgaactctttgttgagtagatggggttccataaaatgcagtaaaatgctatcttgattcatttccaaaggcaatgtaacagtcaaacatgtttatattataactaattagcaaccaaccttataagatgttatcaatgacaacttgttagttttaagagcatttcttataaatgtggtatgtgaatattttttatcacttgtttatatagttaaactccaatgtagtgtataatgttggctaaattttacacatagtaaaagttgtattacattagacataaaatataatatgaacaccataataaata

SEQ ID NO: 62768 - DNA, 910 bp, Cannabis sativa
aattttgtatatttatattcatgtaaatattgatgctaaagaagcaagtaggtctttaaaaaattgggcctaaggaataacaggccgacccaatattggcctcaaaaagcccattaacaaagctaaaccctcaaaacccaactcctttttataatcactacggtcaccattctcaatcgataaaccctagcaaccttctcttcgtttctgtaaaaccctaattcctcagcggcttcagtctcatttctcttcaacgaaaatgagacctccaagaggtaattaattaatttcactcttcccatttcgattattatccaataacccttttgtattgtactaactgttttgattttccaggacgtggtggcggtggattcggtggtggcggcggtggattcaggggaggacgtggcgatggaggaggtcgtggaagaggaggaggaaggtcatttgggggtggaagaggaggacgtgatggtggccgtggaagaggaagaggaggaccaggccgtggtcgtggaggaccaggtggaatgaaaggtggtagtaaagttgtggttgagcctcatagacatgagggtgtgttcattgctaagggtaaggaagatgctcttgttactagaaatatggttcctggtgaggctgtgtacaatgagaagagaatctctgttcagaaggaagatggaactaagattgaatacagggtttggaaccctttccgttctaagttggctgctgctattcttggtggtgttgatgagatttggattgtaagtatagcttttatgatttgggttctacttatacttcagtaaagtttttatcttctatgaattgggttctgtttattgttctgtaaagttttaatttttattggttttgttgaatgtttgtaatgtagaaacctgga

SEQ ID NO: 62769 - DNA, 1069 bp, Cannabis sativa
ttggtgcatctattcgccctgcgatccttgtgtcgactccgtctctgccttcacctccagtcattcaaaaaccttgaacgtttcatggtaaggctcctccactttctaaaaggattagcccaccaactgtgtctaaacaagaaactcgttcatcctcgagtctacattccccttcatcacctgttcaggctccatctttgcctaaatcaaaacccataggacctcctcgtcctccatctaaggtctatattccttctcaaaccagtgaaagggttcacccaaaaagaaagtcttctcgtgataccacgtacaaaccacctgaaaaaaaaaataaagacaaaacccagtccagttccatctgtagtctcgtctcccaaacagtcgtccaaaggctctaaaaaatccaaacttcctaaagcccccatatcaactgtcgacccagcctctgtacaatgctttgttgatgcctccaaagcatctgtttatcaaagatggtttggtagtcgtgagctttggttagaacaagtggtcatattagaagattttcctgaactgcatgagcttttaaaactttggaaatgggtaaacacggtcactaacttgtctgctcctcatcccattttagttcgagaattctatgccaacctagataggactgttattgctgagggtcatccacggtgtgtgagtgcatttgttaggggtcatcgagttccattttgtccattgactattgcatgcatgttgaaagttgagtccatcaggaaaccaacatatgggaaacaattcaatctagatcaaactttgatgggtagagtgctaactggcagagatcactatatttgggacaaacaggaaattttagtcactcatctgactgccttctatagggttcttcatcgggtagctttgtacaattggttccctaattctgatttgtcatcagttacacttgagattggcaagtttttgtctgctgtaggaactcatgtgtccattgatctgccatctctcatatttgaaaggatacttgaagcttcagaaactactggcactcgtaacaagctac

SEQ ID NO: 62770 - DNA, 764 bp, Cannabis sativa
ccatacactccccagcccccaccttcttcctcctgcccagaaaactgagccaccgtccgaccaccccatcgcctcctcgccaccacccgaccacctctgttaacctccagttcgaccccgtccacaccagaaaaccacctttcacctctgcccctgcttcgattctccagaccagaccgcaccccacgaccagccgttcctctccaatcgccgccccacctccgtcccccagtccggcgaacccagcttcagccgagtcgaacccgactcccctccagaggctatccgccccttgctccgatttctcaagaacctcacttcaccagacccgacccccctctctttgaccaccgtccctcaccccgtctccagtagtccaaaaccaccatttttagttggtgactgttgagtgggaggagcttccacattgtgccgactttggcattgcattccttggatttttgttgtggtatgatcattttcttttattttggttggtgatattgttgggatagaattctgctctaacttattgtgacaataatattgaaagtgctgcccaagtttgcgtcatgatgataattttagtgttgggtgattgcattttgagactctatgatgtttagaggattgcatattctgattttgagtctattggtggatattcaagttgaatgattattattgtcactgaaatgtgttgatagaatgctgaacgtgatgtgattaattttggttaataatattctgttgagttgtgcatt

SEQ ID NO: 62771 - DNA, 893 bp, Cannabis sativa
aagaacgaacaaaacccctaaagctacacaaatcatatttaattctttatcaaacttgaaataaaatcataaattattaatatggtgatcaatcaaccacaaaaatactgtctacttagtttgataaaaaaaatatacaaaaatttattattttatttgtctattttataggtttcatacttaataaactataaacttttatgttactatttaatttatactgtaacttcttcattttctttaacaaatattacaattgtgctttgattcttataaaatatttatagatgagttgagaagttcttccattcaagaaaactcatggaatagtctaagacatgttgtatcatcatagatcatcagtattagtaaaattgttttttttttaaaaaaaaaaaaaaccactgaaaaattagacaataattatacatgttaaaacttgttaaagctttctaaagctaacaatcaaataaagaatcaaaatacaaagtgtaagactattttctatggaagatataaaaattgagctatattcgacacaaaaaataattttgtaatatttttacatcaacttttattattgtaattcattgtataattataaattttaatacaaaatttaacatattattcaatactcacttaatactttataaaaaatatacaataataataatgtaaaggtaaatataaaatttaataataacaatacaagttatttaacaaaaaataacatattaactaaaatttacaataaaatattaaaatttgggtaaatataaaaacattgtcatgctatattatattattacaatttaaatttggatatatatttacattacaatttgacacactattaaaagtctaggtataatttatattttgagagtaat

SEQ ID NO: 62772 - DNA, 2045 bp, Cannabis sativa
ttataaatacagtattacaaaatgttgacctaattcttttgatttgatgagatgagatgcaaaactttattctagaaaccagggcctgataaacagggaaatctttctctgctagtatgaagttcatcgatttgcttcattaaaatgtcttgtagatttgaaaattaagtaaattttaatgtttgtttttcatcattttctgggttaatgcagttatatggcttataggttcgtgtattgggaaaaggataccagtttcttgcttctcatatgatttttatgtgagttttcacatgcaaggctattttattttccccttaattattataatttatgcacgcttatcattccaatttcgagtctgtgattaagtacctacaagaactcacagctcaagcaaagcaagatgccaatgctaatgagtccaattggtacccaagggaggaagaactggaggagcccacccataatgctaatgtatgtatttgtcccatgaactaccaaagccacggtgagtgtcaaaggcgccagtgatagtggtgcatggaggtgattggccctatcccttatgactcgaacccatatactttatatatatttatttattctgttatggatacatattatgtatataaatacatagtgtatatatagtatatacacactatacattataatttaattatttactgtaaataattaaatattattttaaaatatttatttgaatttaaattctaaattaacatattagttattttatttgaattcctaattcaaatgaataactatcttaattatttattattatataataaaagagttttattatttttaataattaagacaaaataataaacttttgagggaaatttattttttaaaatttaatttcaaattaaataaatataattgattttaggtttgaaatttaaactcaatcctatctataactatattaagacaaaagttgtcttaacccaaaataaaataataaatgttattattttaagaaaaaatttatatgataataaagttaccttaaataaagggtctatttaagaataaactaattaaaattgttttatttaattgaaagggcttaaacgatgtcataaataaaaattttatttaagaataattaattaaaaatattttaattaattttgaggcttacgataatcctacaaaattataaaaatgtccttgcagtgatggagattagttttgtaatttattttctaattttttcaaaggttgtaaaattcaatatactcaattattactctttcatcatcactatttatttattatttttttaataattattcattaatagttgattaataatatgctcatgtattagtgaataacatgtccttcatagaaatctcacacaattatattatcatgcatctcatagtagaagcatgatatattaaaattatcttatatgtttatgtgtttactattttgaaaccgaaagcatgtaaatattgttagattaatttagagttaacttggcaattcaaaattagcctatttgtttaaaatacttttattatgaattaaataattaattcaaatttaatgattatgatgagaaatttatttataatttgaggcttttattataaataaattaatcataattattaaagtgattaatatgtataaattctaggaattaataaaatagacacattaaccaaaaatagtgagtgggagaaggaggagatgtcaatggaacctacgacctccattattggtcaacactgaaggagtatagactagccttgagatagcttagattttatcccccaaaggaatgtatgtgtctatactattgttcaacgttgatctcttaactaagataagagaaagtgatgtattttagtgtgtacggacccttaaggcagtgtactaagttaagtcatgaaatctaaaataatgggttacacttacaaagtacaaccaagattcatagcggttagttgttaacttagtcaaaaagcagtacattatattttgaaaatgaaatatga

SEQ ID NO: 62773 - DNA, 706 bp, Cannabis sativa
  modified_base (105)..(107): a, c, t, g, unknown or other
  modified_base (595)..(602): a, c, t, g, unknown or other
atctgagtggaatgagccattaatattctgatgcacccaatgtaagttttttaaaaactttatatgtgtttatttacattgctttagaaattcatatttaggatnnnaaataacatacatggtagtaaatcaagatcctggtaaaacatattccaacaaaatggagattgagggggaggaagaagatgcattttgacaactttgaggttattgtattttacaacgaatacaaatgtaacttgaatgcgagacattcagatcaccatcaagcagtaccattggtgattgaccatcttattaaggggaagtacacccaagatggaactaagtacaacgctaaagatatacagagggacatgtttgacgtttatggtatccagatgagttatgtgatggcggggaggtgcagggagaagacagttatgtatgctaggggtacaccagagttttcatacatgaagctacatatatacttgttcatatgtttgaatagaagaatccagggaagcaattggggtggttgagaacttagtgtttgtgtcagataggcatcaaagcattgaccatgttgttgaacttattttccccgaagcannnnnnnntgcatgctatcaccacattgttatgaacgggaactccaagttcaagactgatacttttcacaaccaaatatataatatttcttactcatggtcgaaaactgaat

SEQ ID NO: 62774 - DNA, 606 bp, Cannabis sativa
ttgcctgattaaaatgtacaagagatctaaatcccaaccccctaacaaacttggattgacaaatagctccccaatttttccagtgaagtttagaagtatcccctgaggaaccccaccggaatttagaaagaatagactcaatatccttacaaagtttggtcagaagtctaaaacaggacatgtcataagtaggaatggcttggagaacagattttataagagtttccttaccagctctagaaaaccacttatgatgccaagagtgaatgatagcagaaattcggtctttgagaaacacaaaagcaggatatttagacctagacagacattgaggtaaacccagatattttgtaataaaaggccgatcctctaactgaaacgtttaaaaaagagattcctaatatcagtaagagtatttggtgaaaacaagatagacgatttactaaaattgatcatttgtccagatgccttggaataaagagcaagagcttgattaagagcagagcaagaagtgcgattagcagatgaaaaaagaatgctatcatcagcaaacaaaagatgagaaattgaaggagcattcctagagatagaaagacctctaagaag

SEQ ID NO: 62775 - DNA, 4461 bp, Cannabis sativa
ggcataaaacccaacaaattgatgagttgaattggatagaacttgcattgtttagcctttgaggtgaaatcttaatgatgtgtgctttgaaatatgatttaggtaatttttgaaatgtttgtgcccttcaagcttacacttatatgatttttcttagtttactcttttgtgccttgacttgtttatctttattttaacacatatatgagctagaaatgactccattattatcttccgctgtccttacctaagcttagcacaaatttggggtatgatatgtgagaaataaaggttatttataagagaattcaagaaaaagagttatttgcaactactaggaaaaaaaagttgaacaaaaaaagaaaatagatataatatgcaacttgcaattttagtttttcaatgaaagaggaagaaaagaagaaagagtgttgttgtaatgttatcaaaaaaaattctttcatgtgcttcaaaagaaagagaatttcgggataatatttgaatgtaatggggagagcttattgaaatgtaaaaacttatagtataggtgagcctaaatgatattttccatctacctttacctaagcctaaacgttaaagcccattatattatttttaattttgaaacatatgttgttgacaataatagagaatgttaagtgatacaagcttattgatagttagtttgtggatttatttggactgagttgatcatgtatggtgatgtccaatagtttattttttatttaggaattatattcatttttctaattttaaggttagttgttggagcaattggattgaaaatttggtttagcaacagttgagtcttgcaagtgatgatagtgtggtgtgaataaaagttaaggtttaatttgtttgtctttgttcatttgtttttagtttagtgtcgatgtttactcgatggtgagtaaatgttaagtttggagtagtttgataggctagttttaggtgcattttatgaagtgtcttagaggggtgtttcagttgattatattcattttgtgcagaattacacttattttgtacttgtttcaagtttaaatggtaatattcataagaagaaatatgttaagtgatatgaatatgatgagtttaacatgaaatttggagttctaagatataatgggtgaaaaattctaagttttggatgctcaacatattctgtttgtgatcgaaaatcaagtctgaagtttcaagctaatttttgactattatgcgttcactttcaagaacaatattgtgaataaaagttctagatctctttttcagcttcccagaacatcttgaatcatctaattttgagcaatatcgaaagagatatggccaaaatattatcagtcgtttcactaggaaactcgttgcccaaaaactaagtacccaggctgcggcactgaaaggactatgtcgcggcctgcttgcttttagaggcccattcaggttttcaaaccctgatttcgtaaattcatgggtttttatgaggcaactttggaggcacaaaaattagagagaaaaagggtttcaagcacaagcattgttctccattagttcttctcatctatcttttatttgatgtttctaatttgttatttgcaattgtttagaatgattattatgagctaaactcataattaggatttttaatggatattctttgatacttgtctatggtttagtacaattctagtttttcttcaatttcttatgtgcatctattttatttgtatttactttcttttattacttgaccactaattaattgtttatgatttcaatacaaaatttgaaaagtgaatgttgattattctatagtaaaatagacataaatttcgatattggacgaaagtactatggtcaatttagcatttaggattttatggttaatatcttctatatgtttaaatttatcacaaaaaaagtagaaagtttgcatatagattgagatttatatgttctaacccaaatataagtttctttagtaaattcgatatcatatgaaaattaaaatttgaaattaaattatattaaaacacagaaagtagattctattaagatttatcaccctaacctctgatcattgttaattggattttaattatttgttttcttatcattagattttaaactttctttgttattattattgtcaccaagtagaatttaggaatttaatgtttggcacttaactatagtctttgtgaaaacaatattatacttataattatattacttgattcgactacgtttatttgtttactagaatttttaaggacctatctctcctttgttattcgtccttgtcatggagtatttgactactctgattacaaactaaaatatttttttagatatcatcattaagaacctcaagctgatcaatctttattttgcaaaggatttgatattgttctataaaggtaacactgccttggtatcactcctagctgaatcttttcagctgtttagtcactcttctcgtctgaaagaaaacataatagataaatttaatatctattttgctggtattagtgagtctgagcagaagaatttacaggaaatgttgccttaccgagagggaactttctctttggaacacctgggagttaatcttagtaacatacctgggctagtagacacttaacttttactaggagggcactcctcattaattcagttttgataagaataaaaagtacttattggatgagtatattcttattgcctcagaaagtttctaaggacataaattatgtaagaattttctttggggtgaaaaaagaaataccagtaaaatccatatgacatcatgggagctggtttacaaactgaaaaataagtttagtggattgagattttgagaaagttcgaaatggaataaggcatcattggctaagttcctttaggctataactatgaaacaagatgatctttgggtaaaatggattaactgtctctatttaaaagaccataaaatttggtatcatgaagctaaatttgatgtgagctgatattagaggaattgcttttgaagctaaggaccactttttctatagcagaaattgagatggttggcaacaatggaaagtttattgtgagcaaggcatatgactccttgattgaagggggtattggggtatcctaagcatgattcatcttgtgattggtaatttatacaaatcttcttactcgatacaatctaattcagaagaatgtgtatgttgaatttgatatttgccaccaatttgtgagatggacttaaaaagttatgaacacttgatttctcattgcattttctcttaaagagtgattctcgaaatcagtaaattaaatgattaggaagccatttttggcattatcaatttgaagatttggtccgcttgatggaaaccaagagaccaaaacgactaatatcgaatgttcatgtatgcagtttttgctggaataatgtatggtatatggataaattgtaatttgtatatttttgaaaagaggtgcttagctcctcattgaatagatggtttagtaaaagaaaatttaaaagttagattgagtcttgtaaataagagaaagttgagtcaaatcataacattgttagtttaattaatgaaatttattatttatttatttattttttttataaatgtcaaaagaaagagatttcaatggtgaccattgttattatatatataataataatttttatagtaaaaaaattatcaatacattcgctcaatcgcatacatgttatgtaagaacacaaagagtttcaccttgggtcgaagtaccaagttaaaaattgaacaaggaagtctctttctctcattaccaaaactacaccgtttaataagttgatattatataagaaagattgtggaaaatgatttaaggatgacgtggagaaactttgtgagttgagttttggatggagagtggtgttaggtggtcaaggtagcaaaatatgtgaacattttttgattaaagtggcttttgttggagagagttaggtgtgcctatattgttgatgttctacatcattttcaacggtggtggtggtaggtgagttttgggaactagtctcttctaccacataatcatattatattttcattgcatgttctttttattcccataaattattgtaatttttacttcattattattaatttttattatttaatataattggcctttcacatgggaccctttttctttttcccccttttgtacttcttaattcttatctttcatcaagtggggcataatggctggccaagttactaaaaaattagataatcatgaattgacttccctctttagagtgtaaggtgaaaccaacacacttaatcaatatgtatataaatagggcgatgtgctaccatatatcttactcctctcctcataattttgatcatatgacctagtattactaaggtggtttgg

SEQ ID NO: 62776 - DNA, 1209 bp, Cannabis sativa
caaaatggtatttacccttattagtacctacaattaaatataatgtcttatatattttaattttacaactattataaaatattaataaacattcactcactactactggtgccgaataatcatactctatatattgacttaagagtgccgcttggcttgatctgatcctcatccccatgtttatcttttatctctagattttttttcattatgtcaacctagctagttagctagggtttatatcattctaaagagtacattatagaagtatttggtccctaacattattataaagtgacatatcattcgttgttggtacatataattaaatatcattattttaatttaataatttttatgaaatatcgattattattcattgaccagtactaatgtcaaataatcgtgctgtatatattggctcgggaggactgcttagcttgatctgattcgggcactgatgacatagattatgcgcttttgaatctaaaaagtagttttgctacaatattgatctactaatgatctcatcataggtcgtgattaggaatactatttattttacgaataatgatataatgatatgtgtgcacttaaaatatgtatatatagtatatagtataaattaattatatattatattattgttgatgattacttaataataaggattatacttaattttattctcccttaattagtagagctaaataattcattcagtctgaatttaattgtatattgttttatattgaatgtttaccaataataagaataattattaattaattaagttattataaaatcacgagtgcatatatttaatcatgcatcgatatgaccgatctcttatatatatttaagatttgattaaacagtctttgggattctcatacatacatattatgtattcttaattattaattaatttaattaattatcctatttatttaaataaattaattaaacaggctattttcacacttgattattaatttgaacattaattaaattgatactagaagactacaacaatattaatgctaaaatgtattaatgttaaaatctcatatatagtttaatgtactgaactaatgcccaatgataatataatatatataattaaacaaatcaagagagactagtctactccagattccaagttttttcttgacattatatatattatatgaatattctttcaaaaaa

SEQ ID NO: 62777 - DNA, 1199 bp, Cannabis sativa
catcagagtagacgacgacgagggcatgtggttgtggttttaggtttgggttcgacagcaggagttttgggtcaaggttcaatgccgaagagtgagagaggggctttttttgaaatgtaagagtatttttgagaggaaaatatattaaaagtgtagataccctatttctaatttagcaatatattaaaagatcatgctttacatttaagcatgctaagtcaaatttttttttttcatatgtgcaattaattattttgaactatatcataaaacaattatatattttaaactctatttcaatatcgtattaattaaaatttctaaaaaattggtaaaatgtttgctataataaaaaatacactgtcaaataaaaaataaaaataattctttatactaaaaattagctcaataataaaattgtatttcgactttgaattttttacaccagaattaattcagtcttaaaattataactctgctagtttacacaattcctcctaagttaacaatgattcctttctttgattcatgttctcgagctggtaagtgtttctgagttgtattctggtagagtttcgattggtctagtgtgattaagaatatgttattcttttttgaatgatgagatcctttatttataagccggaacgtatgtcatgttatttccttcttctgttcagattgatccacgtaaatacacccttcttatctccttgcgcgctttttcttttttgctatgcttagcaagttccgctcttagttgtcacaagctcaagtcaactcgcccgtcattttttttttcttttagtaaaacggtgtatttattcctgccacattatattattaattggctattatcgtaaaagtaaaattatttttatgccctaaaaattttttaatccattacaattataatttttctaagtgtaaaaaataagaaaacttgctaaggttgtagcaaaattgatgctcatacttaaaaatatatttgtattatatatagagaaaagttattaaagtttctccgttcaaaaattaataaaaattaaaagtatagaaaaaataaataaatgtcacattttgagtgagtattataaataaataagggtaaatatcattttagaccctgtgttttgcaaaagttacagattggactctgtgttttattaaatgacaaaatggaccctgtattttttaaa

SEQ ID NO: 62778 - DNA, 1026 bp, Cannabis sativa
ataaataacagcataataaattatttaaatagctataaataattttaataattaatcataattaactgataatttccaaattaaactaagcgggctttacacaatggtctagttagatttggcatttgagcaattgaaaccaacgcaccaagttgattgtcaacttgggtgttgggcccagcactaggtcaccttggcactaggccctgtttcgagggtcttaagtttttattttatccttgtgttttcttaaatcttcattatttctgatggcgaaaaaaattctctaacttttttaagaacattattggaaatggcccaggttgacaatatgtcaacctgggcactgggcccagtgctaggtatcaacttgggcattgtgtccccattttggccctttgaatgttccatttggtctaaaaaatagttgaatcttagtattttaggaaaacagagaatattttgggaagatttcttggaaaaaatcatcgaaaatcaacctgggcactacgcctttcttttggcacctaaaaagtgttatttcttccccaaaagtacctatttccccatttttcttacaaagatgaagaagatgcaaaagtcaaatcgtcaatctgatacttggaaggcatccaaattgacaaattgttaacctgggcgttgggtgcctgggcactgggtgttttgggtgctcaaaaataaacttgctccgaatctgattatgatgcctcaaacatgtccatggtatgcctagttgatgtcacaatgcaagtttggacccatttgcactaagacagtcccaaaaattgaaacccttgttgggaatgtcaacttgggcattgggtcaaaccttaggtgaccggattgccttccgaagtgcaggttcgtgttattttagctcccaatggcttggatttgattgctccatgtcttcatgatgcagaatgttaattccattttttgcatatttaattgacaaaaatattttattattctttgtatatttcggctggcatatattgatat

SEQ ID NO: 62779 - DNA, 2980 bp, Cannabis sativa
agaaaacttcatgtcacaaagctataaagttttgagcgttttatgatgaaaaacacttcaggcatatgtcgcctgacactatttcaaaatactcatcaaaaatagagttttgtaactcctttctaccctttttcaattttcaataatatttctaactcatttttatcacttaaatgattcttataacaccctttaacaactatatgatgatagcttttaattccataatcaatttgtgtaacagctcacttaattacacttgaaatctgatcaactaaaaagagttacaaatcattaactagttataacttcttttccatgttacaatattaagagtttaaaataaactataaaatacataatttatttacccaaacctataatatatattatttgctcaaaaaaaaaaaaaataatatatattatttgcataataatatttagagatgttcattcaatataatctgtacaaatttgctcattatatatttgatccgcgctaagtacgaatttcatattttagattcaatctaattcacacaataacttaaatccaatccaatctaattcgtaaaagtgtggattgggtcagttcttttgaattgattattttttaatattaaattatttaatatttatttaaaatatttttttttacataactaacaacaaaataaaacaaattattattgttttatgtctccaataataaattaagataaataaaataacaaattcaaaagaataaaaaattatatgtaaaagaaatgtttaactttgttttaaattacatgtaagaaaattattaaactaaaaatcaatcaatgattaagaaaattaaattatttttttcaaattaattatacatgtggcattgacatgatattaacacgatagttggctaagcattcatgccatcattttgatagttaggtgtgataaaacttatgagaatgatcaatttacaacactccgaataatttatgaattatttttaactgaaaagttcagtgagaataataatacataggtcacaaactcataattcggggtgcaaaatagctttgtccctaagtatcactatcaccactactactaggaaatttcctcaaagatgatgcactatacaaaagattgttaatgaaaactagaaaataagatttacataatcaagagatgaaagatgattagtactatagccactaattacgcttaataggatggtacatgtagtgaacacaaagaaaagaggctgcaaaactaacactaccaaacattaaggaaattccatagcttatgatagccatgtatccaaagaagaatgagatttgcaaaaaaccagaccaatgtgatttcacatagtagtagtatatgcaaaagcagtaaacatataatccaactgacccgccccgaaaaaacgacctgaaacataaaaacaaacaaacaaacattagttacttattcttatgtcttagtttcgataattttttgcaaaatggtctccgatacacttagatagctggtccaaaaatttcaaaagtggtcgaaatatttagacagctgatcgaattttggagttaggccatttaaaaaattatcaaaactaagtcaaagtacaaaatgacttgaaaaaaaaaaatcattttggtaattatttttacttttattctcattctcattcatcatagtaaacttaattgggctattgctgaacttttcataagaaagtactattatcagatcagcatcatggcataaatacttgtatacacagaatataggcaagtgacatcttctcaatcagttttcatccgatctcaaatctcaaaagcatcatcctcatcctcatcatcaaatataatgccaaaatttaatcaagaaaagttgaaatttcaacagtggagctagcaagtttcatgcttttatataattataagcaagaccgatcctgagaattatatgagctaagagcatttaaatgttaggatttttatttttagaaatatataaaaaaatattaaaagagtgttatgtgactaaaattcatgatattatgtaatgtgtcattcacctgaatatttattatttataatacatttaattttacttaaataaaaacctaataaagaaatatggaccctaagcatgagcctagcccgcctatgcttagggttcgccttgttataagctttgttaaaatgtcataacactaagtgaacttgaaaaccttaatacacctaatttgtattccttgtcaattgtaacaagtttattacatgaagaaaaatttaaagaagagaaataaaacaagtacatataccataaatgattaacaaaaatgtagtaaaaggaaaaaaggcatacctccaccaccatttatgatcttcagctagaaattggcgacatgtgagacaagcattgactaaagcaatgaaaaacagaacaagaacaaaggtgataaacaacaccttgtaagagatggaagttccatgaccccacacagtactaattgcaaagaaaagctccaagtacatgaccgaaaaaggcaaagccccagcgagcgctatctgaggcagcgcgcgcctaaaccatggaagtgttggaatttctcgagctacactcgaggttgttagaggatgagctagcaatttaaccttgttactcgggcaaatcggttgcaactcggccttgttgttgcgctttccaaacatcccaccaagtagaagcaatgggaatgaaattaatgaccaaagaagagatattttcatgattgtgttaaagggtagtgctgatgcagttgccttataagctgtggctattgagttaagaaggcagagtgtgatgaacaatggtccagaaaaaaggcattctgtaaggaggagatttcccaactgtcataacagatttggatgaagttatattataatgttatatagagaattttcaatggagtgtcaatttttgtaaaaaaattcctctt

SEQ ID NO: 62780 - DNA, 775 bp, Cannabis sativa
ttttgtaaaattttgaaaaattaagataatttacaatataaaaattaatgttcaaacagtctattttatacgtgtataaaataaaagagtcacgcatgcaacatactctttaaatcctattttcgatgtgttaaattttttgaatttctcaaaattttgtcagatgtcttaaataactacaatatatacgaccataaaaaaatttgacataaatatctttttaaataccaaaacaaataaatttcaagatagtatattgtaaaaattttctatatatacataaagttgttttttcaaaaaaataatattattttcacgttgtaataatattatattatattatattttcgcactatgagataagtcttagaagttgttcaaaatttttacaataattatcatataacacattaattaaattatgttagatatcataagtaacctttaacatttcttttaatcactaccttaaaagtaaaaaagagctaaagtcaatccatttttaatgagataaaaatcttcaattttttatagaaatatcaataatccaacactaagatatgaatcttatctggtataacttacacatagtcctcaaaatattttaagatcaaaacattatatcaaaaaaacaaagcaaaaaacaagtctagggtcacccatttctgggtcctgacttagccatcgagtgtggggttcaagctaaatcccaaagaattggttggaccagggcttgtttggggctcactagtcactactgggtccagtcctaata

SEQ ID NO: 62781 - DNA, 857 bp, Cannabis sativa
gagtaggtcatcacctgctaactaagggggtcggacctctataaatttttttgtctcatttactttattgttcttgttgtgtaatacgcgacaaacatcatatttataggacctcgctgtcgattaatcatttttcgaggtcaacacataggtttataaatttcataaacaaacatgattctttggtctcaaagaactgaggatcatacacaaagtgtagtccagcacatctaggcaaaaattgtaaatagattgagttttttttagacaacgccaagtaggagaaagtaattaatattcaatgctactaaaaaaaattattttaagtgacaattttttagtcacaacataattttttttttgtgactaaatgtgaattttagtcataacaaaaagttatttgtgactaaaacatagcatctagatataagtagctattttagttttagccacaacaaatattgtgactaaaaacacatttatagtcacatacaacaaattgtaatttttcgtgattaatacgtttagtcacaatataataatgataattaataattagttgtaactttttacttttagtcacaagtttcgttgagattaaaagtaaattttttgtactaattgtataacaaagtttagataaatgattgctctgtaggttgtaaaacttttttaatgtaataaattgtattattaataaaataataaaataaaaaagaaaaaaaaaggataacaagctaaaaatcgaaagtccaacatcatgacccataagataagattgtatttaattaaatttttttcctatatatgtacactgtttttaaatatgtatccagaaagagataagtttaatagtt

SEQ ID NO: 62782 - DNA, 650 bp, Cannabis sativa
tataatttaaaaatctttctaataattttagttaaaataataatatttattacatagtttgcaaaactatatggtataacataatatttttaacaagtcaaaaaaaaggtagagcataacattttaaacagtcaagaaaaatggtagattatgtcattttattagtcataacaatatctacaacaacattgagcatgatattaaaacattgtggtttaaagtactagacttttcacgccacaatatttaaccacattttaaaaatattattaaatcattattaaaacacatttgaaaagacattgaaacatatttttgctacagtagatcctactattataattaaggataaagattcttacatatataattatggataaagaatatttagtgttttgttatttcaaagttgatttaaaacaatgattattgaatccgcgtttagtaatattatcaacacatacattatgtgcacttttaatttgtcaacatacttggaaaaattcaaagttgaattgatatacctagggcgaagatagaaataaaattaaagtggagtgattgattatgtatttttctatttattatgtggatatttcaaaattttaataaaaataatagaattccatttaataaaatgtaaaataaag

SEQ ID NO: 62783 - DNA, 808 bp, Cannabis sativa
taccaacttatgccattcttccaccttttccaggtagattgaaaaaatctaggaaagaggagcccatcaaggagatttctaaaactcttttaaaagttgaggtaaaaatctcatgtctttaagtaatcaaagaagaaccacatcgtgctaacattcttaaagagttgtgtccaaatgagaaaaagttgaatggtggtgagaaaataagtgtgggggagaaggttattgttgttctccaaagaaaggtgttgcctaagacaagtacaatttaatgcacaattagtaaaaccaggtttgatcattgcatgatagatttaggagcaattattaatattatgtcttattctaatttttcttctttaaatcttggtccattaggagaaactcatgttttaattcaattgactaatcagactaatctttatccatcggatagttgaagatgtttttgtgcaggcttatagacttgtcatgctaggtgatttctacataattgagatggaagatgagggtgatcccaatcctacatcaattttatttgggagacccttcttacccactactaagaagttagatatgaaagcatgaatacctacaatggaattcgatgatgtagtaattaagtataatgtattagattctattgataggtacataaggaatgagtctttgttagaagacccgacgtgaagaccacacgagcacaacatgcagtcgagctaacgacgttaaaacaaagcaaacttagcgaagtttttcttacccttttctttttattttgcattaattttatttaattgagccttga

SEQ ID NO: 62784 - DNA, 638 bp, Cannabis sativa
tttaattacaacttaaataacattaagattggtatataacaatttcacccaatcttattatcatgtaattaattaaggataaagattattatataacaactcaaaaaaaaaaaaaagacattatgtaatttaaaaaccttaaaatgaagaacaaattataaaaattattctacaaaaattatatttattcttaattatgcaaaaaaaaaaaattacaattaaactctcaatgcatggtaagatataataatagtgcatggacctaaatattaactatttattgacattcacactttttttatacaataaatcacaccaaacacaatatttacttatttatcaaaacttggtttaataaaactctagcaactcactcttaaattagttcttataattaattctctaccacaaatcttcaaaaacaaaaatatttcatctctactaccttatttcttttcattttttaaatattctaatcctttactaccctttaatattagagtacaatatcgtcatttataagaacacgaattactacactcattgccaattagtttttgagatagacccataatttttttttctcacttgaaaacaaaatagtataataaaaaaaaaattgtgaaccattattgata

SEQ ID NO: 62785 - DNA, 699 bp, Cannabis sativa
accacgaccaccttgccaccatctacccttctccacctccattcgccgaaaatcccattatcagaccccaataacatttttcctctcttctttccccaccatcaccaaacccagaaatcaaccagcctagaaaaccctccatccactttactctcatctcatcatcatcctcaacttcttttcacttgaaacacaacctcatcaccatctccgcatgaaccaagtttcaccagtcccaacccgcttcgttcatcatcatgttattaaagtcggcaaataataataataataatatcgtgtattattttggagaaaaaaatcaaatcatcgctagaaaatatgagagttaaaaataaataaatagtaattttatacgcgctatctcatgttatttaaataaattttttacagctcagcgaaaaagtgattctcacctaaaatttttctttatatattgttatattgttatgttatttgattttttttttcgggtttgttgacatattcaaaacttatgttatttattgtgatgtattaactaataatacagaccatttttttaatgcaaaataagaaaaggtaaataccattttagactttgtgttttattaaagttatagattggaccatctgttttattaaataacaaaattgatcctgtattttctaaaatggtacaaatagaactctaaactgatt

SEQ ID NO: 62786 - DNA, 766 bp, Cannabis sativa
accgttatgttattagtgcttagtgcattgtgcatttcaatatcagtttcagttcttacaaattttaatttaataaaaggtttagaaaattgctaactaaatattgtgtatcaacttagtatggtattgagtaccttaaggtactacataacaataataatataaaaaattaattataaaaaaatatagtacaaatatcattcataaaaagtaataaaaaaaattctagctaattattgagtaccacattattatgttattgaccatcttaagatgccaataacaagtacaaaaaataatttgtaaaaaataataaaaaatattaaagataaaaaaaaagtgaaaaacgacaaaaacaagttgtttttcattcttatcgtatagtagatatgtatcttacttttattaattatatttaaacaattgttgaaaaaaattatatttatacaaggatatattgaggtaaagttcatttattgacaattattcataacaaaaaaaagaaaagaacaaaagaaaaaaaaagttacataaacttttctaattatgcattagactattaatattaaaaattgatgcaaatacaataatgagcgttaaaaatgattacatacataaggttttgcaattatgtgctatttttttatttatgtaattaagatatataatagggctattttcaaaaatatgagaaaaattattaaggttatgataaatatgacataaaaagtaaatgtcactaaatatggcattatctaaccaatca

SEQ ID NO: 62787 - DNA, 1107 bp, Cannabis sativa
  modified_base (121)..(121): a, c, t, g, unknown or other
  modified_base (790)..(792): a, c, t, g, unknown or other
aacttgtgactaaaagtgaaaaaattatgactaattgtaaatcatcattcctatcttatgactaaaaggtctgtaactaaaagtattagtcacaagaattataatttgttgtgactaaatntatttttagttttagtcatttagtcacaatacttgttgttgttaaaattaaattattgacaacttgtatctaaatactatggtttagttacaagtaatattttattgtgactaaaaattacatttagtcataaaaaaattatattgtgactaaaacgttgtcactaaatgtagcagttttttgtagtgaaaactacttttagagataactttttagtcccaacaaaaaaaattttagtcacaataaaaaagttatctgtaactaaacatagtatttagatacaagttgtcaccaatgacatacctagaatttttattttgtgagagcttatttatcataaaaaaaaaaatatgtatacctacaatataatcacttttactagatttatttaattttgtggtagcgtttctattattttggtctataattatcaaattaaaaaatttacatttacttttttaaaatgcaatatttttgttagtggggttatagcccccacattaatattaatgggtctgtccctagttgtcactaatttagttttagtcacaacaaatattgtaactaaaaatacatttagtcacaataaattgtgattttaatttgtgactaatacttttagctacgtattttttagtcacaacgtagaaatgataatttataattagnnncaacttttttacttttagttacaatttttattgtgactataagaaaaaaaaattgtagtactattgcaaattctgttagtgtctaaaatttgacacatataaggttcagattctaaatcattaaggacggacacgaatttaagtcactaacggaatctatattgacaaaacgagatgaaaattacaactttactaacatttggtatttatgttgttaaaaaataattaaatttatgccgcttataaatttaaaattttaaatacttatgttgcatagatagccgaccttagataaaaattgtagaaaaaactatt

SEQ ID NO: 62788 - DNA, 896 bp, Cannabis sativa
  modified_base (372)..(375): a, c, t, g, unknown or other
tattaaaatttaggtgtgtaattagatatccaattaaaaatcgatccaattggattggattggattttcagatctaattggattgaatctaatgatgattttctaaatctaattactaattgaattaggtcgaatgaagaaaaaaatattgaattgaatcggatgcctacaatcgaaccactctcagaggactgttcttgaacccctcacagacgacttaagacgactgttgttgaaaccactctcagacgactggtcgtcgttgatcggtgacgccgaccgactgaaccgaacggaagttacatatatttaattattatttttatatattttaattgtatgatatataatttattttaaataatatttaannnntttttattttattatatataatggtggttaataatttgattatcacggtgtatatattttaattgtagtatataaattagttagcatagtatatacatacatattagtaatatatttattattattattgtcgatataatatttttatcaaaataatatttaaattttattttctattgaacttttattgacatgacatataattttattagcatgttatattttttttatttgttgttattatatatatttctattataaaatatatattttttgttatatgatatataagttttgtggtatagtatatcattttatttagatcatacatgtttagttttcattttattaaatataaaagtgatatataattttgtaagtatgacatacttattttatggtcataaataattttattaatatgatataaataatttattattttttattgtaagtatatatgttttgtttgttgtatgatttatgattttattgtatattttatatcatttatttaagat

SEQ ID NO: 62789 - DNA, 1178 bp, Cannabis sativa
  modified_base (357)..(365): a, c, t, g, unknown or other
  modified_base (460)..(461): a, c, t, g, unknown or other
aaaaactggaagaacaaatcccttgctctctctcaaatagcttacattgataaggtgttagagagattctcaatgaaaaataccaaaggggtagtgataccttttagacctgctattcgtctatctaaggaacaatctcccactaatcctcaagagttagaggatatgagaagggttccttatgctttagcagttggaaatctaatgtatgcaatgttatgcaccagacctgacatttgctatgcagtaggaattgtgagtcggtatcagacaaatcaaggagaggaacattggactgcagttaaacatattctgaaatattcaaaaagtactaggaattatgtgttagtctacaannnnnnnnntttaaatcccgtaggctatactgactcagattttcaagcttgactagatgacaggaagtctacatctagaatggtatttactcttgggggtggannagttgtttggagaagtgctaagcaaactgcaaccttagactctaccatggaggtcgaatacatagttgccggcgaggctgctaaggaactattatggcttagaaagttcttctcagtacttggtgttgttcttggaatggaaaaatgtgatagtcagtagtcccgtgatccgtaaggggaaatatcgggtaagctgtgcaatccctcatcgcctggggaaggtcaagtgggatgattctcagactgtgtaggtataggactacacagtggaagagagcttaaatggattgattggtactatctatatcaacaaggtgcatcttgtttttttcgtagcccatcatgaaagaactctacaattaagcatgtttgacctggggcaatttcaggatggggacgtcctgggaagttttctcagggagcatgcgagtgaggacaaggcacgctgaaaacacttgtgttggtctgtatggtcagtcgtcagtccatgaagcagctagagtggcgtaattgtgtataagagccattattccgtgggtgtatggacccaatggaggcttgaagcgaggacatttcaaaatggtatcacagccttgacctagccgaaagtgtggtcgaccaagacgttagaccctgtaagagagggtgattgtgacagtcagtagtcccgtgatccttaaggggaaataccgggtaagttgtgaaatcccacatcgc

SEQ ID NO: 62790 - DNA, 1098 bp, Cannabis sativa
cactctttccctacacgaccaaactgatagtactgctacaattatgttagttgtagagaaaaaatatttctaatatggttagtattaatttcatatgttttaacattagttgatttcacgttgatttatagtattcttacttttgtttcttcacaaaatattcttaacgtatgcaatgaaactttattaaattttttcttaacaatgtccaatcacattgttcatacatagttgtgcttacattgtatcttagttgcctaatagttgtgctactaaaatattatcatgttagaaatcaagactcaaaataaacaatacacaactcatatagagcaaactccattgtggtaagtttttttatattacaatgggtgttattagttgttttaagattctaaagtagatgcctaacaacatatgtcattgttgcattacagttttctcatagtagattgaccataaatgaatttttaaaatgtcaggaaagggatgcaatttcatttcttatgttttacaatggacaatttgatcaaggaatgaattgtgcaaattacgaagttagtggcgaattcatctcaatggattgcaaatataaaatacgtgtacacaagttgaaacaagtgttggaatacaacaaagaaaatactcaattgcaactgaaatatcaagtgaaagaaggttaccaaccgttgagataaagaacgatccaagactgttcttctacatccaagcaattatatattaaaaggaaattcatttgagttttttaattttttttcagaacttatacatgcaaaaatattttctttaatacattgcacatattattgatttttaaatagttgcttaaaaatattataatagaaacgtaaagcattagtaacattacatttgacacattaatgtgaagttccaaaaactttatctaaattaacaaaattactgaatcttcagtagttgcccaacaattgattgatagttgtataacttgtgtacttctttctcaggggtgttacgataaagtataaaacagtcatcctcaaacccaagaaatcatcatcctccatctcttgcccaagaatgcatcctcaatagact

SEQ ID NO: 62791 - DNA, 5259 bp, Cannabis sativa
atatttaacatttatataaaattttatgattatacaacatataaattttagatataactcaaaattaattccaatttatacaataatacattaaagcctttgggtgtattttctagccatgtgctttatcatagaaaaatatgtatttgaaagtgaacataaaacacatatttatagtgtttaggttatcacctttgatcatatgcctcacagatgttatagagactttaatttggtggtgaagagattaaatagtaagatttgagaatttttaagcagttggaatcgattaagcgattttcttaaagtctagcattaaaaattttaaattgaaatgtataacttacatatagttttggctaaatttcttacatccaaaaaatatgatacaaacttacaaattatttttgtcacacttttaatttattgttacattatattatattatttataaataatataatacaccttctttgagaactctaactctccaaacattgtataacttgttggacaatttggctgcattttaaaccaatgaattagagttcatttctcttaaaaaaatggcatctatttaatctaataaatatttaaaattaattcataatatataacgcacatatatatatatcaacaaatatatcgaggttaatttagcatgtatttataaaatacatcctaattataaattaaacattactatttatgtttctacacacaaaaatatttatacttcgatcgtaattattgttaaaatgttatataaataaccacaataatcccatctacataattgtgtagaactatgaatttgattcatatttgttatctctcttgtaaaataaaattattttgttatgtgtatataaaagtaatagaatttgccttttgtttaaaataaacaaaatggattccattatgtacttgcatatatgttttattatatatttcatgaaatttgatcaaaatttgatgtaatttatgtttaatttgatcatatattttgacttccaatgattaaaaatccttttatcaatccaactattgatctaatgttataacactaaacataatgcatgtctaaacaacataataaaatataacatgaaatttaaagaaaatttatcaaaaccctaatcaatataataatgaatttttgggttgttttatatacattgtagatatttaattacccttctacattttataaacgtaaaattgtttatttttttatttgtgaaatttggaacaagctgcaaattaatataatttgtagcattttcaaatgttttggatattttcttttcgagtttatcaaaatattgtttatatattttgatgaatttgtagatgggtatgttgtatagactcctcaaataatttttaaacttatctcacatctttatacttagcctctaaaattattctcagttggaaatatgcaaacaagttaaataatatatgaaattatgttcaatgtgagatttttaagaataacaatataaattataaatatatgaaaataaatttaaaattttagaggatgtctatttgataatatgtgtttaaacttaattataaagagtttcaaattttaaaatacaattcatatgttaagcttttaataattagaatattatttttttgaaaaaaaaaatacatggagagatattatatacctaataaaggataaataactaattaaaataatgttagaatatcctatgcgaaaaaaaataatttttttaaaaaataaaataatcaatttattgattttattgttgataaaatatagccagataacataatatgaataaaaaaataaaataaataataaaacgttcttatctttaatacctttttattgtgttccttcttataaaagtttctccttctataaatacgtattagactcaacaacaattctcattaaccaaaaaagaaaataattcgtcatcttgttattcactttaattttttacatatcaaatatttctcagtttttctcttctccgtgccccatggaagcaagcaacgaaactaccatcctcaccacccctaccacccctatcaccgttactcccataactcctgttattgatatccccaccccaactacccctactattattatcacccctagcaccaccacccccactacccctaccaccaccacccccactacccctaccacacctaccactgaaaccatccccgctgtccctatcagtacaagcactacgagcatctccaaggacgctgcaccattatgccattatactccaaggatacactccaatattacacccgtccctgcctctattgacaacaaatcatcccttgtgaaacctgacaccataaccaccattacaacctcagacatcaccaccaacacaagcctgaacatcaaaaccaacctcaaccctaccattaccaacactaacatcaccccttccaacaccaataatactctcactctcaacaccaacataactcctatagacttagacactagccttaccaatgacaccaccaaggctaagaaaaaaacgaaaggaagacaaaaaatagagatgaaaatgatcaaagaggaagagaatcgcctcatcactttctcaaaacgtagatctggtatttacaagaaggcttgtgagttggtgaccttatgcggtgctgaggttggtgttgtgatattttcaccatctggtaaaccattttcttatggtagcccttcaattgatgatgtagcatctcgtttcctccctagtcaaacagacacgcaaacatctccaattgtagaggcccagtatcgacgtgtgaggatcaatgagctgaatgaacattacaataatatgtcgaataacttggatgctgaaaaagagacactaaaagagcataagaaaatgacagcagaagggtcaacgccaagggcgatagatgtggcaccaaacctgccaaaaggatggtgggatgcaccggtagatgggctgagtttggatgagcttaagcaacttcataaaaatcttgaagagttacatgcaaaaatggttaagcaagttaaggagaagatggccaatagttcattatgttttattaattctacttcctattacaaataataataatttaaacatcttgtcttcacattttgcagggattaattaataggagtggtactaatcaagaactaatcaactcgcttatgaattttgttgaacatcagagtgcaactggaatccatgcttcctgcgattctcatgttatatgactacaattatgtcgtgaagaaagtcataatcaacaatagttattcatgtatttcagttaaaattgtcggtattttttcctttgaaaaaaataagttatttattttgttttaatctcttttcgtagttctttcacaaatataagaaaatatctttactattttataattatataacttaaaaaaagaagtatttaaagtaatttcagagcgtgaccatcttagtcatcgaccttatatgtattaattattttatatatgcatattgtattatgttaaacaattaaagaaaagaaaaaacggttataagtttattgtacctgtttattaaaataaataaagttctttttttatagataaataaataatagttcaaaaatatgtataactcttcaaaattatacatattattccttttaaaaaaatcataactataagcttcttctataaaaagaatttctaagctatagatattttttttaaaaaataaaaaataaaaaaaaatcctaattctctattacaacgaaagggagaaaggaaaactttgtaacttaaaaatgtataattttagacaaataaagaaagaaatatttatgatacatatatctatatatacttgcacctaaccaattatagaagaagaaaaaaaaaactaaaacagaatccagagagagcaataaaaagaaatacctatatatgattgaataaatcataagtgtaatttgtgaaataatttctattaattccaaatgttggaaaatacaatccaatactactataaatgattcatctctatacaaaaaaaaaaaaaattactactataaatgatacaaaatgataaaatgacaacttgataaaaagagtaataaaatgaccttatctctactataaatatacaatactccacaacaatttttttcacaacaatactttctatgcatcaaattttatttttcttttacctaatttattattctctcttttcttcaaccatggtatccaagaaaaataatacccctaacaagcccgcgaccaacaccaccacaaaccctaacaaaccgactactaagatcgggcgcccgaaaattgagtttgaccaaaagctattcgacaaggtgttattagctgcttcaccaacacctgtggtggtaaagccaggagaagggtattggtggaatgagcctattgagggtatgaatttgtatgagcttaagaaaagagagaaatctcttctacaaatatatgatactcttactatagaaatcatgaagaggaggttgctcaaaacattactagctttatatattgttaagaatagtatgtttaaataatactattatataattataatgagctcattttcatatattatagtataataaaatggggattatgtgtatacatttaatccttttattatgaatatagagctcttaagttatgttatctatgtttgtagtgtgctacaactttaccatataataaaaagtttaatttatctacattcgttatggaatactttttaataaatatataaataaataactataaatattaattttaaaaatattaatacttgtaagccttgttttaattattggatgattaattgctcgttaataatcatacacacgtgtaataaattatttaaattttaattttagaatcttaaataaaaaaatttgtaatgaaaattctaaaagtatacttaaaaataatattcacttaaaaaaatcaatgacaaagtgatgcccataataaatattagaaatattattttaacataaaatatcctaaatcttttttcaaaatttttactaattgttgacatatataattcttcatacttcaaacctaaaacttaaaattaaatagaaattaaacctaataaaatgatgactatattagttcaaaaagtgttttcacaacacaacaaaagatgtaggaattgagaaataatatatttgataaattcaagaatatttataagg

SEQ ID NO: 62792 - DNA, 719 bp, Cannabis sativa
taataatattattctagctagtgacttctaaaatgggagcatttgctactagaagctcaaggactctttgataaaattattcttgtagtgacttataaaatgggagcattttctactatacaagcccaaaggcttattctcctcataaaagttctctactttacaaggtgccttgaatacaaagataacaaggagacattttatcatagaaaataaagtgttgattactaattatgatggttatattaaaaatataattatgatggttatatttttttataacgctaataacagattactaataggtaaaaattttatttttagactcaaattaatatatatttaaaataaattaattttttaatcaagatatttttcacaattaatattgttgcctttgattttttccaatatacatggccacggataagagtgacacgtggagtatccattcacgaaatcaactaagtcttggcaagaaagtacacctcatggagtgagcctcccggaggagagcataagacacgtctttactctctgggaggctaggactatgccagggcatctccgggaggaaaatagattgtttgaacagccacttcgcatttaatgccgcatggaggaaaacgtatcagaaactccataaaaagattagaaagatggcgtaagcccttatttacggcgatgacacggcaaacgacgagtctagtgacggctac

SEQ ID NO: 62793 - DNA, 957 bp, Cannabis sativa
caaggatatgataatggatccaacatgaaaggaaaacaccaaggtgtacaaaaaagattattagagataaatcctagagcattatatacaccttgtggttatcatagtcttaacttagtgatttgcgatgttgctaactcctgtgttaaagtgtaactttttttggtgttttgtaacgtatatattcattattctcttcttcacataagtaatggacaatactgaaaaataatatatctacgttaattgtgaaatcattatctcaaacttgttgggaaagtcgtattgaaagtgttaaggcaattagatttcaagtttcgaaaataagagatgctttgcttaaactagcagaatcaagtgacgatcctaaaataaatagtgaagctaagtccctagcaacttttgaattaaagaattttgaatttttattgggcatgactatttggtttgatattttatttgttgtcagttcaattagtaaaaatttaaaaagtaaaaatatagacattgataatgctataaataagttaaatggtctagtttcttattttgaaaattataagaaagaaggatatgtttcagctatgattacaactaaagaaatttcaaatgagatgaaaattgagcctaaattttgtgaaaagcgtgtgattcgtagaaaaaataatgggacgaaatattggtgatggtgagatagtaaagtctgctgaagaatcatttcggattgattattttattttcatggttgaccaaattatttcttcacttaaaaatagatttgaaaagtttcaagagtatgcaaatatttttggatttttattcaatttgaaaaacctaaaaccccttgatgaaaataatttaaaatatcaatcttgaaatcttgaaaatgttttaaaatacaatggaatttctgatattgatggttgtgatttgtttttagaattaaaagtgttaaga

SEQ ID NO: 62794 - DNA, 6797 bp, Cannabis sativa
ttatctaaagtaggaacaaaaaaacgtattcacctttttacattctcatatacatagaaaagaattataattttttttttttttttgtaatcaaacaattataaatgttgaaaatattgattagtctaatttcaagttttttttttatttattattattctcatatgttttaacaaatgaaaactagaagactaaagccgtttgactaaaaagaaagcttgagatacatgtaataacgaataagctattgcaacattattattactagtcatctaagaatagagttcgtgagaagattaaagatacggcacataataaagaagtataaagacttgagaggtatcgcacaagcaaaaggattgtgcttcgtagctgtagttgtagcccacaactgacttttggaaaataactttgtgtcattctagaaactcagaccaaataaatttcaggcctaaacgtccatgtaacacattatttaatagtcgaataatataagagatggctggtcttcataactcatgtgaattgtaatgaattttcaagctttgaacttgactaactctaaagtaggacagaacacgtttagagttataaaccacatattgtttacagtacaatttaagttcgtttagctttctatgcaagaaagccttaattcacttgaaaatttacatagccaatccaatccaccactaccattctaaaatgttttatttatttatttcttttgctcgtaaatctatgtcaacattcttcaaagaatagttgagcaaagcaatgctaagaagaacgtggacatcgttttgtatgttttacaacgtatacatattatcatcttccaagaaaataatgatttctgtagttctcgtttgaccaattagtaaaccttttaattacaacaagactatgtgttacagctcaagctagatacaggtaatgaaataactctaaagcaaaaattatgaatattcaaataaatgaaataattatgaaagagtacaacaaacgctgaaggagaagctagcagacagtagagtggaccaacaagactgggaatgatcacggaccaaacatttgaagcacataagatgggataaaatcgtagtttagtggtggctgtgttttcgttttctcagtctttgaatacttttaaatggctcaacccagttcttgtcctcttccactgcacgattccatcgctccttaaagatttgaagctcccatgtcgattgcctcctaatctgcaagagcacatatcaaaaggaacattcatcattccactaaatctctctggaatacttttatgcaggcaagagtttgtaacagcaatacagaaagtttatacattcaattaaagatttagtcactcacctcagttcgcatatcaccagctccacctacatgcctctgagtaacataaataaagaatattaacaaaatagcaagggtcataatgaccttagtaaaatgtcataaatatttttttggacgaataaaagaagtatatttgtttagactgaactttaccttagtgaccacctcagaatttgaggcctgcacaaaaggcagtgaaatagattatagtggagcaaatgggaccacctcagaattttttttgtttttttataacatttaattttttttggttgctatcatctttatatgagtagtctagaaatcatacgattcttatgaattcatcaatgatgtaaaaatcctcaagtatcacacacatgagcattcgtataccatgccatctcaccgtcaaaggaaaaacctattgcttttgtaaggtgaaaggggtattcaaatgcaaactaaccttttttacagaagagatagccccaccaccacccaaactttgtatgcccttatgaactatgtattcactatcaaccacaccaaccctcctggtccgatcaccctgtaaaagagctatgttattacatatcaggcacaaacaagttgacgaaaagaatgtatcaacattttgaaaattcgggagagatacaagaaaaatggcttgataagattgtaaagcaagcagagcaacaatatgccatgctgtagtttttatagttgcaaataaagatttaaaagagttggtgaatatagtgtaaaaatcgaaaattgccaaggatgccaattagcagtgacaatatcattatagaagacaggagggctaaattttgctgcaattctgtaaacaacttttgagaacaaatgcacacatatccaacaaggatgtggagacattcccaaaggcaagattggaagtataggagtggtgaaaagtgaaccggtgaaaaagacagtgatacaatgtctttctgttgtccatgttgtaaaaagttataagaactaatcaaagttactaaatcttgaacaagaactaggaaagtaaatataacctgtgcacaatacccaagtttcatatccattccccaaccgtgaacaagatcattctgcacaaaaaaaaaaggagagcattttgattaggaatttaaccatgataaatgcttagagaagtataacatcaaattgttactaagaactggtagaaagcaaaagtatgaagccaaatcttaaaagaatgaccgacttataaacggacttcatatgaacagataaatcaaagattttcaatcatcatagaaaccaaaataaaaataaaagtgatgcccatctacaactactatcaatgtactgtgacaaagtaaaattcatgctatatgactaagactacaaaaatgtaaaagcaacttctacatgaacatttcactagtagcgtccaatagattaaaagtgacatttaatgccatttttaaaagttacctgtataagatgccaagtacatcgccaagcagatcttgaaaacactggagccataccttcaacgaatctagataggcggatacataaaccagtaagtccaccaaaataccgatttatataagatttttaaaaccaagtactgttataaactacagcaataagatatctccctttattactcttaagtgggtcagttaggagaaggacaagacataaagaacataatcagcatcctaaaagtactttaaccacacctttaagaaaggataagatctatgctgcacctacaataagagatgtatcgttttggtcttttacaagaatcagtggactttataatgagaaaatatgttgtatatataataaatagaaacacccaaactttgtatcctgggaaaattttgactagtagggtagagaaaaaaaaaagcatacccagtgcatggtggcccctcacttgaatctgaacacttagtactgcctcttaggtcataaacccttctgtgaaaatgtaaaaaggttctataagacacatgtttccagaaaaaaaaaattaatgatgaatataaacatgtctattaacctgtgaaacttctttgttctagcacgaatagtaattctatgatgtatctctgtcgaatttggatctaatgctggctgagatatttccagtccttctcttcttacaattttgatgtatctagcaacaaacaacagatcatgtatggagagaataagtagatgataattaaataaaatcttcatacattagattatatttgtgcactaatagcactggtagaatccaagggttagttcaacaaatgcattatatgcttatacgcagcttactgaattgaatgcaagagattcaatcgtaaatataataaattttgttgcaaaaatcagatttaagaacagacctagagagtgatgctatcattaattgttatttataataaattactggatggacatgctagaaagttgttcaggaataaaccaacagtttatagttattaacagaagatcagcataaaccatctataaaacaaagtaatttttttttcctttttatcattatgagggcaaaatgcaggtcaaaattagttttgccacaacatcaacactaagtctacggcacataaaaaagaaaagatccaagccatagtcaacaaaataagaatactcccagcaaaaaatcttcaaggaacccatcaatattaccttccagggtcaaagttttcaacccccaaatcctcatcccagagaaacacgtagtcatatatggacacaacatctggatgtaaaaaccgtttagcaaaccacctgtgatgaaccaaaatactattactgaaacaggaataaaaaaacagggggcaatatcaaaagctgaagagtcaaaatcaatgaggtaaaataaagatgaaaagtagcaaaataccatttaccatgtcaatctcagcaaattatgggcttaacaagccttaccaagagaaattttacagctactatttcttcaaaaagaagtgttctctcatttaatcacataataaaacaaatgatcaaataccactctataaacaacaagcataccactttgtttgattctgtgcaacaatgtgtatggcctcattactccactcaagatccaaccatccatcaacattcccatcataatggaatagaataatggtaaaattctctggaagaaactgaaattgatagaattaggcaaagaacattgtgataacattctgaataataaagagaagaaagtgtattaccttttgtaccatatcatcaacattaagtttttgctcaatgccaactggaacagccagcaagttgcgacgactatagttattaacctgccaaaccacaggtcacaaaacgtacttattcaatgtatatttataaaaacaaataagaaaacaccagtgtagtctacaaagtaacaattagcaacagcacatgaatctgttaccaataagaagcaatactaaaatcagaaggaacacttgtgttatattataagagaaagtgaatcttacctttgaccttgagctacttctcaaccacagcggccttaattctaaatctgacctagcttgtataattccacggggtaaaccacttaactctctggaagccacacgaaattcctatacacgaccattagaagatgtgagaacttttttgtaatgcacacaaagcaagtgaaacacgtgtaaggtatatatagcttactgaatcaaaaggatgcatttttgtttccatctgacataaaagaaggaaaataaatcagtagactatcctcccggaaaacaaaactaattaaatggatactcaaacataatgtcacatacacaaacagaatgatcaaccattatacctcagtgtgtttatgttgataatttgtggttctatacacaataaatagcatgacagtgcacacaattcccataaacggaagttgcttcatcttgaatccgcatcgcccctgcatcaaaattttgaacgatacaaggctgataagaaaattaatacctccagcataaacaaggcacttaaatcataaaaagagagtaaaagaacacaatcgtaccgcatcagatgaaacgttttttttcttcaaaagccatctccatgattttattaacttcatagacaatcaaaactcgtactttattttcataacaagctgtcatcaaagtttcatttagttactgactagaattaaacgaggatatataagcttaagaactcttatttatgtcatgatatgacgtaaaagttgggaatcaatgtaatagagcggatcccctaaggtatgccatcacaactaaccccaatgacatcacttattacatattactagaatatctagtataattcaaggggtataacatatttcaaatgcaagcagctggaaacatttgaaggtatgacttccccaaaatgaaaattacgaattcaaaaactgaaaatctatcattttccaaataccagaataagaacaattgaacaacttattaaattaaatacacgtcttgttagctcaaacatacatgtacctgagagggagctaggggtcggaagaatttctagacttactaaggaaaacaaatgagttaagtcagggtagagaagtccaaattttgcgtctgcatgtgcgagagaaagattgcagatctaaccatagaacagcaattggaaaatgaaaacatagattctaactcacattttagaacaacacccatatgacactgcaatcaacacccataacgaaaacgacaatccccgccctcaccccaactatttgaaaacaagaatagctaaacatgaataagcataaacgataactacctatcaaagaatgcttaagaaaaaagattacttttttgaatacccatatgaagggaagaaaaaaatttccagaacccagaaagtgacgataaaaagaaactatatacaaatatagcttagaaagtacaaaaattgaaaaaaagaaaaaatgtttagatctcaaaatcgaagctatacagagaaaagaacaaacccatcatgtttcataactcaatcttagctaaagaaaagctcatttttttgtcatatttatcaaacttacactttcccagaagcaaaacaacaaacacataaagctttcattttttattcttaaatctgtacattgattatcaatctcaaaaactcatttgcgcaaaatacttcttttgcaaattaacccccaccgccaaaaaataaactcaaaaaataaaaaatggcgaaccttggttgcagaagatcagaaagcgtcagatcgagatagagctagcgcagagcaataaacaataccacccagttcgacgccggaaaacaatgaacggcgacaaggttcgccggaaaataaaagatggaggaagagggaagagtcgagagacgaagaaatgggaagcggc

SEQ ID NO: 62795 - DNA, 580 bp, Cannabis sativa
ttatgcttttcgtgttctttctcttttgtcctttcttttctttcaaattagagattgatgacataattgagcttggagattttcttgtacaaatgtttgaagctaaattgtgggaactcattccattgttgattgaagatcatcgcaaatttcttaatcattctattcaaagagatattgagatgaaagaattgatagttcaaattcttaactcgaagatttcagagttatggtgttaattagatcgcagattatgaaaatttaaaagttgttttctgttttcttgttttttattttctttatcattttttcaagtgttttgatgtattaaattttggattattgattgaatttagtagtaaagtaataaattcaagtttttgatcatatacctctctccaatacatgtgtataatttaataaaaaaaaacaaagtttttaaggcaaattattgagtgttaagatgagtaataatgagaactagaagaagtaatcatcaattttattgttgaattttctttgtgtaatattgtaacattgtttctctgtttcataaacttgaattaatctttaattggta

SEQ ID NO: 62796 - DNA, 726 bp, Cannabis sativa
ctataaaataacaaaaacaatgaagaaattaacatcatgacaattataaatcaactataaataaaatataaaacaaccaaaaaagaatatcaaacagtttattatttttactgaataacgtatttttgtaaataaaaaaattcaaactataaagataaattttttctatatatgagtatttattaattttttaaaaaatatttagtatattatgtaaaaaattaaaactaaaatgtgtattaaataattttaattttaatgttgatttttttatataaaaaaaaaaagtaagtaattgatgatatattatccatattataatcaaaaaattggaaagtacaagaattttttttctttcaattcgaaatttccaatattaatatttggaaattcagtatgttcacgtggtactaatattattataaataaatttggttgaagatatttttatttagctcatagatggaaaatataaagaatagaaaaaaaatggcgagctcaatattaataagtgagttaaattactaaagagcgtggcacaccaagtttctacttctacataatggcttaatgataaaataagctaaaatttaacatgtttactaaagagagactacaactacatcattcaaatcaaattccttttcgtctatgctacttgtagccaaaacaatacaaggcaagaagataagctatgttatctaatctagcacaaataaaattcaa

SEQ ID NO: 62797 - DNA, 986 bp, Cannabis sativa
gttaaatttaacggaatattcttttaaaaataagtatattctgttaaaccaagaattgccgttagatacgcacttttaatatataaagatataaaaaagtgaagagaacgaaatgttatatttattaaacaataaattctatggatccttgtaggtgaacaataataagtatttattaaatatttatacgcttttaaacttcatattcatggctgtgtcataaacactttttatgataaaataactcgatgttatatatttgcttttccaacactgttggactgactagcagtctgaggccttctctctcagcttttcacaattattattctctttttcttgtctcgatagtttcttcacagcttttatattattagagaaatattaaactgtaggaatattacattaaaaataagtttacattttatttacaaaaatatttttataaagtgtaaataatatttatatttttttatgtatttttaattatcaaaatacctcctacactattaggtgattggccgaaagttgcatcagacgaaagttgttgggtagttgactgaatgttgcatcagacgaaagtttcaatcagacaaaagttactaggtagttggctaaaggttgcatcagacgaagatttcaatcagacgaaaataacagttaataacaaaatgtttatacaatttttataaaacattaaaaatcataacagtgtttccacgtacctaattctatttacatgtttcttcatgatttaatatgaacaactttatcattagaaatttggaaaacaacgaatacaccaggataaacattttactatagtattaatgtaatttttttttggattatacttgagttggattgattgagaactccagttcaacatttttagatctgcatttcatagatcagaaaattgaagtcaagacattagttttatgcaaattaaactggatttccaattgaattttagtttcgtagta

SEQ ID NO: 62798 - DNA, 1374 bp, Cannabis sativa
agcagaccaaaaaagaggaaataggccaggctaaggaagttgaagaagaagacccaactaagtctcctaccatgtagacttagatacattttttttatttttagaaaaatggtcattaggctgagacaatggttgccccttgtggcattttgtaaaaacttttactttgttggatggccaacattgcttatttatatatttttactttttatacctcgcatctcgctttcgagttatatatgtttgtttattacgttttaattcaaaatctaaacatttttctctcgatttagcttcggacactctttagttttttcgcgagcagtttataatttgccatgttatacgcgagcaaacttcaaatattttaaataattcactttaagaactattttgaatatctttcgattactcatatgaatagttaatcccatattcatatttttagcttaagtattatttttcaaggcacattcgtgtctcgtttacaatacatgttacagtaatacaagtcgttgcttactcaactcgcatttagctttctgttgttttatgagaaaaaatctcacttacaactgctattttaattttttttcttttaaagaaaaggtttttcaattcatgactttatattgtcccaggataatttcaatcaatcatcctttcctttgtgaaaaaattttagtatttaggtttttacaataaagtatatatttctaggtggactttatatgccccccaagtaattttaaagaaaagaaactttgtaattacttgaacaaatttaatttatttcataacaatgattaacattacagagataaacacaatatttacacattaaaattactggtaataaggtcttaaatgttcactgttccagtgattctttcttttcgagccattaagcgaagctaatttataaatcttggttcctacgatagcctcaataacatatggaccttcccagtttgggttaaatactcctactgcagggtctcgcgtatttgtagatacacgtctcaacaccaaatctcttactttaaacaacctttttcggattcttttgtcaaagtatctcgttattcggtgttagtaggttgcattagttatttgcgactcattgcgtctttcttcaagtagatccaaggacatattcaaaagttcttggttttcctcttgattataaaattcacgcatgtgggtcgcaatgttaacttctacgggtaacattgcttccaagccgaacgccgatgagaacggagtgtgtcccgatgttgttttctctatagttctatggtcccaaagcacttgaggcagctcgtcaacccatcttcctttggttgcatctaacttcttcttaatagtatcttt

SEQ ID NO: 62799 - DNA, 760 bp, Cannabis sativa
tagtattaaatacgagtagcaataatatgaaaatgcctggttatggcatagatcgaaaccgttgttaggtttctaactggcggtgtaccttattagatacgagctacagtaatatgaaaattcctggttatggcatagattgaaaccgttgttaggtttctaactggcagtgtaccttattagatacgggcgacagtaatatatgagtaccaagctatagtacaggttcgtctgataggacgatgcgatatattggtaccaggttgtggcacaggctcacctgtttaggtggttcaatgatattatatatgatgttgtattatgacacgagcttgcctgattagacaatacaaatatatgagcatatctatttctataattatgtggtgtagtgatattatatatgatgttgtaatattcaaactgcaaccacattgctagatcttaaacttgcaaaaatcacactaagataatgcagtgtgatgcggtgcagtttgaacaatttgcactatcatcctatcacattacaattaaaattttaaaataaatctaacaaaggtttaacaatataaaataattattattaaaattttaatattataacatataaactaatccttaagtcattatattagtttgcgtctaaaaaaataatgtaatatacatagatatatatattaggggttttttcatatttacactttaaaatagtttttttttttttacggaattgtacataaaacccttattgcaactagcg

SEQ ID NO: 62800 - DNA, 771 bp, Cannabis sativa
ctcttccattaggtcgagggggtaatctgggcgtctgctaaaggggcacccctctgggaggtttctgaccctcaggcgcaaccctgttttctccctgaggcacggggcctccggtttgggctggattcaaatttggcatcctatttttgatccactcatacaagtggcacaatcgaattaagcttttaatttcatccttcagatttttgcattcatttgtagtatgactgatatcgttgtgatagtcaaaccttttattggggcccctcggtagctatccctgtacaaggggggaggctttcagtaatgcgtattttatcggtggcaaaatatacacgttcttgagaatctgtgagcttagtgtactacgtgtattaaggagtataccccctccgttgcctcttgtcctcagtctgtctgctacctttagaagacatgtaacacccaaatttataggaatgccacgtgtgtgattttataaaactattttaatactaatatattaattaaatattaaaactgtgaggataataaaaatttgactaaaataaaaaactacaaacgagcattataatagcagtacaaaggagttccggggatccctgttataaaatatttatccaaaagactatatacaacaacaatccaaaacacagttcaaaatacagcagacacggtaagtctaaaacgactcctgacaactcaacacgcaggctggtggggtcaatatgtacattgctagagaagaccgccatctcatggttgttctaa

SEQ ID NO: 62801 - DNA, 2576 bp, Cannabis sativa
gctaaagatcgatcgaaatttgttggttgctcctcgaagtaaaattagaattgataaaatttcttacagaaaacctagacatttttgcctggtcacatgcggatatggtcggaatcgatccttctcactactacaataagcagaattcgcgacagtcccaaaaacactttttttttaggaaccgtcgctaataaaattatctgagtgattttcttcttcctcgtttggagattcaatgtaatgtagcttgtggttcacggttacaggtatagtttaatgattgtgtgtgtgtgtattttttttcttgtgatttgctacaaactagacttgaatccctatcactttgttttcttaagtgcttatattgagcgaactacttaatctgtgagcctgcatgtgaatctaggttcttttccttccctcttttaaattaatgatcagtctctttggtcatgctttaatcctggatcatctatttagttatataattttgactattatgggattccaacattggaaaagcaaaatcttttattgggttctcaactaattgattcaactttgggttctaaaaatgaaaaaaaaaaatttatgagtagtaattagtatgtgcatgttataatttgggtgttaagttttatttttcttaatatattttctaataaataaacagttgaaagttaaaaatacttcctaaatctatcatgcgattatgtatgtatatcaaatcatcaatcagtcttgtggggagttttagttgacctaacctatgtgaccattcatttcaggaaatttgctttgtactcatctggcctttgttcaagaatacatacagacagatcaatagaatggtagcagagctattgtggctggagcttgtatggcttattgataggtgggcaggtgttaaggtatttatctgctcctttacatagtcttttatttattaatctcttcaatgaaatgtatttctgtttatgttctttatttggattgatactgtgatgatttttatgaaatttgtgtttcctattttgtataatttcttctaaaaagggttgtgaatgttttcactagtggaatttaaatctatcttgctatgaaagtggttctttggaacattttcatgagattgttaggtttctttatcggtggataagcatttgcaagctacaccaaataattaacttctttctagtgacactgattacacctacacaaaaggtgctcacgatcttagaatagtaaattaaataaatcgagtttgcatttactactagaggtcataaatacagaatgataaatcaattgtgtcatgatttttcttttaagtgaatgaaagtctaatgtgtcacgtgtcaattcttggagttgggagtactttgaatggacccaagttttgaatctagactacggcgtcaacatttttcttgtgtatagcatgccctgcttttgggaaataggttcatgcagtgttgcaagaaaatatttttcttttgtatgatttttgcaagaaaatgactaacacaaatatgtgctactagagtacttgtaattgcaaggaggtttaaatgcttgtttaaattctgttatctacttgttgaaaatgtgttggtacttggtggtttcatgtttattgtttagattaagtaattattacttgaaaactgttgatttttattgtttgatgaagaaagtttggattaagttaaaaaagtttggtgcttgcaaattcaaaggcccatttttagtctctagctctatcaacacttaactacttaagacttaattttttggagatatttttatttgaaagaaaagttttgtatacataagctttagattaagttcatttatgtctgtaccagtgatatatatgatatgatatatgtgcgacatatatattattaattaatatataatttctttctagtttcttttgcagggtaagagcaatctgtactcaaatgatgagttgaatcttacacgaggattgaatatgtccgagcacaggaaatgcgacaagggctattacgatgaccaatttttgtttttgtttatactttacactataacgagttacgatttcatataactaacgattaagtaagtttgagtacatactttatatatatttcagtttttgttcatttttaatttatgtttatactttaccctaattaattagtgacaatatataaattggtaaaaattaattaatgcagggaaagaaagcagaaatttttatttttttttcctttttttgcaacccaatgactagcaaaaaccgtcgttgaaaaatacaaaatatataattaaactaaaatttttactataagcgatggtttagaactgtcccgatacaactataggccacagtttaaaactgtcgcctataatgaacactataggtgacagttttaaactgtggcccatactatttttccgacggttttcaactatcgtctattagtattcacgacgctcgtataggcgacggttttatggactgacgggaattattttcctgacggtgtaaaaccgacgggaatttgagttttttagtagtggaatat

SEQ ID NO: 62802 - DNA, 649 bp, Cannabis sativa
aattgaagccattaatgagtgagtaaggatacgaacgtcctcccttcttatcgtcatgagatgtgatgttgttgaaatcgtcgatgacacaccaggggagattcgattcattagcgagagtacgtaggaggttccaagtcaaatgggaagggagcgattgcattcgccgtagacaccagtgagcctccaacaattgtaaccatggagctaaatttccatgtcaatatggtaggctgagaagttaatgagatgggcttcattggtggacttccataagaaagcaagaccacctttctttccttgggctggtacagtaaaagaacactcaaaaccctgctgagttttgactcggtccacaatatcattcttacacatagtttcacaaaggaagataaacttgggcttcttttgaacacaaatgtcagcaagaaattggaaagcccatgggttcctaagcccacgacaattccaacttatggtattcataatgattggtgggtctggtactgttctccgtttttaaaaagcccaataatatcattattatgaaaattatttggcaagataatacaatcctcctcatcacccttggaaatactcggccctgtattagaaatattctcctccctttttctctttaaatcaacca

SEQ ID NO: 62803 - DNA, 1420 bp, Cannabis sativa
ttaaatgtaaccatgatggttacaattaaaatgtaaccgttgaaacctcatccatatagtgtcacataatttaaagttttgtggacatttataatttgtagttttgtggacattcataagttaacaatggctattaatttttgaagattttattatgtcttttcttttcattttttttttcctaattatcaatgttctattttcaggttatgcattggcaagtctctcaaatggatatttaacactaaaattattaggtaattttttttttcttgctttgaaagattatcattattttttattgtttttattttcatcatatatctctctttctactaatattttttctcttcattccaccttttcttataaacttgcttctcataagtttgaaattctactttgatcttctatatattttgattttttgttgtttatatatataatccgaatctcatctcaatgcaatctcatttaatcttaataagagataaattataagatcttcaatttgaataattattggaagtagtattacaaattctatttagtttttaggaagatttttaatcttcaaaaaggaaaaagtctaacaaatttcaggctatttattattataatttgtttgaaattgttagtaaattaataaattttttaaatttaatttgcagatagacactttgaaagctaatggaagccaaagctttttaaagatattaaggaaattagaaattaatttgtttggtggaggagttcaattaatttaataggataaattactatctttcatgtcttcaactaactagatttgacaggaaattttatatgatgagttgataaattatttgttttgcttaattttatattctcattacaaaagtattttattttgttctatatcctcattgcaaaatgagtttttatgaaatacataaataattttctttccaatttaattttgacattatgcgatattttgaaaatttatagttaaagatatagattttttttaagccatgcattattgtattctatttaaatatatatttgttatgtataatctaacttatttatcttacatcttttttataaatttaataagtattgtaaaccaacaaacatattaatcaaaaatacattttttagggtgaataaaaaatatactcttgaaagggtaatatttgcacatctattgcatcaatttgtattctatattttttttattttcttattattaaatttaagaattttttttatttttacacttcaaaacagttttatttttttgtattttcccaaaaatctacatagcaacccacataaaaaccaacgaagcaacataaatcacaatcaaaattcacatagaaattatcggagcaacccaaactgtaaatttgaaaaaaaaaaaggttaaaaaata

SEQ ID NO: 62804 - DNA, 607 bp, Cannabis sativa
atgtttacgggttgtgggatggaggcttcacttgaatgtataagcttataagcgttaggggtaagcataccttgtaagggtctaacgagcttctcaaagaacactcacttgtatcggttctcaagactctattaccctcctccacacgaatgtacttctctattctttcgtagaagtcatctaggccatctaattctctttttcagcatgttccccgatagtccacttctagggcatactacaccgactacgacgatcttgagttcatctttagacacttttcctactttcataactttgatgttaaagcactggatgtagcttcacaaaatttattgctctccttgcttcacattagtgatacttgtgataggcatgatgtaataattgcaacatgatgttgttggaggaactcttccaataattgcttccaggatgtgattgttcctaatcctaaccttttgaaccacttacatgcaactcattttcagtgtaattgcgaagcattggcaccttgccttggttgatacttttttcatcttcaatagctcattaaaagcagtgagatgatactacaaatcagttgtatcatcatatggtgtcatac

SEQ ID NO: 62805 - DNA, 2484 bp, Cannabis sativa
  modified_base (211)..(214): a, c, t, g, unknown or other
taatgtttatgattaattaattataatatatgtatattgtattatatgattatttatatattgatttgttggatgattattggctaatatataattatcattaggaattaattgaaagcaaaaaaaatagcaaaatataatgtaatttacattaaaatataaaaaaatttaatgaaaacataaaataaaaggttaaaatagtaatttaatnnnnaagcctaaaaattattgacacttttatatagttatagattatacatgcatattcacatcatctatattaaattagttagctattgttaaagagttagtgtaaggaaaggtaatttatatatgagaaatgttaagattggtgtttagcattttttttatttgtcaatatcactattagtctaattaattattagattctatataatttgatgtaatttaaggagtatcgtcaaccaatcataaagcggcatattagacaccactaatacctaataataatactctttatatatatttatgagttattactctcatttatttcaattaattttaaaataggaactcatggccagaccttacaattttaatatagccttcaaagctaaataaaattttgacgataaaaaagagccccttataattctagaatagtgagtaaaaaggtgcaaaaataagcaccattttaaaagagatgttagaatcctcgtgcactttatcatacacactcaccaaattttactttctcaaatcatacaattccaaattctaatagctatagcttataactagtttctttattttagcattaatttgaataaaataaaacttattacttaccataaagctcttcccattaccaagttggatttggctcttgaaactcctatcaataccactagctgctatagtaaacaaccacggcgcggtattagtgaccatgcctagagccggcccatcatttccagccgaggcaacggtgatgattcccttcttcaatgcgtgaaatgacccaaccgctatagaatccgtcaaaaagtccgccgaccccccaccaatggagactgatatgacatcgacaccgtcttcgatagcagcctcaaaagcagcaagaatatccatgtcagcacagccgaaggaagcccagcacaccttgtacatggctaccctagccgagggcactgcaccacgcgccgtcccgttggcaagaccgaagaggctggcgttcggtatgacattgccgaccgctgtggacgaagtgtgagtaccgtgaccatcagcatccaccggcgaagagatgtccgacgggtcattatttccgtcaagtttgaagtacttggctcctataagcttgctaaaaatagggaaacaatataatgataattaatatgtaattagctagccatacagaaaacaaattctagtgcatatatacatatatttatgacattgaaataaatatatacttgttgcatccagagaaattagcggcacgaacacagcttcctttccatttcttgggtataggcccaaatccatcatccttgaaactttcggatcctggagtgatccctgtcacacacgcaaatataaagaatttattattaagaaaactgcaatgacagatatatatacaagtagaaaatattaatttaacctgtatccaaaagaccgacaataacatcactttctgattttaattttcttctagatgttatagggaagccagtgaagtcccaggatcttgttgtgtgtagcttccggtactggtttggaattacagagagtacttcgtccatctctattaattaaaatatatatttacaaataagttattcacatggattaattattaatgtatgtttttgaaagtttgatcattcattatataagagagaaaattagggggggaaatacattaatagtagtttggtttaaacatacgagataatttgttggcttcatcactggaaagcttggcagcgaatgcattgatgcttttggtgtagctatacaccatggattccttagcttcaacaaggctgatcatttacagcaatttaattttaagaccttaattatgtaatgcatgcatatataaaaaataaattgacaaaccagatatgtagaaaattttaattttcttttttttttttttggctgaaaaaataaacacttcatgcatgttcatttgtatatatttattaattaagccgtgctacaaaattaatatatatattatttgaaaaatattaattaagggataccttacactacatggggttatcataaaatatctaatagcaatgtcgtattattttattaatccacaccgcaaaagtaaagtgcattgtaatctacgtacacacatgaaatattgataccattttcattcgataatattaattgatagagcattgctattgggcaccagtggtgtctagcaccttctagatgtgtcgacttgcaattggctagcgatactctataaaa

SEQ ID NO: 62806 - DNA, 889 bp, Cannabis sativa
ccttcagctccattcattaataagcttttaattacagctaccattctttattataacctactatactagttcatattatattaatgatgatattcaaaactattactagtgctgtattaaatcagtaacgacagttacattctacatgagttcacgtaatttatacacacaacaacaaatttagtgatgacttaaaattatttctatgttatcatgactaaaatctttgttgctaaaattattaattataaaaatcacaaatttagtaacttaaatgaaattagtaataacttgttgtattaaatactaagttttaatcactaacaaatttttattgtgaataaaattgtcatatttaattagtcggaaaatatgactgaaagatatattgtcatgaaaaggtagttttaagcaaaaatcacattatatttaatacgtgatttatttttatttttatttttttgaaaaaccgtaatacgtagatttgaatgttcatttaaaatgtgttttatcattaccttaatcaagtatctccgatgaagtgttataaatgtagtactctatatattccttttattagtctatattcctaaaatttaactctaataatagtggtgtataatatagtctaaatttaatatattatgataaatatagtataggttaaattttatgctataataaatattattttttttctactcaataatataattaataattttttatatttttatttatatatttagtatggtttttaaatatatttttaattaaaatttaatatttttattgattttttataagtttttattaaaataaaatttattttactgtatttgagcataattataaaatttagatcaaataatataacattgacttaata

SEQ ID NO: 62807 - DNA, 1060 bp, Cannabis sativa
ttatttaggagtgctatctgtaaattttcatgaaatttcgaacagattccaatgtcaaaaataaggtttaaatattttgttgcacgcacgactattttttttttatacgtgtggtataagtaattgtttgaatcttattttcgacactttcaactattggcaattttttaaaaaaattaaaagtggtccttactagctacaaagtacgcaattattaaaaaaaattgactaattttttttttcacgatgtcaaaatagatagagaatctagaagaacatccctttaaagcggtgtactacgcaaatgtctaaaattaaaatggctaacttaaagtgggtacaaatttggcatatgtaacaaatgttgtgccatatttagtagaatatttgttatgatgtaatatttgcatcaccataaatacactattttgttatttatttttatgcaatttttattatttcattagtatatttaaccatatcaatattaattaactatttatattttggaaaattactttctatatatcaatttttttttaattttttttctaaatttacggattgagttactctgatagtttttttgtaggttgctatgtgaatttcagttgcgatttaagttgctttgttggttgctatgtgggttgatatgtgtatttctgtacgaatataaaattaaataaaaaaactactttaaagtgtaaaaatgattaaactctttatataattatattacataataaaattaatgataaaattacattttttaataaatattaactaaatatctaatttttaccattgtaaatccatatacagtgcaaaaaattgttacaaagatataataaattcataatttattaaaatatagtgttaatgttattttttaggtaatattattatttttaattaacataagtaatttttttttcgtggatatcatgtcatgtcattgcacagatatattgtatgtatgctagatagatattacatgccgtcacgtatgttaattttattttaattttttttaatatcataattttaaaattaataatat

SEQ ID NO: 62808 - DNA, 1527 bp, Cannabis sativa
atccccattcccagactcggatcatagccccaaccccagactcggacctggacttgacttaaataaaattaaaaaataataatgaaaaaaaaagttatagaatatacttttgttttctatttttaaaattaaaaaataaaagtacttatagaatacattattttttttagcatttagtatttttttcttatttttattttgaataattttttattgggtctgacgcgtacataaatatgtaacattattttgtatatatatatagccaaaatactcataaattaattaattctaaaaaaataaaaattattttattaatgtgacgtttggttgggagaaataaaaatataaaaataggagaatgagaataaaaataccaatgaaattgaataaaatttataatgcgtaaaaaaaaattgataaaaaattattaatttttttttcatatcatgaattgaaatagttccatctattttaaaataaaatattctaccaaaatattggaaagataattttattgaaataacattttaataatttaatatgtaactaaaataaaataaaaattatttaaattctattctatctcatttcattacatctaactaaactttagttattttaagccgaaaactgtcgtttacgtatatacgtacaagtgtggacttaatttgtacatttgtcttattaatacatttgctgacgtggcagtcaagtagctgataaagaaaaattagcgcttttcaattaatagattaattgagattaatttttaactattaattaatttaatgaatgattgaataaagtactaatactcaaaagagcattaaaataaattaataaaatgattgctttagttagataatgacaattaacggtaaactgtctacctacaaatgtaaacctatctacgttaattaattttttaagaaaaacattgaaacatcattatctattttttttttttatatgtttatgttaattttattttaatcaacgagaattattgaagtgtgtgttgttgcttaaaataatggagtatgtatgttcgaataggacagttaaggataataattaaaatattatacgtatattatatattaattagttaattaagtaattaatttgcccatgatcatgatttctgttgcaggtatcactatcacctcaaaataaatatatataataataacttaaaatcctttttaattaaacggattataatacataaataaaatgtcatttaattagctatactatatatatatatggtataatcataaatatggtttttgttaacattaataattctaattaagtgagaaaacttttgactatagtcaattaatatattattctctataaagtatgaactaataatatccatgatgtttattctattaaaggaaaatggagtaatgatataaaatttatttattataaatatacatatataggagctttttaagtgggagggtcacttttgttcttacggtatgagcctttttaaattgagattttttt

SEQ ID NO: 62809 - DNA, 842 bp, Cannabis sativa
atttacgttttgttaaacgttctgttaatcgtgtgtctcatgatcttgcccgagcttcataattatatgttgaacgtagttattcggtggattcccttccgagtaacattattgatgtaattgtgcaagaatcgttataaataaagttaagcttttattcaaaaaaaaaaaacaaactacataagaattgttaatattttgtttgcaaaatagttaaaaaaaataatactttttagtagttaatatttaaaattaaaaaaaaaattaataatacactcaatgacatgagaattagagagagtgattaaaactccttaattacatccaattacacaattagagtgtaatcacatagttaaacaaatatacaaattgtgtaattacctctaattacacttaaattcaattacaccataactttccaaaagccccccctaatagtttttctcttcactcataatgaaagttcgagccaacatatagcataaatgctaattaatctaagagaagcaagacctaaaattgcaattcaatattttataaaccacaagaagaaaaaaaatatcaataaactctcaagaacttgctaaatggcaatgcgaaaattggctaacaaatatattttctttctcccccttttgaaggaatccatgagtcaatcaagatttgtctaaataactcttctttataatctaacaaaactattgtttccttcctcttcctttcttgggtggctgagcatccatgtgttcttttccggtaacttctgatgtatccgctgttacaataagacgtgaaaggaatgtatatcatcaaaatagacttctagtctaaacactttc

SEQ ID NO: 62810 - DNA, 1025 bp, Cannabis sativa
ggagatttatttggaatcaagtagggtaatcataagataagagccctagcttcttcttgttgagtttttaagttgtttggttagttcaagcatgttaagttgtgattctgctactgttcgagttagggtagtgacttggttgttttctattgtttagtggagttgttttaagtctgaatcgtctagtattggtgtttgatttttgggttgagcaagtttgagttctaggaactcaaacttggatcaacaatggtattttgaaattctggaaaattgttattgtttctggttggaaattattctttaattttgttataggtgatcttgaaggtttggtttagtttggacacaaattgggcaagttttgaacttttttgggttacctagtgcaaaccggttaattggctctacaggtcctgtagaaccagttaactggatcaggggcaggattcctaaaaaatccattttgttggtttgtgttatttttagagccttagtttgttgtttcctcgataattagaatattttcatgctagttattgatagaaaaacttataattgtgagtttaggtccccaattcgagttttagcatgttatttacccatctgtgtaaatgtgacatagggcatccatccagcatgttactttctgttcaagtcggccaacacacatgaattcggaaacaaggtaaaactagcatagaatgtattttatatgagtatgtatattaattaatgcatgctatttttaatttgcacactaccaacactagtacggtagcggtactcagtgtgttggtacaatgtacgatgtttaaagagtccagtatgttgttaccaacactagtacagacatgtacgcagtgtatgtggtataacacttaggggtgcttgaggtacggggaaaaccctaccaacacttgtacagtagtacagtggtcgtatgatagtaaagaatgttcttacttatctgataagtcttatggataggtgtacgggcgcctagatgcaagttggtattatat

SEQ ID NO: 62811 - DNA, 613 bp, Cannabis sativa
tatttttcttttctattattaacaaaatttattggcatatacaaaaatacaatttttcaattggcattagagcgggacattaaactcttagtgtgatcctttgacgtttccttttgcaatacgttatttttttagaaggaagtcatccatttcttgtccaaccacttctcaatgattctaactatccttcactactaaaaaatagacttttgatatcagtttgagagacttttttttttaaaaaaaaaaaataacattaaagaccaatccaactctaaggtgtcggtttataactgatcatacctataatgaaccgacactaaaacaataaccgagagcaaaaaaattaaaaaatatatacatatacagattgaatataaatcataaccaacactaaaagatttggtgtcgcttataaatcgacacttataagcactttaaaaaaaaaagtataaatagaatgttatagatttaacctaaccttaattttctttctcttcctgttctcttcctttctcgcagtctctctgggcttaacctcggggagccactccagtcattgccgccgccaacccaggtgaaccttgttggctctttctctctttacggagct

SEQ ID NO: 62812 - DNA, 1053 bp, Cannabis sativa
ctactacttattctatcatgatgacttgtatttgggctactacttattctatcatgatgaatggaagagttcaaggcagcttcaaagatgaaaaagggctcagacaaggtgatcatttatctcctcttttatttgtgcttatcatggaatatctcactagaagattgtttttggctgcaaataagtctgcttataggttccacccaatgtgcaaaagcttgaaaattataagtctttgttttgttgatgacctgatgctttttagcaaaggaaataagcaatcggttcaggtgctcaaagagattcttgatgaattcactgctacagcaggtctttttattaataccaacaaatcccaaatctattttggaggagtaggaggagaagagaagcaaaagatccttagagagatggctcttttggaggggtcctttcctctaaagtaccttggggttcctttaagactatcagaatggagagcaaaagattgtgggggaattattaagaagatcaagcagagattgagcacttggggtagtagacatctgtcttttgcgggtagagctcaatcactcagtattgcttggacttcgtaattactgaatgagcatttttgttcttcctcatagtgtcacaaaggaggtggaaaaactttgtagagggttcctttgggggctaaatggcaatcgtagcaagattcatgttgcgtcttgggaaaaagtttacctcccaaaagcctatgggggtttgggatttaaggaaggaattaaatggaatcaagctaaccttgctaaatacatttgggccatttcaaccaaaagagatactctttgggtgaaatggatcaataatgtatatatgaaaaatgattctatttggtcctatgatcttaaacttgatactagatggtattggaagaagttatgtcatttgagagataagttcttggaaagggacatacaagctgcaggagctagtgggaaattcaagactaactggctgtataacatcctcttacaccagcagccattccactatagcagcagtgtttgg

SEQ ID NO: 62813 - DNA, 541 bp, Cannabis sativa
  modified_base (366)..(372): a, c, t, g, unknown or other
ttatatatatgttatttattttgaaatttaagagtaattcaataaagttttaattaattacgtttttaataaatttgttagttagcaacggattgcacggttaatataaaatcacgataacatgcctaatttagtagggtgttacaatattaatattatatatttgaaatgaataaaatataataaattttttaacaagtaagattttaaaaatgtattttaaagaaattaatgtatggtgcaatgtaaaaatgtatttaaaatagagagaataaaattttaataatttcttttaaataataaaatagagaagttgtcaaaacgagcaatttgcggcgaaactcccttatgttttaatttttatannnnnnncccccttatcttttttttttgtggcaaaacccccttatgttttaattttttatacacttaaccctgttatttttttttgtggaaaaatccccatatgttttaatttttatacacttaatccccttatcttttttttttttgtggcaaaaccctcttatgtttatttttc

SEQ ID NO: 62814 - DNA, 1651 bp, Cannabis sativa
atgaaatctggaaaggtaagcgtctaaatgtaagtcattttcatctctttagatgtgtttgctaagtttcaagagatcgtgagcatattagaaaatttgatgctaaaagtgatgttggtgtgtttgttggatattccacaaatagtagagcctatcgtgtttacaacatgagaactcaaaatgttatggaattagctaacgtggttgttgatgattttaaagattttttagaattttccatagaaaccgagatagatagtttttttgatactccaccagaagcagcaaatgtagattttgatgcagcagacttgaattctgaagaagcaaatgtcgaatctgctgctgcaactaaagcagatgaactagaacagcctatctcccttcatccaaacatcattattgattctatccagaaggaacccaacaccagagtaaaattgaatcatccaaaagatctcattcttggaaatcttgaataaagcatggtaacaaggaaaaggtatgctaattttattagttttctttgttttgtctcacaatttgaaccaaaaaatgtgaaggaagccatgacttatgaagaatggctcaatgcaatgcaagaagaacttaatcagtttgtccgcaacaaagtttggattttggttcgaagaccaaaaggtatcaatgtgattggaacaaagtggatatttaaaaataaaagtgatgaattcagtacaattgtgaggaataaggctcgattggtggcacaaggctatacacaggtagaaggtattgattttgatgaaacctttgctctagtagcaagattagaatctattcgtttgctattgtgtattttttgtgttcttaatatcaaattgtatcaaatggatgtgaagttttccttttctgaatgggattttgagtgaggaagtttatgttgagcaaccaaagagatttgaagattctcagtttccagaccatgtttataaatagaaaaaggtttgtatggtctgaaacaggctccccgtgcctggtatgaaaggttaactcaatttttaatttttcattattatcaaagaggcagtatagacaaaactcttttcatcaaacacataaaatatgattttatcattgctcaaatttatgttgatgatatagtgtttggatctacatctaaccatgaagtgcaggtatttgttaataaaatgaaaaatgagtatgaaatgagcatggttggtgaacttactttctttttggggcttcaagtcagacatatggaaggaggaacattcgtatctcaaagtaattatgccaagaatcttgtcaaaaagtttggccttgaatcggctaaacaggtaagtactccaatgagcaccactttcaaattgacaaaatatgaacatggagtaaaggtagacactactctttctcgtagtatgattggtagtttattgtatttggctgctagttgtcctgatattagctatagtgtgagactatgtgttcaatatcaaagtaatccaatagaatctcatgtttctgcagtaaataggattattcgatatattaatagtactcttgaccttggaatttggtattctaaagacactaattctagcttggcttgttttagtggtgcagattgggcaggcaatgctgatgatcg

SEQ ID NO: 62815 - DNA, 3030 bp, Cannabis sativa
taaatgcgaagatcaaacatgacttgatgatcactactgacgacagtacaacctatgctgaaatggtggataaggcactgcgagctgagagcacagtgggatgtatggttgagttttgtgggacttcagttgttggcggggctcctacccctcctgcatcaggttttgatgtggtaatgcaagttttgaacactttgccctaagaagatcccaaaaattgaaagcctagttgaggatgtcaacctaggcgtagggtgaaaccctaggtgcctgagttggcttctggattccaagttcctgtaattttagctctgggccttgaattaggtttctccatgtcttcatagtacataatactaaaagatagtgagttgtattcaagttattaaagttcaaacttccattccaaagttcccaaagtcaacatgcgcgcaaggctagggacccctcctaggttgacctgctatgactcgggaccactcaactctgagatgtcatcttcctttccacgtgtcaaacattaatgtccatgtcatcaaggccactattcgtgtaaacaagccccttgcctccaagctactttcattcactccagtccttttgccacagccagtaaagtgcctttcttccaacttgctttttatccttgtaaccccacctaccatcccctctcctttctcaattctccacaaactggtggctttgtgatctatcaccccgtccatatccatgtcctgcctctccactgtgttttttacttaaagactcatgctcttccaacataccaaaccccttgacattccccctagttgcaaacctttaaaactaggagaagcttccaacgtacactaggtatccataagtttgaagagagacaagaggtgtgggacccttcgactttgatgttcgtctcccaccatagagaaccccaaaggtgttgtacaaccctcttgttagttaattaagtcccatatcttctcctcccagtgcacttggctcaatcccctcattccttaatgtttcttccctcttaaacccatcaagaaccccactacccacttccaaccactttccaaaggccaaaccccttcgacccctatctccttgaaccatcctcagactctccttacaccatttcttatcatgcccaataatcccacaatgaaagcacatgaacgatagacgatcatactgaaaagctatccacttatgcaaacaagggcccaaaagtagatagctaggacatatgggcttataaatagagatccacacctaaaattggaagtagccatatggagctgaagaaatggaaattggtccgtagtcagctaggacatattcaaaatctacttatctccatttctttggtggccctagaagttgaattacagatggaaattcttgatattgaaggcataatggatagaatttggagacagaagtctcgtgaaaattggcttcgttttggtgattgtaactcgaaattctttcctggcttgactattattcggagaagacgcaacttcatcgggattgtgtgcaattcttcaggtatctggatgagacgtcgtgacaagatctggggttacttccaagaacaatttcaaaccttattcacttcttctaagccatgcattgatcttgagttggagactcttttttatgacaaggtgacgaaagttgagaatgacaacttttgtaggatccctgtttctagcgagatcaaataagtagtttttaaacttcaccctcttaagtccactaaactagatgggttctcaagtttttcttttgaagatactggtatatagttggtgatgttgtttgtaagatggtcaaagattttttctcctctggggtcctggacaggcagttaaatcacacttttatatgtcttactccaatgatcttgaatgctgcccattttgaacagttcagaccaattagcttatgtaattttgggtacaagattatctcttgtattcttatagaccggttaaaaggtgtgttggatcagcttattttgcctttttaatcggcttttatcctaggacgacggatccctgaatgttccttgttggcccaagaagtgcttcactctatgaaatctaagaagcgaaaagttggagttattgccgtaaagacggacatgaacaaggcgtacgataagttggaatgggatttccttttgagagttcttaaagtaaatggtttcagcagctttgtttgcaaactgatcatgcagtgtttatcttcggttagctactcgattttacttaatggtgctcatgtgtctcccttcaatcctaattgtggactccgacaaggagattcactatgaccctttctttttatcatttgcagcgaagttttatccaaacttatccttcgtgctaaaaaggatggtgagctagctggtgtgcgtgttgcgagaaatacattacctataacccacctcctatatgaagatgattccatattcttttgtcatgccactacaaggaacgctgggacacttatgaaatgtttgcagaagtacgagcaatggtcgggccaaaatggtaagtaaagtgaaaagtggagtggttttctcccctaacactaatcgcagatgccgtgaagagatcaaggggattcttggtgtcaaaagcattaatcccaaggagaaataactgggcaatcccttcttctttacttcaaataaaagagaggattaccacagttggaggggtggaaagccaaaaaattgtcccaagctgggaggactacgctgattagctcggtcctctaaatatacctaactattttatgtctatggctcaagtccctagtactctttgtgatgatcttgatcgggtggttgtaagattttagtgggttggaaatatggagaaaagaagatattgtgccctgaggagttggaatgagattcgctagccaaaaagatgtggagggcttggtttctgatggtttaaagacatgaacctggctctgttggaaatattttaccaggacctagatttactaaca

SEQ ID NO: 62816 - DNA, 1309 bp, Cannabis sativa
cccaatctagttcagaagtttattctccaaaattcttagaaacagaatatcctaaacaattagccctcccattcaaactcaaaaatttccaacctcaatccaaattagaaatgaatgatgccataattagagaccatctgattaagtcgaaccaagaagaaatcgccagtcattataggcggttcctacaagagattgctgagggcaaacatcatttcttacgagatgcagcctggcccgaacccacaatattaacttttattccactcgtgagaccaatatttttacccaaagtcattgttgcttttgaaccaggtgacctagagtttgacattacgtctcctaagcctcgcaaatcaaagaccccacaggatcccaatgtcactttcaaggccgaacttatcgaattcaaggttaggtcgattggggcatatgttggcggcatcttaaaatcctatggcatcaagcaaaggaaaggttgtgtcataaggtctgtggcacatggagaattcagttgttttcctccagaaagggttatatgtgaggagtgcagtgggcctagcacgagtaattcctcgggcattggagcctagagccttgtgcacatcaaggtcggggcggtccttccccttaaggattattttaaggagtactgtaactacctcgtgattaccccattccagttgaaccacatcaaggtcggggcggtacttgcttggcctaggtccatttttacatatacccttgtaatcaacaacctcggtgagttaagcaccaataccacacttatgcacttattgcctttaaaccctaactcaactatttcagttcaaatagataaacatttatcaattaatattttaagcatggcatcatatattacataattatactagatgctcacatactgcttaaaatttaaagcggtaaataaataatcacataagcagttaagcgtttagtctcaacacttactgcaccacgagccaagcttatctctaacaatgattgtagaagttcggaagtttaaaaacctttgcgctctgataccaaactctaacaccctaataattatgcacactacgctaaccgattacgaaatcctaatcccctaattttggattactaaaagaataagcgcgaaaaatttaaatttgtaacaactttaaactttacaaccgaaaagatacatgtttcgggatcccgtaagcagtaaaatcagagttacaaaatacatcacaggtagaccccaacccgcttggtctagtgtgggccaaacatgtataagcatcaccaagctctcgcactc

SEQ ID NO: 62817 - DNA, 1320 bp, Cannabis sativa
tgagtagatctaagaccctggtaaaataatttccaacaattagaccaaaggatccaacggctaaggataaagaaaattcaaagggagaagccctgaggtgaatgtgcgtccaaggcccagctcgtacgatttgacacccatatgccatatgagaaatattccacctaccaatccgatggtgggaattcgccccaacaatgatccatccaaggcatcccatgtaacgaagtctgcctataaataccctagaaaaagcacatgagaggaggaccttctctttgggagggaagacccactcttcatcatcctaagaaaacacatttctataaccctactgataaatccaaaatattcctactaagtttcatcttcttcaagagaaacacggtggaagggagttctagtccattgtatctctatttgtgtaaactgttaccagtcaatgagcctaataaaatagactcgtggactaagaataattaatgcctgaaccacgtaaatatctcttattggttattttgctatttactccattattactttcttaagctctgaaaaagatttagttgtcaaaaaacttggcaaacaggaaggaagtcataaaatgtatcacttatcatttttatgtataaatatcatacatacatatatatatatatatacatagataatcaaatgtacttgtaacaaaaacaatgaaagcctaagtttaatagttcattatacctatatatatgccaaaataaagtatataaatgtaaagataaatgcaattagtactacaaattaccatgacagataaaatgcaaagatggaatatattttatataatagaagtgaaatgttaaaaaaaatagaaaaccactaattcggtttgacgggttatttcagtttaattgggtgggttggacctattttcaacctgcccaattaacaggttggacgatttataattttgtcagattttttcggtttggatttttttgttgggtttttcggtttggtttgggtgggttatttggtttgggcaatttacgaaaatttatgtacaagccctactgtagcctatataagcccctttatttcttcacaaaggggaatcacaaaattgacatagccgatgctctagtataatactctttatgttttttcttcttcaagagaaatcttgagaaccagagttagattttttacagtaaatacgacttgtaatacattttacgcctataagtataaggccaatatactgattcgtgaactaagaataattaacaacagaattacataaaattttttatctcagttatttaattgttaaaa

SEQ ID NO: 62818 - DNA, 617 bp, Cannabis sativa
tataaaattatctattaaaaaaagttataaatttattttaaaaaatgttatgtttacataaacaaatctagatttttgaagaaaaaaatagactcaacttgttcttgtgaaatttagtttttaaaaaaattgaatttttaatatactttttttttatctaaaattaatttttagtaaaaataattaattttttaattcacataattatttttaaaattttaatttcttttttaattttcttaatgattcaaatgatttttttttaagatttaaattaatattttaagatttactggaaaaaaaaatattaaatctttctcatttttattttaagggggttcgatttgtggttattaaaatttaggaggaaaaagcagctaatttataaaaaaaaattatcaatatataaatagaataattggacgaaacctaacagaataactaaatttctataaatgtaaaagtttacgaaaaactaaatcattttaaatcattatgtatatattgttgattatatataatattttcaagtaattatttttaaattttttatctgaaaatatactaatattttaatttcatatataatttctaaattgcatgcacatgcaacgcac

SEQ ID NO: 62819 - DNA, 1234 bp, Cannabis sativa
aataaattttttaaaattaatattttttattttcaccttttacctgatgacatgacagtcatcttatttttcaaaccctattttttttttttggaaatttacccattatacacaactttactattttattagaatcattgctcctattttgtagaaatttgttcttggattttttttgggaacatttttgtttatgtctaaatcagtttaaagaatatgctggcattagatgatcatctttcctatgtttggcataacctggattatattgacaattattgtctaatttattcaattagtctgtcaattgaacagagaagacaacaggaaatgtgtaggagaattacatgagatagtcaaccaaggtttagggccaaaatccagagaataacataattaacaaggcattgaatttttagatttttgaattatatatgataactctagcatagaatttttatgcttatttattactatggatatgcatgactcaattgttaaagaaatcagtgataaccttaatgctagatggactgctaccaataatgatagcttctcaaatttcactgtgttttcaaaagtgttttctctccctttgttatttgacacaaccaatatctgtttttaggatagagtactaattgtttgcttgattttgtttttgattcaaaggttggtcaatttagacacattcttggagttaagccaacacctaacaacagttaaggagtaccccagttataagtcatccaaaatccttgaagatgccaacatcgtttgatgcaagaactgcttggtcatagtgctacaccatttcaagaattttaagttaattacttgcatcttatgtttcatattatctagttttctaatatgattgtttttcgttgaaataagaaagtactaactgttatctatttcttcatgtttgatattggatcaactttatcaatgaagctaggtgaatcttgtatttgtttcttaaagcatatattatttttccttttctccagtgacaagttctggaatgtaacattaaatgtcttgcatctttaggggcactgtggctcttgttgggcttttggtattgtgcaaccattgtcagattggttttgcatccattttaacatgggaagttgaatctaatggtactaacatcatgaataattataatttgttacaagctctaaaagatattgctacatgtatattttgtttcagaacatatcccttt

SEQ ID NO: 62820 - DNA, 754 bp, Cannabis sativa
tttatacttaatttttttttatttcaatagaaaaatttctcatttttatattatatgggctatggttgttccatcacttaaaaaaaataataaaaaaaaagtttttcggtaaaaaaaattaaaaaaaaaacgttgagtttgacttaaatatttctatataaacatatttatttgatattgtgaaaagatatttttttgataatttgtttatttaagtcgctaaattaagcatagaaatttaaatttcacttttattattcaccattagatccaaatctaatgctttaatatttttcaaattaaaatttatagctgaatctttttagtaactttttacaccaaaagtaacactgatgatatggatatcaatgtttgacacgtggcaaaaaaaacatactagagttgagtagtactcctgagtcataataatcgacctgggaggggtccctagcccaaggcctaggttgactttgggaactccaaaatgggtgtttggatctcaccaatttatttttaactcactatctttcagtattctataccaagaagacatgaagcatccaagtccaaaacacacaaaacagtaccacgaaactcaactcgggtgcctagggtttcaccttgcgcttaggctgacaacccaactagggtttcagtttctgggacctttttagtgcaaatgggtcaaactttgtactgggagataaattaaacatgtcacgaacatatttgaggcatcaaaatcaaattcaga

SEQ ID NO: 62821 - DNA, 759 bp, Cannabis sativa
tcactaaaaatagctgttttttgtagtgtatgtagagaaaaaaaaattaaaaaaaaaaacaaaatataattataggagaaccattattacttattgttttcccatgtttttttctctttcaacattttgtcaaattttttcattaatataatttttttgaagaaaaaagaaacactgtatttttatagtttcttaccataaaaaccgtaaatgaaaattctccttaggataattgaaaaataatctgcattcggtggctattcttaccaatgctcagttggtggcgaggaccctggaagcgaggcggtgtcccgcttagacaattcaatggcagactctattgctaagaaggctagctagagctgaaggtaatttcaatggtctttgtattagggaggagtcccctggtgtgataccctattttctgtttcaatgaactcttttgtgttcttacaaaaaaaaaaaaaaaaaaacaaaaaaaaaaactttttggaaatagagaatctaacttatgatttttttttaatagaaatgtggaactattaggtttgtttatacaataaacttgtattttattgtttttgtaatttttatggtattatctggaaaaaataaaaaataaaaaaaataagaaaatattttaaagctatttttttactttttaagcctcattagtgggagccttaggcatccacacaagagtgacccgcctatatttgattttcaaaattatttaataggtttgatttattcttatag

SEQ ID NO: 62822 - DNA, 865 bp, Cannabis sativa
ccaagccagggtgatcacttgacaggttaccaaacaatgcagtgttgtttcgttagcactttgacagaaaggacaaagtaaactaacctccacacgcttagttcgaaggtgtgtcatcgttgggagacaatttgtgcctgcacgccatatcaagtttttgatctttggggggatctttagcttccacaaactcttccaaaaagccgatgcttcttcttcactccagcgaccattaatttgctgtaggaggttgtaagcggacttaacagagtaaatccccgaagagtcagaactccatatcacatgatcgatgcactcagcaacttgtaacggaatctgaaggatgaggcttttatctctttcattgaacaagtcatcaatcaactcaacatcccaacatttcaaacctggaaccatcaaactactcactttgacacccgaaagagcaggatgagaagagctaacaaagggattgtggggatcgggcagccaagcttcaccaacaacagtaacgttgttaccatcaccaatgcaccaccttgttcctttcgtgaccagttgttgagcctcccagatacttctccaaacgaagcttggattatttccaagaggagcattaagataggaaccatgaggataatatcgagccttgaaaaccatggaaaccaacgagtccgttctagtgaggagacgccaaccttgttttcctaaaagagccaagttaaagtccctgaggttcctgaagcccatacctccaacatctttatgcttacagagcttatcccagttcatccaatggattccaccactgttttggtttgaggatttccaccaaaacttggacatcaattgttcaatctctctg

SEQ ID NO: 62823 - DNA, 1293 bp, Cannabis sativa
tgaaaaaaaatattttaacattttggatgtaaaaataattgactacaaaattataaaagaatgttataagtatcactcctctatatatataattaataattattgatgtttcttattttgatatagaaaaatatatgaatttttttaattcgatcgaaagcagagtttatggatacataaagctactttaatttaattttatatatatttatataaattgctcgatcgatcgtgtacttttgaaaggaattaattattggtgaatgattaagtattcgtgtaattaatatattataattatatcaatacagctaattattatgattaagttaaataataaaaagtttccttaaagaaattattatttaaagaatggtaaatactattttggaccctatattttgtaaaaattatcaattaaatttttttttattaaatgacaaaatgaaccttatattattcaaaatggtaaaaataggacactaagctcaactttcaacaattttacttattaatataactaattttaagataatttctaacgcgcacagaatatttctagttttgtcataacatctttagattggattattattaagttttagtttaataaaaaaatcagttcaatgtcctatttataaaatttttgaaaatacaaagtctattttgtcatttaacaaaacagttagtctagctaattggtaatttttacaaaatgcaaggtcctaaatagtatttactcttcaaagaacaatgtgagaaggtaaaaaaatttaagcaatgccttcatttatgatcagtactctatatataatctaaaataattgtaaacattatttttgactttgtattttacaaaaattattattggacttattgttttggtaaataataaattaaactttttatttactaaaataataaaaaatagtactgtgagtttaattttttttaaaaaaataaaacataacaataatctatctaaaagtgttaattatgataagattagttacattttttacataagttcgtgctaaaaattatttttaaattggttatattaaaaaataaattgtaaaaaattaaatttagggtagtagttattttgtactattttaaaaaataaaggattcaatttatcatataataaaataaattgtctaatagtataaattttacaaaatgcagaatcaaaaattatatttgttagaaaaattaataatgaacccaagatctatttgtatataacatagaacacaatagtaatatataataattaggtatgtgtacctg

SEQ ID NO: 62824 - DNA, 834 bp, Cannabis sativa
gatatatatatcctcaaaacaaacccataaattgtaaatataaattttgtcgtatttgttcagtaaattaaaactctccaacgtttagcctttcattgttgaagactagcgactaaaaaacagaggaagagtccaggacaaaaataaatattacttcttagcaatctggtgtgtgtagcaacaacataatagcatggggcctatttaacggccaataaaaagagtgtctattggtgtgtccattttaaaagtgtctactatagaagtgtcctaaaatagataatctacgcatatttattaataaagccaaaaaatggttgattcatgattcaacgctgatcatcacacatccattcatcaaaaaatattggtagattctcaattctctcttacgatcgttgcaacgacatctgggcatgccattgcactcaatatgaaataaacccaaaataaattaggaaggtttctattagcatgatcatgatgaactataaattaaaaaagaaatggctttaagacagatagaggtgatttaatctcgtgcaaagaaagagaaaatattaaaaggaatattatgcaaaactatatatggtgaaaagatgttgcatccatgcttgactattcccatcgtcaaacatgcctcgtaataagccactaagagctcgccattgctagaccttcacaaccccatcaaaactcgccatcaatagaccgactactatccttgtttatataccactttctttgaaaagatctcagtcgaagacctcgctactgaatcgccatcaccatacccttcacagttgatcaacaagtttgtcattattatatctg

SEQ ID NO: 62825 - DNA, 519 bp, Cannabis sativa
ttcatacatgcagcaatgtgcaaaagccgatgagcctaaagaatttgaggagttatttaaagctaagtgcttacgcaccatattgtggcaccaagactcaaggcagctaaggttgttgaagattgaacacttggataagtcattcccaagcttgagaatactatccatacggaacttttttatccctgagtttcctaattcaataggcaatttgaagtatctaagatatttgaagttagattgttgtgagattaaagagatacctaatacaatttgtaagttgtataatttggagacactattgttgaagaattgtaggaaagttactcgactaccaaataatataggaaatttaatcaagttgcgacatcttagtgttcctgaatatggtttgttagaagagatgccattgcaattggggaagctacaaaatctgcaaacacttaacaaatttgttgttggaaaaaatatagattgtggtggcattaagttgttgaaagagtttcaagatctacacgg

SEQ ID NO: 62826 - DNA, 1037 bp, Cannabis sativa
aaaatttaactaattctaaatatcaaaatttaaaaataatttttcataaaaaattaaacaatatgaacaaatttattattaattatatttaagtttaaaactaactacatgaatgctgattctatctaataatttgttattttattttattaattaaaaaagtcacctaataatttttcataaattaaaaattatattatataggcatattttatatagaatagagataatgcagcggtgcagatatttaattaattattaaataaaactataatataggtagtcaatgaacttttgtaattagaatctttacacatagatgcatacacacacaagaaagcaattaattgaaactggagaattaattccaggcgaaaagattcatatgtgtatatatttaatcatttttctaagtacgtttcctgaaattgatgtttgatgtttcctattttttttttttatttatacatgttcttagcttttttcatttttaaagtctaattatcattggacaagtggctatacttagcggtattaacgttaataattaaattaatatatattaattgtataagtctatgctaataatatacgtatacgtggttttatatatttatcgtttaattttaaatattgtaataagtttagttagctatcgtcacgttgacaatatagcctatagctaccaaagttattataatataattaatatgtttttaaataaataattacttattaattagcacgaaattaacggccaatcgagatcgatggagtaattcaataaaatgatgtcacttaaattgaaatacatgttctatgatttggaactttgtgttggttaattgaaaacctctgtataattatatgtacatttatatatattacaagtccatgaaaataaaaactatatatattgatttgttagagtatatacatatatatactaggtgattgttacgtgccaagccacgtagggttagttttatttaatattttagttttttatttttattaataattaaaatagtataatt

SEQ ID NO: 62827 - DNA, 629 bp, Cannabis sativa
ccattaggcagatctgtgatgatccatgttttattcttttcaagtacttttatttcctctattgtaatagcattcaaatttttatcttgtagagcttcctgaaccaaattttgaatctgaacttgatccatagtggattaaaactctataggtaggagataagcttgagtaactcaaatagttttgaatgtgatgttgagtgcaagagtgaacccctttcctaaaagcaatgggaatgcttagatcgccagacaaattacttcgacaataggttcagctcgagcatcgtcttgtgtttgttcaagaatgaatggaatcagattacattcatgactttgttgagtttgattggtagcttgttcaatgtttgctagattcttctttttccttgagtaaacccaagtttctatgtttaggatgtggacatcatttgaaaaggttagatgaagagtttttggctcatggaaattggctgaatggttgggtcgatcctcattgatgggaacaaacttaaagaagcaattggatgagaatttcttggctcatgtgatttgattgaatagtttggagtatgagtatcaaacagatgatgagtttttgaagcaatggtgttgtcagaagaagaagaa

SEQ ID NO: 62828 - DNA, 1000 bp, Cannabis sativa
  modified_base (47)..(61): a, c, t, g, unknown or other
  modified_base (489)..(492): a, c, t, g, unknown or other
  modified_base (554)..(558): a, c, t, g, unknown or other
ttagaaagttcatatttagggtagtaatcaacatacttgtgagtagnnnnnnnnnnnnnnnaaaataatttccaacatctacaacttaggagcaagcattgtaggagcaccatgctttctcagatgtcgaactcttcatcttgctcattaatcctggcttgcatctcaacaaacatatgttcccaatcctagccagtctgtggtgggttaacatcaccgtgaccacatgccctacctattgagcctctgccacgactgtgaacattaagagaactgaacaaagcgctcccatgctttctccacaaggcggtcttgatgaagaagatgaattattctcgcgaaaagtcaaggatttgatccctaaatcgctaaaatggatggttgctgaatttctgaaactcaaagataaacatgatataatcacaattctggtgccctaaggattcataacaccgcgtacccagatcacgttatctggagacgatttgnnnnaggttgcattgtgtgacttcatcgtcaaccagggaatgttgtttggaatgatgtatactctnnnnnaatctaattaaccttatatatataagacactaatacttaacaatttaatgcaggcacatctgggaaagcataaacaatttgagaaaaatcttcaagttttacgacctagagcttctcctagtgaatggtatcaacgataaagagaatagtcagtcttttgacaatgtggcaagacgatttcctgcttggttatcattaatgaataacaaccaccaaatgttctttattccttggaatatcgggtaaacactatttaattttttagtgcttattgtttatttttatagtataacatggaatcatttttatactatcttactacttataacccaatataattttttagtgcgcattggattctagaggtcgctgcgccaaagaaagttatacatttaagccctatacgttgccaccgagctcccgaacaaattactacaatgtt

SEQ ID NO: 62829 - DNA, 1099 bp, Cannabis sativa
atatcttactaaacatggaaagatggtaattggaaatcatacattttatatgtgtttttattctccacaaagataggacacgactttaggcaactgtcaacgtgatgtggcatccacatcaacatataccaatcctatcatgagtcatatttcaccatataagcccaagtcaatatggtacttgtaatcaccccattcgttgataaaggcgaataagtaggaatcctaaggctcgttaatgccctcagccacgtaaaaattattcatgcaaagggttagaaactaattcttcaattcctcaggcaaaatctagagttaatacattcttgtaaaccttaagatttttctagctttaaagtaataatattgactagtggactaagactcattaaagccctaaccacgtaaaactccttattgttattttcattattgttgattaatatctttagctttcacatataataaatcactttcgaaaatctcggtaagtattttggtgctttcattgagagctagaaaaagcagtgataccatcaaaggttgtataccacataactatggtaatcattcaaaacaaaattggtggtcgtgatggaaacgtactcctatggacaatgtagatcttgtagctcaggcaaagataggagttgatggagattaaacagaggaaaccacacactactaaaaagactcaacgtcctaagaaacacattgatgaaaatcacatcaatgcgggttgagaggaagatcccgaagatgaagatcatgaagaatgggaaagaaaaagatgatgatgagtattattacgaactggatcctgtagtcgttgaaatggctgaagaactagctgaaactaagctaaaactggcagcacaagaaaaagtttctcgccagatgcaagcaacttttgctagacaggaggccatatttgagccagaaaatgaaactctaacaccaatattcctaacgatcccatcccacaagataataatactgcgaaaagaattgaccctaaagaccttgaaacttttgatcctagtatggacaaaggaaaaggtgtcataggggatcctctatgttctttgatttgttagtt

SEQ ID NO: 62830 - DNA, 1027 bp, Cannabis sativa
aatccatttgcatttcgaagtacttgagatgggaaaggggatcttctctcccggtgtacatcttccacgttggcattttgaacttgtggggaaatagcaggagattgatctcaggtgagaaagaagttccgcgtgctcggtccagctcaagatcattgtttctttgtccagccatgctgtgaaacatatttttcagttcgtctagctgagcttgtacgactgggctaacctccttggcattctggtcaattttaattacatcagcatcattttgagcaggaattttagtacgggtttcgagctgcaagattgtagtaacattctgattttctactcccctccttatgttcaaatcattctttaggtcatgggttgctcccaacccttcgaatacagaagtgcctagctgcctcagcgattgattcgcttactttacgggtggaatggcaccatttatctggttggaaccatcaggtatgacttctcttgatgaattactagacaaggtctgcccgcctaccgcttggcccacgagtggaactcgtgactgaggattgggcggctgaccatttgcaatctgagaagtattcatcgctggatcttcgtctgtctcacccaagggaatgacgttcgacggttgatgacctacagtgtggtaggcttttcgtattagcacggtagcctgtcgactacgatttttgatctctgcatggtgagcccttaatacctacatctttttatccctccattcggcgaacataagcctttgttcgtcgaacgcgagatttactgcagcgcggagtttgtcctgatcatgatgtagggtattgttatgaccctgcatgagtccgagagcgtcacagagattttgtaactcagtggcatctccgatggttgtctgggtgttggtttcaagcggaacagttgtgttatgaatgcccttgttgggtgtagaattgttattcccaatctcttgcacaccaggcgcgatttcatctataggagttgttacaccattccccacgtt

SEQ ID NO: 62831 - DNA, 917 bp, Cannabis sativa
caatctctcattaaactccactcagttccccatgacatctcgtgacaacctaggataagtccccaaagccccaaaatcaatactcatgcccaaaatcaacaacccacaacctacatctccaccgtcattgacgtggataacaacacccaagccacccacccacgattctcacaaattttggtaagtttaattattattgagtgattttttcaatgattaaggtttgaaatgaaatttttggttggttttgttgattatggttgaggttaagaaaatttgttcgattttaagttgattttttgtgtttgggtaaacaattgatgatgtttgttcattttccctagtcttcatgcatttatcgacgtttagcgacatcgttagcgatattgaacgatatcatgcacaatggttatacatattaatgactagtgagatatagcgatgtttattgcgacatgtgacaacactggcattgttgctttgttgttgtaactaaatagcaatcttttgtgatattgttagcgatatatggcgatatgtttgcgacatgttacgacacctaggaattggttttttgtatttgttgttatgtactgactagtgacgtttaacgatatctgtgacgatatactatgatatttgtcgacctcagatttggccaaccgatagcagagttatattaatgttgatgtttgccacgtgttacacaataagaacaataaagtaaaagaacacgagattttataagggtttggcccccttagttagcaggtaatgacctactcccattttagttgtattggtactgagagataatactatttagatcactataggtgggatctgagatagatctcttaaggttacaatgcaggaattaaagatgtcaaatatcaagttaagagagaagtaatgat

SEQ ID NO: 62832 - DNA, 1062 bp, Cannabis sativa
gagtcgctgagctattaaaggaagatggggaatgggatattcctaaacttcagactctctttgactccggaactgcgcaggacataatcaaaggaggtaaacctggtggagtaggagatgatagatgggtgtggacaaaagagcctaatgggcgtttctcaactaaatcggcttacctggtccaggctttggcgagagccccagatcttgtcgtggcgccgagtctgtggaacaaactttggagtccaaggtcctggagcgacataaggtcatgtggtggtgtatcttgtcgaatgctctccccgttaggggactcctggcgaagagaatcaatgttgacgacacttcttgccccctgtgtggggctgatgaggagaccatggaacacttgttccttcattgcgatgttgcgtaccatttgtggagagcttccccttggggaatcttcccggtccaggactctagaggcaggatctgggattggataacttttatttggaatctgaaatcgaaaagggtggacacggacaagctatttctttacgcctcgatcgtggtggatactatatggagaataagaaatgataaagtgcatagctattatccctgtaacattaacactgttattgactctatctctcattgttttacagattatgctgcctgtttgcttccaccggtagtagatgtgcctcctcttggctggtcgacccctcctgaagactggatcaagattaactgtgatgttaaagttggcgatgactccatgtgtattgcggccttggctagagatcattcgggaaccgttttatggggtgtggccaacttactcaattttacagatcctttgatcggcgaggcggcggcgtaccatcttgctttggaaactgctactaccaggaagtatgattttattatggtcgagagtgattctgaagtggttataaatgctcttaaatgtatcaaggaaaactggaacattgccaattatttgtatgcttgtaatcaactctctaagaagtttttatcttgtaatttttcttttatttccagaaactgtaa

SEQ ID NO: 62833 - DNA, 869 bp, Cannabis sativa
attctgaaagtttatctgcaccaactgttgaactagaaatgcaggaacaagaacctgctgaaccagtagtgcaacaaccagtttcatctcaccccatggtgacctgtgctaaggctgggatctttaaacctaaagtctaccttggttagaccaaatggaacgtgagccttggtgtacctagctgcattgaggaggcactcaaatctaaagaatggaatgatgccatgaataaagaaattgttgctctcaaaagaaacaagacatgggtgatggtgcctcgactgccagggtacaatttggttggaaacaaatgggtatacaaggaaaaatggaatgcacatggagcctttgaaagacttaaggccaagctggttgcaaaggggttccatcagaggcctggaattgaatttagtgagaccttcagtccggtagttaagtcatctataattcgagttgtattaactcttgctgtgtccagaaattgggaagttacacaactcgatgtcaacaatgctttccttaatggaagattggaagaagatgtctacatggtgcaaccactaggccttgaagacaaagataaacccgagtatgtatgcaagctgaacaaatccttgtatgaattaaaacaagcacctcgtgcctggttcgacagattgaaactcactcccaacaactggaagttcagaaactccaaggctgacaactctctgttcatctactcaacagagcaagtaatcctacttgttctaatctatgcggacgacatcattgtgattggcaacaacactgttgaagtgaacaatttcattccgaaattgaacaaaatttttgcctgaaaggatcaagggcaacttcatttctttctt

SEQ ID NO: 62834 - DNA, 1455 bp, Cannabis sativa
  modified_base (1103)..(1110): a, c, t, g, unknown or other
atttctcataaaccaagaattttagttatataggcacactttatatagaatagatatatgctactttttttctattggcaatacaaatttaactatttttctgtgtacccatagctaccaccagtactatatctttatgttttaatttgttaggtctcgtatatataaatatataataaagatttattatagtccaatattcatgcctgcagtcaaataatcatggctccactcttgtatatgtatgaacaatatataattatgtagtgaaaatgaaagacaagagaagtttcctatgcatatacatatatactagtgagaacaatattgtgtttacatatatatatatattgtttgagagaaatgccttcttaagacttggacctaatttattatagctagccgacttctatgtattatatgcatgaattcatcgaagaatattatcaataactaaaaattagttttctatatcttttatgactatatattacgatatacaattaaagatgtataaatatccaactttgaaatcaactatttgtttgtgtgattatttttctttgaataataataaaaaaaaggtaatcatgatcttgctacgtactaatgactgatgatcatgcatgcatgaattagttaaagaagatatagtcttgtataatccaaataaataatgtcaatattagcaagctctttatttatatatattttctatattgtaaacttcaatatatagttattaaattattaatcgaatttaatcaaaaaaaaaatattaatcgaattaatgaataaatatatagggtcatcatttcaaaaaggaaaaaaaggtcatcgatccaaacattatttcttgttcatatatattatttcaaaatagtaccaaattgattaagttagatcttgaaaacacatataactaactaactaacaaagtaccaccttttttctgggttgaaaaggaaaagcatttcctcctttagcattgttatttgacacgtaattacggttgtgcaataccacaccctataattgattatatcaaattatatatatgatacttcattattaaaaatgtactactactactaataataatnnnnnnnntaataataataataataatatcagctaattaaaaatttttacctctaaactttaatgtgtattaaattatacttttaaacttttcagataactaaaaatttcccacaaactattaaattattagattcaagagcttttgtctaatttaattaacaggcacttgacgtggataaaagttaagatgacacgatttggtacgtgtcaaagttcggatacatatcaaagtttggatgacacaattaatctgtatatagacaatcatcgtgttaataaaattaaaccactacaaaaaactgctacttttagtgacaactttttagtcataacataatttttttgtgacta

SEQ ID NO: 62835 - DNA, 658 bp, Cannabis sativa
ctttcttcattcttaagtactaatttcttatactagggataaaatattctgaaatatcatgataaaactaataccaactaaaacttccgggcactacaaacacccaaactaataccgccatgacttttctagccattaaattgatctgctgttatcggacctaaaaattattttatttcacaaataacatatatttttacctacacttaataaaattttcgtaattaataaattacgtctaattttctcatttcataaaataagtctattttctcatattaacttagcaaaattataatcttactcaatttattcttaatacctatgttaattcataaaatatactaattataattaattactactagaacattatattcgaggtgtaagtcagaagccttaagagattatcactgaataactaacaactgacatatctaaccaagatatacatatctaattgagatataaaaaaaacagttaaaatgtgaagtggctaaataagggatggataaaattaatcatcacaaaagataacacaaatgacatgtgttagaagaaagtaataaatgaatgacaactcaaccatacatgcattaaaaaaaaaaaaaaaaaaaggtttaaaaaaaaaaagtttgggaaaaaaaaaaaaaaaaaa

SEQ ID NO: 62836 - DNA, 1162 bp, Cannabis sativa
aatatatgaataataatttataattagtcacaaatttttttgttgtgactaaaactaaaattttttgtagtgtatttcggtaaattttttttatttatttcggtatttggatgagagttttagtttatttttttttaattcctataaaaaaattaattatatatgaacaatatataatatcatgtaataatacttatttgaatcatttattatttatattaaaaaaaaaaaaatacatgtggaactaagttggacataaaatataataatatcaaattatcacatttaatgtaaaagtgtgtgaatatatatataaacgtcaaagaggttccactactacaatattaggtttagttgctcagatctagctaggtaatattaaaaaaaattaaatctaaaaggaaaaaaataacgtagaacctcctaggcttcagttatttagaaataaccgaaaccataaagtaacacaaagcaccttatgacttcggttatttccaaataactaaagcctaaggatctctgaacttataagtgagcttcaatccataataaaactcctagcaaaatcctgtaaaataccctaacaaaacccagcagtctcactctatttaaagccctaaaagccttgaaaatgctccgtctcttttttccagtctcgtccaccatcatcagccgccccaccgacacccaaggccgtctcaaggtgttgagaggcctaggacgaaatttgaaacgggtcattttttttttataaaaaattaaattaaatattatttaattttttttttttatttttgctctgagatatcatttattttaactcttttatctccatataataaataatttttctcacacataacctaacttaacgtaatatttgattataattaatagcatctttcttgaagtgatatattttaagacttttgtaaaaaaaaaaaaatcaattgtatgtcaaaaattatgttatttttttttaatgtatgttatcagtttttataaatgtaaaaagacaaataataattaataaatatactttttatttaaatttttagttttagagtaatttttaaaaaaattgtttaccaaatataatctttgttccttaccaaaaatatttatgacataatatttatttttttttaataatgtactttaa

SEQ ID NO: 62837 - DNA, 685 bp, Cannabis sativa
tttttttttgaaagaacataagttcattaaaattaagaacaaaagatgagaaacaaaagaaaaattctttccccttagtacataccaacatgtttatttaatggccgtttttttttaaaaaaaaatatatgcttatttaatgaacacagcaaaacgacttgcacaatgtcttggagatgtttaaagattttgatgtatcattatcatcgaaaaaataatataagatttttattattctaaaaggaaaaaatatagttaatttatggaaaaaaaaatccaacaaagtaagttaataatgctaaaaaaagcatgaagaaaatgtgacataccactttccattttgaattaatgtcaatacctattaaaacaattaaataaataagtaatgatatattgtcaatcaaaagaatgaataagaaactaatatataaattttaaagtgatggataataaaatataaggtaactgaaaaaaaaaattgttgttaaaagaagattcgttatgtattgtatgacgtttttaataagtagagagaatagaaatgaagcgatacaaagatgaagagagcggctggagagagggagataattattcatttaagtttagggatgttgtgatgatcaaatattaatatattatgtatttagattaaagtaatggtgattattaaaataataaatttata

SEQ ID NO: 62838 - DNA, 1538 bp, Cannabis sativa
  modified_base (470)..(474): a, c, t, g, unknown or other
  modified_base (1154)..(1161): a, c, t, g, unknown or other
tcttttgtcctattcagtagctctcaacagaaatgaaatctaccaacgactttattatttagtgttatttgacatgcaccaattgtagtaagtgctaataataataactatacttcaattcaagagcttggatgatagatttcaagttttatgtgattgtgtagttcattcagagacttcagtggggcgaagacttgaaaaatctaccatttctctcattaggttttattttgagtttagtggaaatggaaattggcggtgtgcattattaaaggccaatattcaaagcgtatcattacacaatttttcttttcattggtttaacaataatattatataggggcctattataataagaattgggtattttacttttagtatttctcttaatttaatgcctcaaattaactcttaaaaactacactataattaatatattttttttatttataattaatcttgaatattannnnngtaggttcaactaacaaattccaaacctaattttttatctttttattttatttctatttaaaatttaattttaattatatatattttttttatttgaaatgtacataaaaaaaatattttgattatatttattttttaaacaataattatacttataaaaatttataacatattcaacttataataattttataataatcactataatatattcttctccatatacataaaattagataaaaacaatattaagtactatttggaaaaatacatatataattgaaaaaaataaatgcatattacattggaaaacacatgtatatatttatattctatacacaacaatatataaatcaataagattcaaattatacaataaattattctagcacatatggtaagttgtcctaactcatgttaagtaaccttcatttgatgattttatacacttaattttttttctattttattttatttctttttttttttttttgaagagttttatctccactttatcattcttaataagggtgtttatctaatttatttcgcactaagtgcagatttcatattttagattcaatgtataagaaatattattgatgtcttatcacacgtcttattttattgtatacaacaattacaatttttttttttttaaaaaaaaaatctataagaannnnnnnntaataacaagtttaattaatatataatttatggagataacaggcaagtatggaacataataacggttctagtttatagtcattacttttcctagttgtcccatttggatcaaaccaagtaccacaagcttggttactcatgcttatcacaagtttagttactcctagttgctaatatttgttataggaagttttccctttaatcttgatacgatactctattgtgatctaacaactgtagtttacttatttgtgtgttggattataaagagaaattggaaaggccttctgggaacgcacagttttatctctccagtctcgtggtaccggacatgtcttcagagtacaaattactgaaggcggaaggctttatgagtg

SEQ ID NO: 62839 - DNA, 2017 bp, Cannabis sativa
caatgcttttcgaccattctccataacaggtacatagcgaacctcctctggaaccacagtcgtctcaaaagatgtaagcttctgagtatacacacactcagtcatcctatcatgaaccattgcagctacctcattgatctgaggctcctgcaactgacctttggtatacaacaagtatctccttgagcgttccaatcgattcacctctgtcaaaccgcaagcttgacaaattgatacagcatttgaagaccatgctgttgtaaatgataaccggggaccaacctcaattataaccatactcaacccttcctgccttttcttctcaagaaaactatcaacccccaaattctcaggctcataagtctcctgaagaagccacttaagaacggataacttatcgactgaaagttctgcctgaagcccaatgttgaaacactgctctgtttttaaaccaacaatctgagttgagactttagtttgaaaagatttgagaagctcagatgtagcgctatcctgaatcagcggcacccgataaaaatgtacaactccagcaccaggcttggttgtggattgctcagttaccggactgcccaagccatcagaaacaacagctttaggctttgcctgagcacgacacctcaaattcaatggaattcctcttctagggcgcaaaaccatgccccataagggatttgatcttggagctcgtgaattacgatggaaaacaagattttgcttatgtattccctgaaatcaaaatcaatgaaaaaacagaatgttacaataattttttaaaaaactcaaaaaaaaaaaaagcagtcaatatatatagtatacacttatcaatctccctacatagacaaacttcacatcactgaaaaatcaaacgcaaaagggcacacagaaacatacttgtaagaattctgaagtcgtaatttctcgaactccagccattctcactcaaaagaacagttcgtccaattaatctgaaaccaaaacataacttcatcaattgattaagcattcgtcttctacaaaactcccaacggtgttgagaaccaatccaaaaactcattcagcacaaaactaattacacaaaacactaacaactccaaaaacaacttttgttaagaaccgagaacatcctaacagtactacagcaacaaaatagttatagtacacaaacacatgtaataagtttgtttaccagtagggatttcaccaaccagtcaggggagtgtagaaccgaggccgaggcaaagaaggtcgacaaggatgcaaaacggaggcaaagaaagtggacggagaatgattgagttgagaggtaagagaagaagagagaaagtgagtggggtgtgggctgagacggagggagcggcggctgtgtaaagaatacgcacctgtgattcccccttcaaaaacactatacagccacaaaattaaattaattattatttagtatttgttctcttttttttttttcgagctaatttcttgcgccattacatatttaagtttttttaatttaatttaaaataataaacattatgtgtaattgtttggaaggatattgtttagtaagaaaggtaatctcatacatacattaaaataacaaaaaaaaaaaaaacattaaaaaaaaaatacatcgtactatactaaattttttattatttttaaaattttatttataaaaaataaatctttcaatattaatttttgttattttattattttttttagttgtataaaaatattgttaaaaaaattacacataaaaatgtaaaaaaattaatattaattttctcaaaaaaaaaaaaattatacataagatgttgaaggcgtagatttaaaaaaataaataaatcaatttttatgcagatgttacattataattaaagaaaaaccccttacttttttttaaaaaaaatatatactttattatatttattgttaaaaaattctctctcattttatttttcccagcacactccgtccaccacccacaaagtcccattcg

SEQ ID NO: 62840 - DNA, 782 bp, Cannabis sativa
atgacagtaatctcaattttttttgttatgacaatgtatattacaattatataaccatacaaatttttaaaaaattcaaaaaaacaaaaaattcagtgtgccaaaaatagaatttaaatagcctctttatcaaacgtgtataaaaaatataaacatatatacactcttttctatttttttttaaggaaggatttttattcaaatagaatcacatgttagaggagaattcaaaaatcagggacaagcatctgtctaaataaactctcctaaagaactagtaccataagtagctagtgcgtgggcaacaatatttatgagaaatagcattacaagagccaccaccaacaactgttaataacaaaatatcataaagaataaatgaataagaatattatcactctagaactatcagcccaactcacaaccacaaaaaaatcacattcaactttagaaatagaaaagttaaaccgctatgcaaaagaaagatccaacggcaatgcaagcaactcggccacactcactgaaaaatgcctagccgcacccaccgcccaagctccctataccacacaaaggctatcccgaatcacacctccaagcccaacaaagcctctacttggtacaacatagaggcatctgtgcacaacaaaacaaattcaacagaggcaaaactcatcgtgtctccctctacaaaattgagccaccacccacctggaatagaccccgatgctccatctgctgaaactcctccaaagcattacaagccaacccatcaagcacattta

SEQ ID NO: 62841 - DNA, 1303 bp, Cannabis sativa
tcactgattgaggggttttcttctttaaaaaaaaaaagaaaaaaagaaaaaaaaatatatacatatatatatacaaatatatacagattatctgatatacatatatgtatgcttttctttttccttttaattgataaatacatttatatgtttaaaaaaaaaataaaaaagaagaaaaacccccaaatcagcccatcactttcagcaaaccaaccctagccgtccaccattgctccacccaagtcaatctccaagctcgaacccagccgcaccattcacccctgcacagaccattcccatccgcacactactcaatttcactcacaacccaccattcgaatcaccacgtccagctccagttcaccaaaatcgcaccaccttcgccatttccactagcttcgaacccttcgcccagtcaacctacaccctctgcccaaccacatcgactcacaacccgaaccacaactctgcatccttcaccattccgtgagtcaccatcacttgtccatccatcaacaagctcgaactcgccttcagcaactcaccattaccaccgagcccccatttcgcacaccttcgagcatcacttcgctcctgcacaaccacgaaccagctaccgtcacaagctctagcaagcacatttgaccgaggtattcactatcgagtgctattcacacgcatcatctccgcagcaagaagttgaagcctgcacatttcagccaagtaaaagtaattccgggtttgagaatttaaattaaaaatttagttggttaaaaggtgttatttggtgaatattgtggcctgtgtatctgaatatttttatggtggaggagaatcggatttgtgttgctattctgtgattatactggtgataattgggctgttgaaagaaaaatttgtggctgaattctattaaacagaggacaaaatgccaaaaattaagaggtgtgctcataagcctcctgaaagagatgctcgagaggctaaaaaatttgtttcacaagctgctgaaaagaaataccttgattcagttcgccacaaagaattttatgtagagcgaggaatgataataggagatgaggactttggcagcatgccgccatggctgatagagaacattaagaagaggaattggctgcaattgtgcgaagatccggcatctgcagtttgtcaagtagtaaaggaattctacgcgaattttctggcgcatgaattgccagctgagattacggtgcgagaagttaaagtgaaattttctgacaaagacatcaatcattactacttgcttaaaaatgtgacttgt

SEQ ID NO: 62842 - DNA, 3407 bp, Cannabis sativa
atctcaataattcaagaaaaatttttaacgaccaaaaacattcaagagacatgatttggtatatgtcaaaattcgaagaaaaattgctaattagccaaattattatccaccctcgaactttaaagaggaccaaatattgaggaataagaaataggaaaaatgaaaacttttgcatcacttgcttaaagatgataacatatttattgccactaacatgaaattggatgggtgattattaatgaaagatgtacaaaagtcagtttaactatttgaatcaggacattcattaacagttgtgtttttacacaaaaggtaattttggcttattgtagggtttctcaagtcagaatcttatacttgctgcacacaaatgtcaaagctttttctatgcttcagatagatctaccttctcgctccctgccattgtgacttcagaagatgaatcagctacaccttctgcatcagatggtttagattcatgctttgcagcagcctgaagaacccggttttgaacagccgacgaagatggagatgttggtagtccaatgccattcgtctctaatttttcggctgcccatgtgaacgcctgagatccaagtctaacaggagcaagcaatagcctacaaacaccattattgaatttattacattacttgttttctccatgtcagggaataagataaacatgaaaacagtgtaaaacatcatatggagaagttttttacttcacatctcgtctgaaatcttcagcaccctcataagaagcaacccgtcgataaatggtctggtggaatgaaaaaatgcacaaaggttaaatatcgaaatcgaaagtaagtagaagtagaaagggactagggcagtatatagtgtacctgaacgatgccaaggacgccaatgaattgtagcgtcttttcccactctgtaacaaatgttataccattcttaaaaacctcacatagatagatcctcaaaacttgaattgaatagatatgagatcatgtatacacacctaatagaccatacaatgctgcagccaaaccctgcagatgtctcttatgttagcagaaagtaagattattgcagcgaaaaccaaaataacgaaatgtatcttaccacaccatatccaagagcttgtacaagagacggattaatatcctctaaaattgcctcggcttcctagaatataacagatttcgcgtgatcatacagcgataaaagccgagcgccaaatgtacaacaaactacacaaagtaaataccttgagtatggtaagtgttgactcagacttgagttccttaaaccgaagaccttgtttcacccaaaactggaaccccccttgaatcaagtgaggttgctgccaatgtatgataccacaacataaaaattagtactttcatgttgtttcctgcaattgcagatatggttctattaaaaaagaaatgatccttttaagttaagtcatattatcactttgtgggcaattttgaattgagacttttaactagcgcaaggagaagtattcaatatcaccttaaattcaagttaggaacacaaaccttaatcccaagttttctcaaggatcttgcaaacttagtttcaattagtttgatgtttgattgttgtttctcgtaatcccttttcattttgagttaaattttcaatgaaagtggtaactatataatcttgttatatgattaaatcagtcaatgctgactaataaaaatataattattagacaaagtattccaaacaaaaacaacaacaataacaataataattaataagacaggaatctttcatttcagcaaaacacaacacacaaaatcatcccattcagttcagaaactcaataataagaaataaaagctctaaaaatcttaaaaaactgaaaaagacttgacaaaagtaaataaacaaaaatgaagccttttgttatcttgtgattctgattacaaatgtagctgcttccgccgcttcataccaccttctgttctctctgtacaaaaacaataattatttgcttttaattatgagacagctgataattgaacatcaaccatgctacgagctaaaatagatccaattcgacataatgaactcggttaaaaatgaaacaagggctgctactcatatactaaaactatgatatcttactcaaatttaaagacttcgaaaattcctcttacaaaatcctacttcacgaatcaaatcaatttgactgtgaaagaaagagctaagaccttgaagaatcagctaacaaaatctaaaatgagaaatcaaatcaagttgactgcgaaagaaagagctaaggctgaagaatcagctaaaaaaatctaaaaataaggaatcaaatacagctatcaatgaaagaaagacttacttcaatcaaagttaacagatccataccaaaatcaaacatgatgaattgaatcaatttaacaatgaaaggaaggctcctaattcaaacaagtttaagatttggagaatccactaacacgactccaacatcaggaatcaccttatgtgtgattttgtatacacattatattatatctttactaacacagttctatgtatttgcttgtatacccgatatccacaacaatgctaggttacatagcatcatcaccaaccatcaaaataagcaaaaaaaacctaaagacacgtgtgctgatcgattactagtgtacttccttacaaatctacatagccaaaaccaatatcaacacattgtttatataaagcataaatcagtgtaagtgacatcaacacagaacttgtaacatgagtcgatcaaaacaaagtagacaactaaaaatagtatttgtaacagaaaaaactacctaaccacatcaagcttcagcttcaattggcttatcttcaacatcaactgcagcatcagttgcagcctcaacatcagcattttccgcaagaggctgtacttgctcgtcctcgggcagtggctcttcaacgtaatcattctcaaaagcatcagaaggcacttcataaattctaacttgaggtttagaaggatccttcacgagaacatacttgccctctttcaacttcatacacaagtccacaatagatttcacaatgccccacatgtttgaagtgttgagattgatctgagttgcaaactcttttggtttgtatccaacaacagccaaaatcacatgattgaaatggtcacgaggatgaaccctcgaaacatatcccaacttcatcaaatctgcactggccagaagggcttgtgcagtccatttagccaacttgttagcgttgttcttaagctcagtagccaaaaccgcacccctctgactctccaacttctgcctccaatcaccagagtacttgtgatcgaattcattaagagcattcaaggtgaggaaagatctctgcttgtt

SEQ ID NO: 62843 - DNA, 1112 bp, Cannabis sativa
aaagactaacctaaacactagtatcaataagaacccatcaaataaatctgaaccaaaagaacctaatttcttgacatatcaaaacaataaaataataatgaccaattcttatgcaggttgccaaatttttatcatactataacaaatttatgaatattccgatttgctattatgataataattgcctatgacatcatataagagtatgtataagaacaaaattaaaactctcccaattgataaacgcctagtgagacataacaataagtctcttattcggtctaaaaagaataagatttcatgtgttgtttataccaaaatcgtcactgcaactattacaatcccaattggctcactcccataaatctctctacccatccaattagtataataatactagttcagatactacaaaccaatactaccactactacaaatcattaagatactacaaatcatgatatcatcactactagtactactacaaattgaccatcatctctactagtactactcaacctcaagcactaatctgacaaaaaatagcactaataagtaactaaaatcacaaataaaactggtaacatttattctaaaaatcaaactagttcaaacatgaacaactccatccatacataatgcaaacagaaaactaactcatttaactcaaatctaatctccaaaagcttgaaactcaaaatacatcattatttacagcaaaaaaaaacaaaaaaaacttacataaaatcaaataaagagagatggatattgaagtacaaccaaaaatctaaaacaaacaaagatatcaaatatcaaaatcaggtaatggaaattaataatacctatttcagagaacttcagaaacgacaccctaaacttctaattggtgagatttacaaaaggagataatactgtaaggtaagaaactgtaaggtaagaaagtaaaacccatttcagagactaaacctaaaatcttatatttgagattaaatccaaaatccatttcaaagattaaatgtgaaagttaagcagagatttttttcaaactttccaaaccctatagattaaaaaaaaatacaagagaattatacctacaacaacaaaaattcttt

SEQ ID NO: 62844 - DNA, 1511 bp, Cannabis sativa
tccacaaattagggttcaatctcagaccacagacccattcccacaagatcgctccaccatagttgacgacaacacaaaccaagctcttacttctcgatcggtcgctaatgatcactccagccccttctacctcagcatcggcgatcaccccgaccttgtgcttgtctccaccgtcctcaacgacaccaattaccaaccggggaaacgaggaataaccatggcgctcactgccaagaacaagatcgcatttatcaatggatctctcgcccagaacctggtaacatctatcttaattcttggttaagatgtaacaatatggtcatgtcttggttgattaactctgtttcgtctgagattgcacaaagcataatgtattttgacttagctactgaaatgtggaacgatcttgctgagcgtttcaatgaaggcaatggccctcggattttccaattgcagactcaactcacccgacttcaacagggtgacaattctgtttctgcttatgggatgaactcaaagagttccagccaattactacttgcacctgtggtgcaatgaaagtattcttggattgttacaaccagaatcaagtgcttcagttcttgactggtttaaacgaatcttttgcctcggtttgagcacaaattctgctcaatgaaccccatacctaaaccttgttcccgtggtttttgctatgatcgttcaagaagaacaccaaagatctcttggttcaactgaaccaattccccttgctgctgctggtggttccacgaatccatcaagggccaagaaaccaaggccatcttgctcgaattgtggcaaacctggacacttagttgataagtgttacttcctccacggctttctaccaggttatggagataaaaagaaacaagaaaagggcaaagctaaggccaacaatgcctcttccaacaaccctaaacctgacttggatggaccctctatcactgctgatctctcttctcaatgtcagcagttgatttccctcctcagtcaacaattaaacaaccatacccctgctgatcccaacatcatgcctgctgcagcatccaatcttgcaggtaaaaactataattcacatcctataccttggataattgatagtggtactacacaccagatgtgttctaatattgcatgtttttccacattcacaactatcccatttcctaagaatgtgctcctaccaaatggacagcaagttcctgttaaaaatattggaactgtccatataaattcacacattactctccataaggtgttatacctaccaagtttcaggttaaatcttttttctgtttctgcatacatggccgaaacacctaattccattttgtttcattatgattcttgtctaattcaggatcctactcggaatgtagtgattgggacagctaaaaaatatggaaatttgtacttgcttcaacaagtctatctccctactgcagctgccactgtttcatcttttttttttccaataaaacaagtgt

SEQ ID NO: 62845 - DNA, 1311 bp, Cannabis sativa
ccttagggattactttaaggagttttgcaactatcttggggttgcccccttccagttgaaccccatctcatataggatcctcgcgcgcttgaggtcatataccatattttaggatgggagtgccctactcccttggaaatagtctatttttactcaataaaggtgggttcctgcaaggaagcgagttgcaggaggcttttactatctcgacacccacacgaacgatcgcaagatcatagctaggttgccaaataagacatagtttaaagaagacttcttctggatgacgggcctctctccaataagtacaaccgcctttcgcattatacgtaagttctctttctttgtaacttaactttgaaatgtatttatttgtatttttgaggtcgcttattaaactagtatctttttatagcggttcctcgaagaccagttcctactcctgagatagtcgagcgtcacaaaatcttgttgaatcttcctttcagtctgagatcagtgaacttcttatgcaacaagaccaatctgaggaatgttggccttcttgcctcggatgtatttacttgtgactacaaattacccaagtattcttcgtggaaaaaggtcccagttctagctgatgaagagagcgtggactacgttgctcgcgcacattatctcgagagaactgcctctcgagaagaaggagcattctgaggtaatcaatgtgggcagtcacccatagtgcttagggtcgaacgtaacaccctagtatctttctgagatagtcggtataatttttacacttggaatcccttcctcatagatcgcataacatataggtacgatagttggtacccagaattccacgttcagagtacctgtactaattcatactatgggattgctgagcagtataggactatgttggatagatcaggtcatatagattcaagttggaatttagatccactaaatccttatgacatatttatgatcacaggatctagggagtttagtgaatattatagtcatcttttgtcaccttctaaaaattacggtaactttctcaagtgggagtttattccccattttcacttatttattttgcttaaatgctaatgtacttccattgccttgaagatatggatctgtatttggagaacatgttcaagagtcctcccccaatcgacaagaagtctaagaagagagctgcccaagttggtgaggccttgggttctaccaaagaacccaaaaggaccaaaaccacgaccaacaagaagaaatcatcaggccagctcaccatctagccagccaagtctccagagaagg

SEQ ID NO: 62846 - DNA, 616 bp, Cannabis sativa
tttaaattattcgcttctttgaattcaaaaaagaaatttaaagggacaaataaaaacaaataattaaataattatttaatcaggggtttcagtaatatcaatagagttcctcttgctgatattccattgaatacgccgcaccattttgctggccacaactcttcgtttattggccatgaaaaatatagcggctgcggttctcatgggagcgtaagtgttggttggagtaaagatgtttctttagggaatgtgtgtgaaatggataagtttacaatccctttgaaacaattggcatgtccaaggttttttacggattctttttctattactagcctatttagtacgcaggactcgattggattagacatgttaatttgtctaatccaatgtttggacatgttagaagtctaaataatgcagctaatctcatctgtttgtgattatttatcccatctagcaggtgggataaataatctcatacatgtgagattttttttttatcgttttcttaattttgattttattattatattttaaatttaataaaaatctaaataaaagaattatcacacatttatttataattttttttatcaaaaacttatttattaaaatt

SEQ ID NO: 62847 - DNA, 524 bp, Cannabis sativa
acattaaccacttcattcaacttttaaaaataataaatatatatttctttattatacaacagaaacaaaaaaaaaaaaaagaaaaaaacaaacaagcaaaaacaaacaaaatagctatatgttattttttttaacagaatataggtatatgttaaatatggccacgcacatatataaatataatatacacgtcagctagtttaaaattacagacacacgtaaatgatacgagccaagtaaaattaacaagaaattaatgttatgtatatagtcatagcctatatatgttttgtcttatataaattgtttcctcttaagactgatcacgaccaacaattttttgttgcattaacattttgaccctcgcgtaaccggcaagttatgaaaaatttaagatattttatttttaacactgctataacctagcatattttttttatgaggtggcttaatatttatatggtcattggcaacaaaggtctatgtatatactgtataccatatataaacaaacaagtaatatt

SEQ ID NO: 62848 - DNA, 743 bp, Cannabis sativa
gaagacaagtgttacttttctctttgatttttatttaataacggaagagaaaaaggacctaactctgaatatatttcaattattatttaaatctgaatatatattaatttttatttagtatttaattatatattatttttttgaaacaattataaaataattataagaataaatagtttccatgaaataaaaatcattttaattatactgtataacaaaattaagtataaaaaatattctaattatattataacaaaattaaagtatacaatacaaaatatactaagtccctactaataaaaattgtacataaaataagtattgcttaaattaaaagtctaaagctaaacagtttgaatttttagaaacaaaataattttttattaagaaataaatgtttattattcattatattttgaataattaatatttaattaattttctattgaaatataatatcaaaattataaacatataaagttatacggtatatattttaaaattttttaaatgtcacgtgcccttcttttatttggggacttaatcttgcaattatactaaatgatcttaaattccacttactataagaaatctgaggtttagctgcaagtaatttacttaagaatatatatttgtagctgaagacagggtttacttacaaatatatatttgtagttgaagatagggtttaccaacaattatgttggcggcaaatttttccgcccattctaatcaagtagtgt

SEQ ID NO: 62849 - DNA, 1237 bp, Cannabis sativa
ggagcaagatggttacggtctggttcagtcaataacaatggtggttactctgctacgggaggaacgacaacgacttctgagcagtcttctggccgtggtgatggtcgggttggcgaggctaaaattgggggatcaggatcgaagattcagggatccacatttactaagccgattattgtggagggagaggaggcggtttacaaggaagtccatgctgatttagtgggagggtcaatcgatcagtatcctaaagatataaggggtaagtcgcatggtcaacatacagctgaagtcattatggaatataatggagaggatcctttagtgatattggaaaataaaagaagaagaaaaggccaagtatctttacaaggaaacttagacaatgttgggttgggccttcctaaactcgacccagcagataattctaaactaattgtggatgatggtattatggactttgaggaggaaagtaatgacaacacaaaaaacttgtctggggcgggttctgttttgcaggcccgccgggaattatgaatgttctaagttggaattaccgggggcttgggaaccaacgggcggttcaattcctaaaagagttggtaactcaaaagaaacccgattttatttttctctgtgagacaaaaagtggtaaaaataaaattgaaagattgggccggtcacttgaatttgaaggagtttttgttgttgaagcccaaggtagtgctggtgggcttgcttttctttggaaaaatcaagattatggtagtattgttgggttttccaaaaaccacatcgattttgtggtggagtcgactgagaaagggaggtggcgactaacgggaatctatggtgaacccgtacgtgctcaacgtaaagacacttgggatctacttcattttttggcgagggattcgtctcttccgtggtgcattcttggggatttgaataacatagctcatcatgaggagaaaaggggcggtcgaaggtatcctcaacagcttattgatgggttctgtgaagctatggaagactgcggtttggaggacatggagttggttgggcatcctttcacttgggagaagggtagaggtacagacaactggatagagagccgcctcgaccgtgcgttggtgaattcactttggacccaggtttttaatcttgctactcttttcaatcttgaattttcttcttctgatcattgtccattatggttggaaactgaagttaagca

SEQ ID NO: 62850 - DNA, 978 bp, Cannabis sativa
ttatctctattgcaaggcaacattggtagaagcttcaagaattcaagaggtgttgaacaaatttgaattggcttctggatagatcgttaatttctcaaagtcatctattttttttagcacaaacacgaatgtggccactcaaaacagcattagcaataggcttggtatgaatattgcagcccaaaatagtttgtaccttggcctcccaagtacaatgagcagaaacaaaccggctgtcttgggctttctcaaagagagagtgtgcaaacgaatccaaagttgggaatcaaagttcctttcacgtgcgggaaaggaaattttaatcaaaacagtggcacaatctcttccaagttacgcaatgactgtctttttgcttccattggaaataacgcaggatatggagaaagtaaagagcaagttctggtggcaatcgtcaaataaaaatgggaaagagattcattggctctcgtgggatagactttgtcaccataaggaaagatgaggcatgggttttagacatttacgtgactttaatttggcgatgcttgggaagcaagggtgaagattaatggttctacccaactctttggtagcaaggatttttaaagccagatacttccccaatgggaattatctcacgacatctttgagaagcaattcgaattttgtgcggagaagtgtttgggaagcccaacaactagttcaaaagggagtgcattggtgtgttggtgatggcagtaacattcaagtactaaatgaaccttgcctgccttgtgatgagtacccttacattactttatcacatccagctttagataatgcaaaggtacaaaatcttgtgagcacagaaggaggttgggatctaggaattcttaatgatttgtttaatgacagagacaaagagttaatcaccaaggttcctctgttttcttctatggtggaccgcctgcactagaagcttgaaatggcgggtctata

SEQ ID NO: 62851 - DNA, 1715 bp, Cannabis sativa
  modified_base (467)..(478): a, c, t, g, unknown or other
  modified_base (1423)..(1432): a, c, t, g, unknown or other
  modified_base (1486)..(1523): a, c, t, g, unknown or other
aaggaatggcttaacaatcaattcaaaatgaaagatttgggtgaagctgcttatgttcttggtattcaaatcatcagaaactggaagaacaaagaacttgctctctcacaagtagcttacattgataaggtgctagagagattctcaatgactaacactagaggggcaattagaaactggaagaacaaagcacttgctctctcacaatcagcttacattgataaggtgctagagagattctcaatgactaacactagaggggcaattaggccttctaggcttggtatccgtcaatctaaggaacagtgtcccactgatccccaaaagatagaggacgtgagaagggttccttatgcttcagcagttggaagtctaatgtatgatatgttgtgcactagaccaaaaatttgttatacagtaggaattgtgaatagctatcaaacaaactcaggagaggaacattggannnnnnnnnnnnatattctgaaatatttgaaaagtacaaggcattatgtgttagtctacaaaggtggtgctttaaatcccgtaggctatacccactcagattaccaagcttgtctagatgacaagaagtctacatctgggatggtatttactcttggggtggagcagttgtttggagaagtgttaaacaaatcgcaacatcagactctaccatggaggtcgagtacatagctgccactgaggctgctaaggaactagtgtagctaagaaagtttttctcaggacttggtgttgtacctggaatggaaaaatcattggttttactttgtgataacactggtgctataacaaacagtaaagagcctggaaaccacaagagaagcaaacacattgggaggaaataccacatcatcagggaatatgtggcaagaggggatgtattggtggagaaatttgatactgaagacaacttagctgatccattcaccaaaaatttgactgtaactacatttaaaaagaactgactgaatctaggattaattgagatgtactcattgttttatgttagtgcaagtgggagtttgttgggctttgtaccctaaataaaactttatttcaatgtaatcttttatattcatttatcaataaagaaacagatttatcttcactacttatttaatgtgttatttagttcatgtgatcatttatttatttatttgatttataaattcatccaaatccttagcacattaatattcttgtttattgtgttgtcaacacagtagaaagtgatcaagattgtgtgattaaatatactcctatgaattatcagtacatagggtttaactaataggataatctacaaagtagtttacttacaccttggataagtgttatctcctttccaggaaattggttaaagtaagcttggattggatgtatggagtatgcatcagannnnnnnnnnattgaacttggataagatataataaacttaccgttatatctattcaattcaatnnnnnnnnnnnnnnnnnnnnnnnnnnnnnnnnnnnnnngagatggttaggttctagttcagtagtattattaatgctcttcaatctgtttgttaaagttgaccaatggatcttcttgtgacatatagattaaggacatggtagttcaactcattggcagcacaaatcatagatacagaatctacagcttctattaggacatagaagtgaaacaatgatttccttcgagct

SEQ ID NO: 62852 - DNA, 625 bp, Cannabis sativa
ttacccttcaattacaaaaatgcccctggttcaccaacggggtcttaccatgtaattaatcatataaattcacagatattgaactatataataatataattccttaattatttataattatctaattagggttttgctaatccatttcataattccagggtattacaagccacctcgttagtatcattataatacgaagagcactgcaagaagaagcatatctgtacttaatatttttttcctataaagactgtgaggaaggaaaactcacatttagcgagaaataaccttcatagtcagcataaccgtttaaggacaaatacaaaagaacggttcagtagttattaaatattatcccatgtgcataaaaataaaacatggggaatgtccacatttcaagagcagttgtaaatgattagatctcaatgaaaataactatcatcctatacacatataaataggaacagaatccaggaaaaaagagacgacaaaatagagagaaaaactttattatacatttattaagagaattgtactctatatttaaatcaacatccctaataaggactcgtggagtatgtagattttaactaaaaaccacgtaaaatatcttgtgttcatttat

SEQ ID NO: 62853 - DNA, 863 bp, Cannabis sativa
tatccaaaaccagtgggtgttaaggataggtttcttccaatagctagtagggccaacgaattcttagagaaccttccatctctcttgcccttcaaaaattctgctatttctctcattccacaccgcccataacagtgctaacgttgtagttctccaaagctaaacttttacttcccaccggtttgcttattagggtctgtgtcaccaaacaaggcataacccagtccaaactaagttctttataaagtaatgaccaaattttttgagtgtatgtgcaatggaggaacagatgctcggttgttttattactggacttgcaacaaatacaccatcccggagatatgtccatgtaaggccttttcttttgtattacctcgtgcacatttactttccttagagccactaaccatccaaaaacttttacttttaccggagcgctacatttccatagagttttggtccattcgaagtcccttgatccgtgacttgaggtgaaccaaagaaaggctgatttgcaggagaaagagcctccgtactctggtttccaactcctattatcaatcgaggaatgggctatgttcacatgttccaatcgctgcaccagctccattaaacttgggacttcccagtctaacagattccttctgaaattaaagtcccaattagacaccctaaaaccaccttcctcaattattgccatgtctttgatgcacttattcttagaactagccaaaatggctaaatccggataggaggtcaatagagaattttgtccaatccacacatcttcccaaaatcgaattttctctccattccctaattgaaatgaaaccaaacttaaatattcaccatatagacttgca

SEQ ID NO: 62854 - DNA, 635 bp, Cannabis sativa
atgaaaattttatcaaatgcaggtaaattggtttccattatatgttgcttgctcttgcgatgttagtttaccctatgtctactttcaagattcctttatctattgtcgtaaaatggacgttatggttcaaaggttttggtggatcgggaatgtggacaagagcaaattcctcaccactcgatgatgggattttctttgccaaccaaaaaatcgaggaggttcagggtttaagagatttgaagattttaacggtgcccttctgactaagcttgcttgagaaattgcaactaacaaggagaagccttaggtaatttctttcaaagtcaaatgtttactgagtttttggaaaattaaatataatgaaatattaaggtcaaaaaaatagtattaagaagaaaggagacacgatttgttacgtggttggggcgccttagtcgacgaggtcgtattattagcttttttgtaatggagttcctacgacataaataagtattttttgtttatgaaatttttaaatcaagtttttcgaaccctttgcgtggaaggcatggtgccatatttataggcagctaagttaatgagccagacgaatttggtctgtactaggattttcttatcaaatgagtccactggta

SEQ ID NO: 62855 - DNA, 912 bp, Cannabis sativa
  modified_base (344)..(360): a, c, t, g, unknown or other
tatcagctcgttatatgatgtccgtaaaagcgactgtacaagaacgcagacatcttagacccaactagtctcgaatgcattctaaacctgcgagcttatacaagaatgtgaatagtcaactcgtactatagaagtcgcatacgttgttgtatttagtgtatgaaactggaaactatttttcatttattaatgtttatgtttttaactcagttaattgtaaatcaatgtataaacagattgacaatgaatgcaatcctggtgtaaatgataagacacttgctttgtatataaaggaatggtccaccgtgaaatataaggagagaatctttgcaacagtggactannnnnnnnnnnnnnnnnctgaaccactataattcccttgtgtttattattctttccagccttcttgttaagtatttgtgttcccggttcgagtactcgtcattctaggttaaatactcgcacttgttcatcaatttttattattattataatctattttggtgttataaaattccttcaacaacaaaatcagaactaattttgttcaccatacgtactatactacaataaataccactttccacaacgtataaaaataaaattattcataactctatttataataggtaatttgtgctggttttgagtctattttaaagaacttttaattagttttagtttagttttgtgctattttacgctttagtttgttcatattttcaggtttagttatttgtgagaaaagtgatcaaattatgaaataaataaaaaataatgatgcatcgatgaagttttggcattaaaacaacaataaattctacacaattagtgcgactaacaaaaatttcaagcctaaattagattatatgttatgattagattttagagaaagtcgaaacataaaagttc

SEQ ID NO: 62856 - DNA, 963 bp, Cannabis sativa
aaaataatttccaacagtctcatgttcctgatttaggttctgaccttaaagctcctctaagagttgtggagattgctagtcttccatctcagcagaaaaagtgagttgttatttttaaattttttttacgttgtataatagttgttgaacttttttgttttccttttttgaaaatagtaattgcggagcatttgtggctgcatttgctgagttcttcatccatgggaaagatgtcccaggtgactttagcatcaaagtttaccgcactcgacttgctgccctcttgttctcgtatggtcaaaggaaaaatgatgaaagtattgatagtgaggatgagaagcagagcaagtctttcaaggcttctaaattgaaaaagtagggtcattttatggaaaactttgttgttcttggttgattttcatttcagacaatatttagttttttaaagtttttaggtactctatacgttttatattatggaactggttatcaacttataggatatttgaaattaaccattatattatgttcatttctttttatgttttaacaacaactgtgttatgattttacaattaattttgttggtagtcaaaatatttatcatttaatttttgtcatcttatcttaatagattaccaactgttatgcaactttatttttcttcttatgatacaacttataaaaactcatatctaacttttaaaactatttcttttgaaattctttatgtaataaattcttaataagtatcacaactgtccagaaaatattttgcaactactagtaaattatttcaactttaccaattaatagcaatctatcaaaactaacatttcatgctgtcaaaattctcatagagatttaaacaattcaaataattcttatgtatctatttaattgcttgattgttgcatgtcttttgattctgaccatgttgaccacatttgctgcacctattct

SEQ ID NO: 62857 - DNA, 622 bp, Cannabis sativa
atggagcagtgactcttcaagagtattgagcaagttcttgattaggggcaaaatctgattgtttttgttgttttttttattttgatttgttgtttgagatgaatattacatccgtattgtcaagtgctaagattgttgttgaatattacatttactttggaatttttccaatctgtagagtaatgatagaatttggttttatgtaaaaaatttactgttgatgttctgagaaatggttttttgctcaatgtttgtactgacatttaatgtaactaatatacattttatttagaatatcattccaatactattttgatgcatattttgttttttggaacaattgatgcatattaatataatacattaatatattcagggtttcagataattatatattggctagatttattaatttatttatatagattagtgttactttatctcagacatgacactctttgtgtgtggctgttacttttactgtctgacaaagtctaacttgaatagcctacagtgacgcgtgctgagagtctctaaaagggtttagtgacacaccttgaagtgtcacgaagtactccctttccagtcatccgcattagtgacgcgaagtgaagtgtcacta

SEQ ID NO: 62858 - DNA, 557 bp, Cannabis sativa
aaatttctcaaagcttcaatctcgacaattaagtaattagtttgggataatactgtctctccaacactcttggatattgcctttaaataccaacattttctatagtcagagataacctcttttatctgaacttcttcttcctcctcttctaaattctctccgtacagaataaagctatagaactcgatccttttgtgagttcatagttgttggtgtttatcaccattgtaacaccaagtgtgaatcaataaagataagccaatggttattccatccggggagtagacagttgccattgccaagcaactgatcgaacctcgttaaattggtgtgatttgatttgtgttttgcgtttatatttttgttctctttatttgttagctcatgttattgcactagttgttacttctgctctttgattattttttgaggtgattaaaacaccacaagtggcatcagagcatcaggattcaaggatcaagatttagtgtttgataatcaacacttgatcaagattagttcaacaaagtttaaaattgacaagtttactggtgaga

SEQ ID NO: 62859 - DNA, 1212 bp, Cannabis sativa
  modified_base (596)..(601): a, c, t, g, unknown or other
  modified_base (637)..(640): a, c, t, g, unknown or other
tctctctctctctctctccctagaactagctagggttgggaatatttttgcttaattcaaggatttctagcaagcttttaatgattttaaactcaaggtaatgttctagctcatctattgttgtttttcttaagtttcaagttaggtgttttatgatttttctatagtttggtgttggagtgattcatgttgtttgagactatactctgaggttaaaattaggttaattgagctgaattgaagttagtttgtcgctttatttggttgttagacaaagtttaagttttagaactcaaactttagtttttaatggttatttttgattctaaacatgttaagttgttttgttgcatgaaatatgtctattgtggtaaattaagcagggctggaaggtttggtaaggtttggggtcgaattacgggtgtagtgaattttttagtgtttcttgcactgaaccggtcgactagttcagggggacctgtagaaaccggtcgaccggttagtccccaagaaaccccacagaactagaattctggttggggaactggtctaccagttggggaatttttgggaaccctagtttttcccattgttgnnnnnnttagggtattgccatgctatccatcgatagggaaannnntagtttcaagtttaagtccccagaaattgatttagcatgtcactcaccaattttacgaataatgtgatttaggggcctgtaattcgtcgagcaactgttccactcaggttggtcggcagacctaaatttagaaacgaggtaagattagtataatgatatgcataacatgtttagcgtgcatcttagttaagcttgttagattacattataatagcaatatcagtatatttagtattatgttcgatatcgacaaatgtatcttggcttaagtgctactcgacaatattacattggtacgactagagtatgactagtgtaccaagtataggttgatattatggtcgatagtactatactacttgatagtatcacatcggtatgactagagtatgactggtgtatcgagtataggctgatattatggttagtagtaccgttgtaggatcgttcttgactcagcgccgtgttggacaaggggatagggttatggttgggtgtatgggcaccagattataatccgagttattgctatgttattatttatgctgttcttactaagtctgttgactcac

SEQ ID NO: 62860 - DNA, 709 bp, Cannabis sativa
ccatactgctaacgtaccgtggccaaacgtcccaatgagaagctgtctccccagttttttggtccatttcccatcctggctcgggttggacctgctgcataccgtcttcagctacctccggacacctccattcatcccgcattccatgtttccctgctacgagctgctctcggcccacatcagcaagcttcaccccttcctccaggactcactgccgatcttgagtggatcttggaacctgaatccttgctggccattcgtccgggtacactcaaggtcagtcctcaagcactcatcaaatggaagaacctagccgagtacgaagcaacatgggaagacttcgctgtcattcaatcccaatttccagatttccaccttgaggacaaggtgaaacttcaagccggcggtattgataagccccctcttacttttgtttacactaggaagaggtataggcagcctaagggtggggcagcagtagagtacaactccactaggtgattctctattatgtgggaattgtttgggtgtgggtgaggtgtatgttaagcctcttggagtctagttataaataagtgttattttcctttgctgttgggtgtgaagtttgtaagaattgagaggagagaccaggctctcggaccctggggattttatcaatacaagagcaatttttatcttcttcatcttcattctgttattttctctg

SEQ ID NO: 62861 - DNA, 856 bp, Cannabis sativa
gattccaaactcaaccaagctttctagacctgcatattatacccctataaatcatttcaaagcaataaaacaactacccaagctcagaatctaaaatcaccataaagctccaagtttgagttctaaaactcaaaacttggttaaatctactaacagccaccaattcaatcttaaatcaacataatcaaacatattttaacatcagaaacatacctcaaacaacaacagcaataacatcaaccaatttcacaaatcatgcataaattcactttcttaaaactcaagaactaaagagagagttgctcaaagactttaccttagcttaggtcctcctagaactgctagaaatcacagcatcttaaagaataaacatggaaccctagctagttctaagggtttcaaagagagagagagaaaggaaagagagacaaagctttacttttccatgattttccaattttaagtaaatgaaatagaagttgttttattgaaataaaatcagctggaaataaataaaaatctaattattaaccatcatataaactcacatgaagacaaaatcaataaagggcaaaaagaccaaaatgcccttgccctcactaaaccttcataaatcactaaggggtattttgggaaattctaaaatcctaaatattctcgacattcccaatgtctaaattattgtcccgctacactaaaaatactaggatgtgattttaatagccaaacaccacgttccaatgttgccgggcccaaatcatgcaaaaattatgaaatttctatatatgatataaaaatgcattctgaattcaaataaattatcataaataaatacttcaatattaataaataattt

SEQ ID NO: 62862 - DNA, 1917 bp, Cannabis sativa
  modified_base (1609)..(1618): a, c, t, g, unknown or other
  modified_base (1834)..(1836): a, c, t, g, unknown or other
  modified_base (1891)..(1892): a, c, t, g, unknown or other
ctatatcaacaatgtgcacatctttttttttgttagctcatcacgaaagaactccgctattaagcgtgcttgacctgtgataatttcaagatgggtgacctcctagaaagaattcccataaagcatgcgagtgaggataaagcacgctgaaaacactcgagttggtctgtagggttagtcgttagtcctgaaaatagccagagtgacgtactcatgtataaatgacataaatctattgggaaagacccaatgaagacttaaagcatggacgttacagtgaggcttagcctagcccaaaccagacctattctggccatcaccacagtctaagtaaattatatattatacatactattaatagttttattatcttatattatacatataataatgttattttttaaaaaaatatttaatagtaaatattatttttttgctttttttcaaattcgtatagtcaaagtcagctttcaagattattcttgaagtagaaactgtactctttgaatattaaagatcatttagatggatttaataagggaattcttaattttgagaacatccatatcaaaattgatcgaccaaacaatcattgatggtcattgatggagtcactaatcaattgttcatcaagactacatcaaggaagcaggaaagtccgattgttgcagaactcgaagccatcaaactcgctttgctttgggcaaaagagaagcattgggaggacgtgtgcatcttcactgactctcaagtcattgtgaactcagtactgaatgaaactattccgaattggagatgttggtcccttttttctaaggttctggagttgaaaagaagtttagttaattgctcttgtgcttttgtaactcgcgatgttatttcttttgttgatgttttagctaaagaagctagaagttcctccaaggaacctctgaattgtcaaggggagggattttcccctgtggatcccatgaaccttttctcggtttaatttgaacttctttcaaaaaaaaaaaaataatcatagtcttgaattcactcccaagtgaaagctatgagcattttgtggatacaataatatatgagtaagattctcttgcattgcattaatgtccaaataaattatgaaaagaaaatctgaacttaaagaagaaagtttaggagagagattgcagctggtttgttgaagcaaagatgtgtaagttgaagcactttacatggatgatgaaatttgaaatcttctctttggcatacttttgttaaaatcctcttaattaagatattccatgtcaataacaaataatagtgttgacattggatcttgttagccaactataatatatagtaaggctgttaggagatcacctctaaaaggattccatttttagtctatgcccactgccaaaatctcaaaagagttcttctttctaaatacaaatgactatatagatctaattatttatggccaaaatcactttgcacattaatatttataatttcaaagaatatatttctagtcattattaattagcttttaattatcaataatatatagagaatgtataacaaattagaagattaaagttagggtgactattcaatggttacnnnnnnnnnntaaccatcatggttatattttttctttgacgtgtaatagcaggttactaataggtaaacatttcttttttagaattaattaattataaataatttttttaacaagatttataaataatttttttatttagatttaaatccttactctaattattttaataattaagccatttaattataatatctacaataaaatttatttttttacaaaaattannnttctttttacacaaattaaaattcgatctattcttataataaatttttaaataannaattatttttaaatgatatttaatt

SEQ ID NO: 62863 - DNA, 857 bp, Cannabis sativa
  modified_base (789)..(817): a, c, t, g, unknown or other
ttacattttttaacaaatgtcattaaaatattattattgtgacatcttttaaaaaaatgccactaataaaaatgtcactaattgtgatttttggtgtcgtgatatagagatcgatttacattttgttcgagatcaaatcatggccaaacaaatattagtctgctatgtccttgccatcgatcaagctgctgatattctcactaagtttttctcagcagatcgctttacttatctaaaatccaaactaaaaatggtctctaccccatttagtttgaggggagatgtaacagataactaagtgttttgttaaagtggttaaaagttagttgaggtgtcttctcaactaactgctctgttatttcaatttttctgttttggcttttcttgcgtttattacacttgtataaatactaatttctttcaattcaataaagtaagctgttcatttttttcttttcgtttctgcattctttttctttctctgcaattctgttttactacatatggtcactttcttttgtttaaacataataatgattattattattttattttattaactaagggtcttttgatattaattaaatatttgtattttttttttattgattttgtaaactcacctcctattttctttttctaagaacccattttgatcctgggagttgagaagacaccatattattcttatcttactcattgatcttttttatatatcttttttcctttttcctgtatctagttagttttaaatggacggtttatatcatttagggctcgtttggaacnnnnnnnnnnnnnnnnnnnnnnnnnnnnntattatattgaattgtattttatgtaatatttttatgtaa

SEQ ID NO: 62864 - DNA, 1438 bp, Cannabis sativa
atgttcatgttccagccaccactagaatatccacgaatctgaggatgtggccaaccctgccaactcgacaggcacaacaaacttgacaaataaaccttgtcaagttgacgctgccaacccggttagtcccaatgacaagactctaccacccagggtagatctaccattagcacctcctactgagggtttggccaacatggagcgacctctgggaaccacaactgactctggtccctagtattatgttgggaaacggggctaggaattggtgagcctcatgtggatttaggagaagatctcgaattggccaaacttagagaggttgtctaccaagtcggccaaactaaagaactacgcattgttggatgcgatgcatttgcacaatagagatgaaatttttttagatggatgaataaccaggagtacatcctccaatctcatccagaaaagctagaccgtcataatagagaaactagtgacctgataaggtggatcaatgaaagaactatagggagaggtcaatatcttattagagatcttctccaagagagactagttgacagatagggtagggtttatagacaaatagtttaacaaggtttgtaaagcacttggacggacctccccctacccgaaagtctacaagtcctgccacacagatctggtggcgggagcagtcagactctagcaactagcgacttggcgagtcaaccagggatttttggcacaacaacacccccacttggccagcctctggctagccaaccccttagtggcgcacctttagtcggcaatagggtgagcttcctccctggaacatttgggagcaagtcgtccaaaggccaattaccttacccaaggttggccgaccaaagccagatgtcaggtctagggctagccagccttgaacatatcctctctcagggtatggttagccaggtcctggccaatctaaggctgcaacccaatcgagaagggccaattgaccaggctcctatagcatcagatccttctatgcaagcacagttggatcaaataagagacatgataaagggcttggatggcccaaaaccatcaaaccttgaactggataggtcaacgggctcaccattcccagcatacataaatgcacttctccttccaaagatcaagatgccatcttagaagatgtacacggggaataaagatcccctagcacacctaaaatactttgagatccaaacaaatctccaacaagtatttggagatgtgcgatgcccaatctttccggaaaccctggctgaaatagcctaacagtggtattttaagctagccccaggaagatttagttcttgggaagaattctcctgagaattctatgctcagttctccacctcaagacaaatagcttcacaactggaggaccttgccgaaataaagtaaagacaagtgaatcttt

SEQ ID NO: 62865 - DNA, 926 bp, Cannabis sativa
acaagtgacaagtttagacattgtctaaacttactcagaatcagctaaagaattatctcctaatggagacaacctacattggaattagaaagcagttcttatattggaaataatttcagaggtgtttaggtaatcaaactaggtggaatttgttgaggtttgaccacttgaacttggtattattgtcggttttgacagttagctactctccccactaacttaactgtgacagttaagttatttatatgctaaccgagtacctataaaagggatgcctctcacttgtgtatgaaaagagacaggggtttagagagaaatagagagagtgtttgagagttgtaaatggcctctcttgtgtttgtttgagagtgtcactagtgagacacattgtaaggagcaagactccattgtgacaagggtttcatccctgttttgtaacctctgtttagatcaataaaatttcatctccacagccaatttaaggatgctttctcctgtggattaagctcatcatcaccttgattgtgtagctcaaccacgtaagtttttgttgttgttttgtgctttctttagttgttgttattgctggtttatgttatgatttatgctgctagttttatgttcaattcatgttcttaatcattgtgcgttgttcttggtgttttgttggttcttgttcggagtttaagactccacaactacagtgtgaatttctacaattgaggaagttatacaatctggtgttgttccttgttttgttgaatttctaatgagggaggactttctacagttgtaggtttgcaattttttgtaccaaatattatttacttgctgaatgcatcttatttttatcatttgtattttcctgcagtttgaagcagtcacaaatatctccaaagctttaattgatcatggagctttttcta

SEQ ID NO: 62866 - DNA, 3399 bp, Cannabis sativa
catacacacatacatatacatactttatgccaatcttacctcattttcaaattcaagcgtgttggtcgacctgaatagaaaacacgtgctaaacggaagcccaatgtcacattcacataaatgggtaaacaacttggataaaccttcttgaggatctaaacttaaaactagaggtttctttattgataactagcatggtaatattccaaatactgaggaaacacaaaaataaaaggtctaaaaactgcacaaatcggtaaactagattctcaaaccggtgaactagttccttgggccctgcttggagaaacggttaatcagttctaaggtcaactggttctctgcaggaaaaggtaaaaacctcaaaacttaattaattttccctaaatttaactaaactttccaaaacacctgtaatatcatccaagaacagtttccaagtaaaagcagtagcaattattcacggaaactcaaaacaccattattgagccatgtttcagttcttaaacttaaacttgctcaaatccaaaattaatcaacaaaaatagctcaaacaaacccaaaacatcaatattaatacgcagaatagaaccccaaccgaaaccctagcaaaacgaaacctaaatcccaacttaaccctaaagctaacaaaacttcaacaatacaaacgataaggttttctaggtttacctccatttgaaccactttaaatcctagctgaagcctcaaaaaattactgatgttgaaaagctttttctctggtttccccttgaagctgaaagtaagaaagagaacatcaagaaataggtttttcttaaacttaatttttaatgattatgtcttaatctaggtaaatcaataataacctaagtttatccactaaccaagtagtggttagcagccacttaaagggataatccacctatcctccatttattcaaataccaactttacccttattttggtgcttaaataataaaatggcttaggggtaaaatggtccaataccataacctcacctaaccccgatatttcaagctcaaacatatagttgtctcctaaaataaaaaggttctatgtttacctatgtgactttaatggccattagatgtattttccatcaccactgagctaaaatcagaaaaaaaaaatgcatatttcatatttagcattgataatactctcagagtttaataaaatcttcaaaattgagaaattataacctaatgcccattttataaaaatagagcccacaataaatataatcatatataataacacaatagtaataattaatgttaatttccttaataatctataatttaatcatgcagtcattacagaagtagagcataaacaacatctctgaatggttctacaacgactcagagatcataagttgtaagcaaagtttaagaaatgtgagttctggttatgacaagtatcctcctagggcatatcatcaaaaaagaaggaattatggtcgattaagggaaagttaaatcagttaaaaattggccgaggccaaggacagttactgaagctcaaagttttcttagactggtagtgtattactgatgttttgtcgaattattttctaagatttcaatgccaatgacagaaatgactaagaaaaactaacagttcgtaaggtctaataaatgtgaaacaaatttctaagagttgaagtagcgattgattacgacaccagtgttattttgccattagattaagaaatgtttgtggtatattgtgatgcattcagacagggtttgggttgcattattatgtaatctgatagtttcattgctcatgatttttgccagttgaaggtgtatgatacctaacacatgattttgaacttgctgctgttatgtttgctttaaaaatttggcagcattatcagtatggagaaaaatataagatctatattgaccacaagagtctcaactacttctttacacaaaaagatttaaatatgagacagaggtagtggttagaactagtcaaggattatgagtggatgattttgtatccccccagaaaagccaatgtagtggcggacgctttgagaagaaaaggtcttgggcaggtttgtagtaccataatgatctatcctcagttagctttagatatggttagggttggtattgaatttgcttttggaaaacttcataacctaacactccagtcagacttattagacagaatcagaggggtacaattgaaagattctgagttagtcaaggtttgagaggaagtactagctggtcaggcaaaagacttctcaatattgagcaatggaatgttactttaaaaaatggggcccacaacatatataatcataaaataaaaataatttatgctaattgtgctactaacccatattctattcatgcggtcattacagctggaattgaggcatttttcatcataacattcgcctcgtcaacatcgttggcatggattagccatcatcacagtatcctaaacatcacacgttttcctaatgcgcgtagagttcatacagttagaaggtaatgcctcgtgtacagagttagttgtaatccaaaagtcccccaccctccacatttggagatatagaaggcgaaagatctcttccattttaagattatccatgtgtccatggtaatctagaaagaagattgcaagctttcgccactattgagtcctcgaagcttgaagtgtaaatgttattcgtattttcaaaagggtaacaagtggcgtctccaaaggaggattaatccaaaatgacttagactacaacctttccatgaggggaggcctagtccaggctaaagatgggctcgagcccatccaaaacctagaaggctcacctctgagacgaggcttgtccggaccttaaaaggcctctagccttcttgagatggaataaatgaagccttctggatgaacattgggtcgcattcagagagggtactccaaaaggctccttgaaagcctagtatagggtgacagggctgccctctaacacctagtcccaccatataagatcttgtcccttacgtcaaagcatgatagtgcgagcaccaccaaaaaaaacatttcttttgtccaatatcacatatttgacatggccgaccatattggtgtgcaaggtgggatctgcacagggcccaaaaaaataaagggcccaatatattttttctttaatgcccgataattttttttaatgaacctaatttttgaagaggctaacaatttgttattagtcacttccatcacaattcccgaagcccattttcaattctattgatgcttttaagcaaaaaaaaaaaaaaaaaatctattactgttatttattatttttttcaaaccttttatttttgtttcttatcacttttttgttctattgga

SEQ ID NO: 62867 - DNA, 1079 bp, Cannabis sativa
ctgtggtttaaaccgtctttaaagcggtcaacgttgacatggataggaacacgttgccaaatgtatctcgctgaggcgtctcgcctagtacttaagtgagtgacttagtttactcgtattccagcaatgacatgagcattagtgtactgagcaaatttaagaactgctctttgaccgtaaggccttgcagactggacaatcatatccttcaggttattatacttagttgttataacatggattatatgctaagtgttccaataaccaatttgcctcatcgatacttctttacatacagcgaggtagatgcctcgctatgcgttgtttataactccctcaatattacgtctttcgaggccagatggtttctcgtcaatacatgaattaatagtttgcatatccctgtcttgcttaatactattcagccagagagttatggacacactctatttattttatatttaatgagttattctattttacatttaatgacataattatcattaaatctgttggttcatattccacgagattgacgcgtgtcactttctaaagtacaactaaatttcggatataacatatatatatctcaaacttaaactaatatttcacgtttttttatttcactcaatatatattatatcatataaaagtgatataccttacaacaatatgaatataccacaaaactaatatagatgatgcacttaatttttttgtttccttcatgatatactaaattacataaaatagatatatcaatcttttaaattaatataccacttaattaattagtttattttttattctttccctcaatattcatacaagacatataccatttttttattaagtagatatatcacattttttttttttgacgtaatcacatttaaaaattaatatagcatcaaactaggaaataaaaatatcaaatatttagtttaatattccacaatttttttttcttttctttttcatatactatagaaaataaatatagccatacctcaaacttaaactactattccacattttttcctctttcgttcttcatataccacccaacataaaaataa

SEQ ID NO: 62868 - DNA, 1240 bp, Cannabis sativa
ggtgctttcattgagagcctttatgaaaagctcagaaaaggcctcctgacataaaaaagattgatgacaccgaagataataatccttaagaaggaatcaatcatcgcctcagaaaagaaccattgagtcctcagggatctattgagccatcgcatgaacagactgcaagacctagaaaaacccagtattggggtacctagcttgacggactttggataaatggcaatcggccacttcctaaccaggttgatgaggatggcgcctacgacccaaacagatacataccaattgtggaattagaaaatcgtaatctgagtcgtcgattggaggaagcaaactggtgtaatgccgagtgacagcatgaaatagcggcagtaagggcaacacaggagaatggtacccaaatgaacctgaccttgggagaagagattcatgaggaaaacctggctgctcgctaaccaaggggcaggggacaatccagagatatactcggaactctcaagagatgcaacctgaggaaactgaggaaattctagagacacagcctgagatacgtggaatatcagacaaaaatcgccaagcctctctttaggctcatcagaaagaaatttgcacaaacccttatagggagaataagtctaatcaaaccttaagaagaaggacaaggtccgaccgcagtcacgacaagagtgatctacgatagcatctaaacttgaagaagcctgaccttcatcaacgactcggttcaaagcaaaaggattcactccatttgcgaatgaacgagttagagaataagttgagaagacatcaagtcacaaaacccaaaagacaaccggggcatggtactgttggagaacttgattcggaagccttaggatcaaagagaaaagacgattccaaaaggctgcccaaggataaaagacccaacaaatataaccctctttatgctgaatataccgagctcaatgaaactcaggaaaatatctacctcacacacgtataggaagtcgtttttagcgagccaaaacctatgaaacatgcgaggcgtaaaagggatccaactaaacggtgtgaatatcatggagatattggtcacaccacggaagagtgtcgtcagctgaaagatgagataaaaggtctcatatcacaaggacactttcaacgatatataaagaggcaggacgatgtccctaatcagctcgatctgcctagtaattcgagcgacccgagattataaccc

SEQ ID NO: 62869 - DNA, 5221 bp, Cannabis sativa
ttctgttaaaccaagaaatgcagttagataaacacttttaatatataaagatgatatattaatttataatttaattatttttattattcatttttgtttttttactaggtattattcatttttatatatttattattacatatttttattttaatttaagttttcttaaaaagaaataaataaaatagtttaatttatttttaaatcaaacgtaatattattttcaacataatttaatcttgttcagtccaatccaatctaatccaatcattttcaatccaatcctaaattccaaacggatcctaaagttcaactcaaacacaaccaaatactaaccaagaagagccacattttttgcattgatccccatacttttaagtttttttttttttttttttttaaataaaaaaaaactagagagagaattcagatattaggtaggtgggtaggttaaagactttcatctctaatagtaagtcatcactaagaaaaatccctctaacaaaataataaaatgtgaaagagatatacttcttaaattagataatccaaatttccaataactatagctacacatgaattagttgtacatgtttttcgaattcgtattagggtgttgaactctattttagtattcaatgattattcaatgctttcaaaaaagagtgccaagaatctaagtaaataaaaatcattactaatgaggctctagtagccaaattttattatgtatgtagtttgctcttacaaagtatgaggttcgagttgctgttactaaacacgaaccaagtttcgagagaaaaaaaaaaattataaaatacaatgtttatgattatgattatgagcatgaaggagaaaccaatccttttacagtcaatccaacattatggcaagaagcttcaacaacaccatctccttctcttaccaaattcacatttctcattgaaatcccttgacattcaaaagttctgctacaattaaacttaatcgccattttcgagaagctactcccggttatgttgttgtacacgacattgcttatttgtactgccgagtactgccacaccaaaaacccaatttctataagtatctaaccgttaagtgtcaagtcaatattcatgtgtcattttcttattactaagtgtaatgtttcggttcatatttcagatgcacatatcattactccgaaaaacaaaacaaaattgagtattttgtcaaacacctcattattcatatgtatcacctgttctggacaagggtccttctgatcacaatagtattggtctatgataatggggttggtcacattgtgcattgctatgttttggaacactatgttttctccataaccagatcctccctgcataatcatatcatatcataaatatcattataatctttatgtttatgttgtgattcaaaaataccacatttaattattgcttaaagcatgatatataagatgcacatggtatattatatatcagtaataatatgtgcactcaaaatatatatcaaaacattacacacagtaacctaataccttttttaactaatcatatttatctaaactgaaaacctctgtttctaaatagtgcataactatttgatgggtatgaataagtactattaagaaaatttgattttatgtttaatttttttttatttaattagaaaaatctctcatttttaaattatgggctaggattgtttcatcagttaaataaaaataaaaaataaattttttcaaaaaaaaaaattaagtttgacttaagtatattttttatatatatatatttgatatagtatgaaaagagatattttattaattaaatttgatggttatgtttgttgggtcaatagaggaggccaaatcacatgtcaaattcaatgaagtcaaaagaaaagaaataaggagaaaaaaaatgagtaagtattagaaaaatgtcacaatttagtataggatgaactgttttattaggctttatttttcaatgttgattaaggaaaaaaaaaacccatatcaagcctaaatgtgctcaaacttaattgtcttctcaactatttcaacacttttgaaaatcggttaacagggctcaattctcgaccgcaactaaatcgaatcccgaatatctttgttacgaaaaattgaaaaatcggtgaatataattagaattaaatagaaaaattcacctgccaactctttattctgactccattagtagttcctgaaattgttactctatccaccatcacattggagacttgggcttctgtattattaggtcctaagctaccaatgctgcatttacataaaatataatatatacaattattggtcatgaaaaggttgctaacaaaatcatgatcatgattatataaatatatatatatatatatatataataataataaagcttattgagttgaccttattccatgacctgggccacaagttatatctgtagctcttacattggttgtcccatttatgatagagatacagtcatcaccttcaaccaaaatatttaaatatactaattcagaataataatattccctaaatctggtcaataataaaggcttaattttgattatgtattttagggaaattctatggtacatctattatcgatatccagataattacaatcttaatttttttcgaaattcgaaaacatggctcaaacagtctgttacacgagtgccttttttagttaacaaacatgtgaaatagactgtttaaatgtcttgactaactataatatacactatcatatataaaattttgagattataactatttagatatcaaaaagacgaaaagggtgcatcggtgtactatggaaataggttgtattttatgagttttacctgttttgataacacaattcctcaactgaatattctgtgtgccttgcatatgaattccatctgtgtttggactattacttggggcagtcactaatagattctcaactttcacattcacacatgcatcaaagaaaagatggaatttttgtgcatctttgaatctcagattgctcactattagattcttacaatcaaagaaagttacagcctttattcaaaacaaaaccgaaaaacaaaaaaaaacattagaaattcatatacatattgtttcattttagttaacaaagactcaaaaattctaataaaaaattaatgaaatgaaagatgcttacatgtggtgcgcgaacacagggctgtttcgatggaaagatgccccgaaacaaatagaaaaaaattagtattttttttcttaataaaatatagagattaaaagcaagagggtgagaagtattgacatacaagggatttgttgactttgcaagagttttcccaccatatttttcccttaccatcaaaagttccaccaccttcaacattcatgttctctacactaacaaaaacaagccagtgccacctatcttttatgtagtcttttctatgagaagaagctttgattgttccagcaatctaatataaagagagtatttttctattataaagaaaacccttatatacatatataatatactagctcgaatagttagacatgtggtttgcctctacataaaatcacaaagagaaggaagggctctacggaaagtggggtttctatgatttggtaaagaatcaaacttatttaaatgtttctgttattccatatttccttggaaaaggcgaagaataatggagagttgtccgaaatggacactatatgcttttcgagagtcattctcaccttcccccggctaatcagtggcagtctgctcagggttccaaactcatgattgcaatagtttttccgagctataaatattataaggttatacgggggacctagtttcgaaaagtaccttcaatgtgagctgagaagatttgcaaggacctgtaaagttcattggcctaaggtgataagtcctattatttgggaccaaaaaaacacccccttcagatgaacaagccttcttccaagtcttcttaaatgcctatggtaccaattcaaattttctaaattatcaaatcaaatactaattaactgagcatatcaaaaatgaaaattttgagctaacctttctgtcatctgttccatcacccttagctccaaaatcgtcaacattaaaaacccgatgagagcttccatgactaagccttgaaacaggtccaagagtgttgtaattgacatcagacttgaccaagataggaaactcattctcatcatcatcatgatgatgagaaataacaaaagagaagtgaaaacaaacagaattgaatagagctagtaaggtgagaaaataatgaagttttcgaaacatttgaacttgaagtaacaaaggataatatggttttcaatgaaagcttagcaaagagttgagaaagtttctatgcacatgaaaatgaatactaaaatagctaaggccgccgttattgaatttccatttcaacaaaatgttgaaacgtgagtatatatatatatatatatatatacatattttatatacaattatagctaaggcatcacatgtaatagaatactttgctgacaagaatggtttttaccattctcataagttaaaactaaaacgtaaccagttactttcttaaaccttaaagcaaatgatagatacttacaagacaacatacagagcaaccataaatgcccaaaaagaccaatcaatcattccaaaaagaaaaacagaaacagcagaatttgatcaaaacccttaaaaagattcaaatcagggtttttggttaaccattaaaaattgaaactttctgaattatagtgatgacctaaaacgacccacaaaagaaagtcaaacaaaggtaagtactttgagtttgaatcagtattttaggttacaaaatcaatcaatttaccctgaaaaatcttcaagcgatacataaatggaagcattgaagagaattgaagcttaataaatgaagcaatttgatgtaaaacgattcagatttcaaattaattagagcataaaattattatccaatatcctaacctatatatcacttagacggagacagtagcttcttctgggaccaccggcaacggcggagccgaaatggaagttgccatttttagaaggggaatttaatgtagcaaaaattaatgtaacaaaattctaatgtgtgttttgtttttgttgttgttgttgttgttttgttttttttttttttt

SEQ ID NO: 62870 - DNA, 1299 bp, Cannabis sativa
cgagtcttggtctgggtctgggttcaggtctaggtcttggtttgggtccgggtctaggtccaggtccaggtctaggtctcaggtcgggtttgggtccgagtttgggtccaatcctgatccgggtctgggtcttggtctaggtcctgggttcaagtttgggttcgggtcaaagattggagttgatcccaaatcttttataaatattataatacaagctaatacggataatttattatgtattaattaagtaatacaatatacattgtattaaaaaattatgaaaatcaatataaacataaatatttttatatacacttaagtagattctgaatcctaaataatatccctaaatatcactgaaaatatctgctactgtcatttttaccattaaatgttttattttattttgttacaaaaaatcttaccattttcaggactaggttagagttttaatagcttagattaaataagtattttttcgttttcacgcaatttctatgggttcgacctcattcttcacaatctctacattacaataaagattcgtgcatttgcgagttgataaatgataaacgtactattttttgtaacaataaatttttggcgccattgtcgtggaactgcaagaagaaaaactactttaatccagattagtacaattcttctactagttatattacatattattacctattatagtaattattttctatattataataggcactgcttcctaattttttttttattattttaatttttgtgatacttgatgtccaacgcaatgctcaaataaataatatggcatattatacatatcttaattaatttagcgattgtagtacttaaaattctgaagttatttttttagcggcataaatatgttaattattttatatttataaaatttaagtatttaaattataaatatataaatttttatgtttgtatacactttttttgttccaaaaagctatattatacacttcactctttaatttggaatgtttaaaactattaatcctattaatatattcataaaattttaaataaatctaaattatactcagaagaaaatcacctaaaattatatatatatatatagtacagtaagagatgagatatggctattaatgagggctcatctttgttgaatataaaatctcccatcattaatcaataacaattatctttgtattaattataatgagaaatgctaaagcgcactagtggttcctagcagcctcatatatatcaatatcgttattggtccaactaagtatcgagtcccatataatt

SEQ ID NO: 62871 - DNA, 1041 bp, Cannabis sativa
tttagcttcatgttatacttttttaatattttaaagcattctgtgaggtctgaggtatgatccttactctttatcgatttcaccaacatattgttgacataaacctccatgtttcaccctatctgatttgcaaacatttcatttactagtcgccgatacgttgccccagcattctttagtctgaacggcctgactttataacaatagagtctcgtgttggttacaaagcgtgtatgctcttgatctggggcatacatttttatctggttatatccagaatatgaatccataaaagacattagctcgtgccccgcagttgaatccactaactggtcgatcctgagaagtggaaaatagtcttttgggcatgccttattcagatcggaaaaatcaatacaagttctccaagtgtcgttaggtttcaagatgagaataggattggctatccacaagggataaaatacctcgcgtataaaattgttgactaacaacttgtcaacttcctgttttagtgccccttgcctctcagaatccaagggcctccttttttgtctcttttccgggtagtttggatcaacatttaagtgatggcaattaattctagggtcgactctatcatatccccatgactccaggcgaattagtcttggatcgccttcaaaaagcttattaattgctatttgagatgctcgtctaggttcttcccaacatacacacatttggtgggatttcctgggtcgagaataaccttctccaattctttaattggttttagcaggtttctttcatcttgaacttggagatcaagatcttcttctttcttcttgttttctcctgccaagattgtcatcagctgatgaccgacctttctatgctgcaactctatgcgatagcaatcgctagccagcatctggtcgccacgcaccactcctacaccatctggtgtttggaactttaaagataggtacttgatcgaactgactgcctctagtccgatcagtgcttgacgacccaacaatatattgcaagccgagggcaggt

SEQ ID NO: 62872 - DNA, 545 bp, Cannabis sativa
gataagtgcggtggcatcaataattatgtgatatatgtttattgtgtctattagtatttatactgtcttgctgttcttggctcacgggtactctactgtgcaaaggataaatctattaataatcaaccacgagtgcgggagctttgtgatggattgtacatgtttaggccatactagaccaagcgggttgggtctaccagcgaatatatcttgtattttttagattttgccgcttacgtcggcatttaaaataacttgttacattttgcaaaaagtttaatgggatctcgaaacatgttgtctttttggattaattgtaaattttaaattattacaagttatgtacttattccattgtaatgaaagtttaaaatttttcgctcttattttctagtaatcccgaattagcgggattaggttatattactggttgtagggtgtctaatttcttagggcgttacatttagtcccaaaaaattatattgcgactaagaagctgtcactaaagataactaaaaaaccgtgtttttgcaaatgtcagttgt

SEQ ID NO: 62873 - DNA, 876 bp, Cannabis sativa
  modified_base (314)..(321): a, c, t, g, unknown or other
gttttatagaacatgttttcaaaaaatattttcacttttccaattttaaaaacaaaaaactgattaaaaaattgttaccaaacaatagctttatcaatattaatctatgtatatatataaaataataaaataatatattataaaaatgcgtattaacttaaataataataatactttaatttttctcaatatcactttatttatttttttattttattataataactttttttaataaaataattaaaattctatatatataacacactgaagaatttattgattataataataataatttattattattattnnnnnnnntattattattattatttaaaaatatagtaaacagattttaaaaaaaattattttatggagttttaatatttagtaaataaaattattaatagtaatattttattaatattatatattaaaattatttagtttaagttactaatattttttattataattttaaaaacaggttaaaataatcatgcgaatagcgactatattgtctggttagattatatgttttaagctcattctttattttaatttttttttcaaaaatttactattcatgctctacttatagaatactattcattatttaaaatatattttattaattattttgggttttaataattatttttacatgaagatatgtgtatagttttatattaatatttaaatgaataaaatatattgaatttaaaaaagttggatttgaatattatattttaaagaaattgatgcataatatcatataaaagtgtgttacgaaataatgaaaattaaattttggttgttgttgaccgaggttttcggcaactaatataataataataattaagagagctataa

SEQ ID NO: 62874 - DNA, 1594 bp, Cannabis sativa
tcctctgcagattgttcttttgggtttttgcacacaggagaacctctaaaacttacaacaatatgtttcaaaatatcttttcagctattgatattaacacaatgagttcatctatgttgttaatataccattttgatgctaatagctttagtttatttcctaattgattgggtttatggatgtttatttcctttagtttttggttttgtattgtatgtatgattctcttttttctctggtggtatggttcataattgtttctctttgtaagtttagaattttcaacctcacaaagacttatctcttgaatttgatatttgactactcttgaggaattatttgtttcttgtttcagagttttaaaaggaccaaatactattcctttgccttctcatgttaacaccctctctcaaatccttggtatgtatttatgtatttatatatatataaatataaatatatatagatctcatctttttatatgttttgataatatgtataaataatgatgtatatatatatatatatgtgtatgtatatatacatatattttgtatgacttgatttttgtccaaaaaaaagttatggggttaaaaagagaagttgttgttggtatgttaagtttttattgattataggataatgatatgtatatgtgtttgttattgtgatttttttagtttgaattgtcatttttttttttaaaaaaagaaaacaaataataattgcttaggagattttcaaatgacaaaaattgataaagtaggtgtaaaatgtaaatgtgcgagtgaaatattgggtaaggaagtgaaagaggagaatggatcatagagtaagttttttatttggttagaaataagttacatttagtgttttgataatgatttgatatgtattgtatggtctcatttattcatgtctaatattatttttttctattttagctataaattaattagtacacaatggtctattttattcccaattttgttgtacaatattgcttttattttctttgtaaaattcaaagtgattttaatgtactaaagttcccatgccttttatcttatattagcttgtttgtttttatttttttagatttatttttatcagatttattcttagattaagcttgtttttgttttttattttttcaaatttcgggagatctcactcatacttttcatgtatttttatttgtataatttgagatatgtttttattgtttgagatttggatttaaaatttgagatccaaatttttattttttggtgtttaaacaaaggttcatattgtgtaaacctatcacaacagatctggcagattttaacgctggttgatttttatataagggaagtttgcaatagctgtgtaaacatgtttgtagttatctctatggttattactatgatctatgaataatacttagagagcaaccaaatgttatctcttattattttaaattttcatatcttagttggtgagaagagtgtttcttttataaaaattaagtcttttgctagatttttgtatctttgccattgatctcatgttgttcatagaataggtttaagagaaacttttgaacaagtgt

SEQ ID NO: 62875 - DNA, 705 bp, Cannabis sativa
tagtctctcctctaatgggggtgagtatgatctctgatatatatatttttttttttgaatatttacttgagaaatatttaattatatatttaaaaatgggtctctctttctctctttttagttattttctctctgtggaaatgctagagcactacgacaaaggaaatcaaaaggaaaccattatttttgggtcagtttcttctcttatttatttttaatcatttttaaaaaactttattaataaatgaggtatatatgtgaacatgggtatatataattttttttttagaaaattgatatatattaatttattgaggtgtatatttttctgattaaatataaattatgtgaatgtattgatttttttttgtttttgagaaggagtgtatgtattgattaagagtatatatatttgtatatttcaaaaaaaaatattatacagtaatttaaaagttatacatattttttatatatatatatacttttttaatatatataatatatttatatatattattatgtatatgtttttttttttttgtcagaaaatacaattagaatatattatagttttgaataagtagtattttattacaaatttttatttgtgaaattattatgtttttcaatagcctaaataagtgcttatgtatatttatattttttttgaaataaagtatcatgtatatttatattagtaaaaga

SEQ ID NO: 62876 - DNA, 2005 bp, Cannabis sativa
cctcacctcaaaatcaacgttatcagcatcataatatatgtcctttcttcccccccacactgccttttgttcatcatcttcatcctcatcatcaccatgcatatcatcctcaacaccaccaaacttttctcgcaagtacttttgctgcttagccactgcaggtaatagaaataatagtaaccgatgagtactgtgattgcagaaaatggtgaccccctttcaactagtaataatcaataaatgcagtacataaatattctaaattagaaaatatgtgcactgtctacattaaataatgaaatgttctagattattgaaaatattgccaatcatgcctatcaagaaactttataccatttcccattatctcatttttctagatttttaaacacaaacagtcctatataatttattcaatattcagcctatgtatgatttgagagaaagcaactggaggttaaaaaaagcatattctcactttttgcagcaaaaccagtatccttgatgtcgtcttcatcttcatcttcatcactttcatccttgtctacatcaccatcctgtcccacaatgtcaattacatttaaggcataatcatcttaagatattcaggaagaaaagataccagcttaaaaacgaggaatatagagacataaatcaaattcattataaatcccatatataaaaatatgagccatagaaataagaggtattattaacctcaaaatcaaagacaggtagttcctcatcatcatctgaatcttccatatctttgttcaaatccaacgaaaccaaatccctctgcttgtgaacttcaaacacaaaatgtaaaaacacaatcactttctccacttaaaccaaaaacaaatagaagaagaaagaatgaacatacaggcatcaatttcgtcgtccatgtcctcattaacgattttgtctttgttatggactttcttttttgggaatctatcccctttcacctgactctttcctctctttcccattattcctcaataaagaaagcttgagttgagaattatacttcctttatcttcggtacttgtctggaattatccaaccaactgcagtttagtttttgggcaccattcacaaattacttatgaataaattaagaactcatattcaatatatctttgtaagagaaaaaactaaatatttatctattcattacagtcgataatgatcaacataatttaaacatgtaagatcataattcagtcccaaaatcagatatataaaattcatacactgttgtcaataaacaataaactaaacatggtgcagtttcttccttgttaagatcatacgtgttcttaataaggtcttttacggtacttgagttacccaaaacaatacatgaacaaatcacattttgcaagtgatatataaacacccacacaactttttcttaaacaataagtcatcaaacattcaaacaaatacaacaaagaatcatcttttttcttcttacaatctttaataagtatattaagttagcatcatccaataggtataagaatcagtattcggtatgcagtgctatgaatacaaactattcattgcatagaatcaccatatgccttctgtgagccaagctataagaataagtatggcatcaaaattaactcatttaggctgagaaatacctacgacaagctactcagaatacggcggagcctgtggacagtaatggcggaagattgcgtcgttgtggtggtggtccgcttgggtcggcggtggtcggtggctgagagcgaagacggcgggttcgctagagagaacggtggtggcggcttcaagtgatatgtgaaaggaaggagtgtgtgaactaatattagagagagtgatattattaggttgggttggacttgggcccataaaatactataggcccaacgaaagaagtgattatttcacaaatacaaaaaaattacagtccataaattcaattattattaatttgttgtttattttttattatttgtatgtt

SEQ ID NO: 62877 - DNA, 850 bp, Cannabis sativa
tcattttttaaataaattatagaactttctaaatcaagatacacaattagttacaataatagtctacaatcaagatataaaaaaatgagccaaataataattcacataatttctaaatcatttgacaaaagattaaaataaatcatatataaaaaaatattataacattataattaactttaagaacacctatattttgtttcatctaccgctaagaagacacgacagtaaaaattatagcagcaagttcattcaatctcgtagcttgagcactcaactattgtataagatacgttacttcaatactaacaattctttcagtctcagagaatttattattcccaactactaattacgatttgatggcgagtcatcgaagaacaaagaagaactaacaacgaaacaaaaccatgtcacacaaacaaaactaaaacactcaaaattatgtcatttagacaagactaaaacacttattaccatatcacagagacaagacaaacactcaacaccatgttacaaaaacaagactaatcgcagtagcaaaaatcgaatgcaaaatacaattttgaccacgccgcacctaagtctaaaaaagactggcgggcctggctggaaaaaaaagacattctccaatagctatagatttaagaataaaaaacctaatttttttccctaacaaattatcttaaaattaactttatcatttcatctcccgaaaattataaattttataaatttttatattattagtgcgaaaatattttttttttctttttatattttatggaaataatttaagaaaaagttaaaaaaaaaaatagttactttatactattttttccattttttt

SEQ ID NO: 62878 - DNA, 765 bp, Cannabis sativa
taggacttacacttagttatatatgtataataattgaataagtcaacaacccaaatatatgaacgtgtatcaatttttttaggatggtactaattcataatataatgaacgaagttttgaaaatggtggtggaccatggcctgataacctaatatatacctccacccttgcaagtagtactgccttaaataaacttacacttggaaaatcaaagtatttttatgaaaaaatttaagaagcaccttttatagtaaccttgcaatttgctcctaagctttgtggcctacatccatgatactaaacactcaataagaacaagaagaatcaagcaagccctagatttaggaagaagttgtgagaagggaagtttatgcttggcagcgtggaagtgaaggaatggaaattgggaaacggcaagggttaaataactaaaactaaacgcaccagtatgatgggttttgagggttcatggagtaagtatctgtcattgatagaattctcctataagattagttatcaggctaccataaggatgactccctatgagatgttgtatggtaggaagtgtgttctccaattcactaggatgaaaatgggaaatgaaaatacttacatctagaatcagttcagaagaccagtgatgctatagaaaagatcaaggcttgtatgactgcttcctaaagcaggcacaaaagttattgtatgtaaagaccgcctagtttaatttggaaattagcagttaattatgattaattatggaaatta

SEQ ID NO: 62879 - DNA, 3967 bp, Cannabis sativa
ctcttaaatagtaattttacatatgtataaataaactaataaataattaaaaaatgtataagtttaattattattattatgaagaccgcgcaacgcgtggttatattccctagtttataataatatgtataagttgtactacaaagttattattcgctgcagctctaatattggttataattattgatatattaccgttgtacttgcattcctttccagtggtaagtggtcatttttggtggtttgtcgttttttaattccatcaaaaaatttatgcaattttatagtgaagagtttgtatatggtctttttttttttatatatgacaccaatcttattataataaaaaaatcgtattaatataaattacataatatttgtttttaaaggagaaaataaaggacaaaaaaggtgggattagggggatttgaacccgacgtgaatcgaacacgcaaccttctgatctggagtcagacgcgctaccattgcgccacggatcccttgtgatgttttctatctaataacgtaaataacaatgtaaatattaacatctaatttctatggttccgttcggtgactttcagattccaaaatatcacatctaaaatgattattttgaagagaaggatgtgatgctttcagtcctacagtatgatcggaaaaaaaaaatgaatttatataagtttgaaaaaacagtactttgagacctttttattcattataaagaagaaaaaaaaaatacaccaaggataaacagtactatttccataatatcatctagagtcttcaaatccgatattggattggactatcattatgagtttcttttgttataaactcacttttgctcttacatctttaaaatccttaaagacaatcttttaagggaatggaatatcaaatatgattaactgaaaaacaaaaaaaaaaaaaaaaaggaaaaagagtgggattaactttggggtattgaacccgacgtgaatcgaacacgcaaccttctgatctggagtcagacgcgctaccattgcgccacggatcccttgtgttgttacctatctaattaacttaatatcaaaagtttaatattaaacatctgattataacgaatattcttgaagaatttaattaacgctagtgtttacttagtttgttggtaaatatcctctgctgtgttattatggttcaatatagtatcacttaattttctccaaccttttccctatctgtaagtgctttagttaaactgttaaaaattttaagctctatattcttaatttagagaaattatttcaaactattggtttttgagaataattagcttaattccatcacaagctgcaataacttttttaatcctaatttcgttagaagacataacaaataacgtttgattgtcttttattgtcccaaaaaacaaaaaaaaaaaaagccttgttctacacctaaacctttttttgtttagtaaagttgtcgtttgcttggtttacttgtcgttcgaaaattaagagccgatgaatttaatggactaataaattttatataagattaatttaaacaaaatataaaacgtcgtagcgtttgtagtccaacggttaggataattgccttccaagcaatagacccgggttcgactcccggcagacgcattttgatactcttttcaactctttttattagcacttttctttttcctactgttgtaatctgtagtgtacttattgatgatgtcattttaacttttaagtctttttgggcaaatttgcattatatataatgaaaaagataattagtcgttttctttttgttacatgaaaagaaaataaaattttaaactgtgtgatcaaaatgaaatgaagttgataattggtgctagaatatgcaaattaattaaacacttcatatatgaaacaaacaatatgtttaggtgtaaaaaaaataaatttatacagctaatttaatattgttttaacaaacaacaaaagtgtatcttgttcaatcattcatattactgttttagttatgttacctacctacctacgacgtcgtttaacaacgtaaaagctttcagatattgtcgtgtcgtgggagaccgttgaaaagttaaacacatcttcgaaaaataccattaattggaattaattaaagtcatcctcacccggctgctctgcttctcctcctgctactatcttcttctattctttcctcggaatctaaatccattattattaaaaaaaaacactctgctttgctttcctttactttttgtttcatctcaatagtcaacgccccccaaaaaagggaagaaaaaaaatgtcaaaaagtgtctgatttcttcctcaaattctgaacccaaaaccaaatccacttctgggtattgttcatttccctcaaattcatcaaaatgcctcgaagaaacaacgacccagaagccacaacaaccgggtccaccttcgtcctcttatgttcggctctgatctcctgtcttctggtctacggtgtcttatccgtggtcctcagacccagcgacttatacacctcgtcaacacttgaattggctcaaggggatggtgggaatagagattcgaggggtgagaatggagagtgttgtaagggagtcgagaatctggagctgtggggagctgcggttaagtggggatccgagtttaagttcaacacttctgatgagtgttgtaaggcttgtaaagctatgtgtactggcaatgatggcccttgtttatgtgacacttgggtcttttgcgggaatcaggagacttgtggctccaaatttggtgaggtgagttaacttcacttcagttttgaaccctttggataaatggtcaacggttaattttcttgaaatggttttggtctttcttgctttctattgaaattttctgagttgaagtattgtggggttactttttatattggcgtaagttatgagctaagctgttttatttaattggtaatagaaatttaaagaaagatttagtctttatgttgtctgcatctaataagtgatgcacaaactgtgaaagcttttccttttgtctaattaaggctatttaattttgacatgaatttcactttgtgaatgcagtgctggttgaagaaacagaaggacacctatgctccagatcggcaagaatcagatcatgcagttagttggacgtctgggatcatatttgggaaaggagaggtatataaatctgcattaatatgtatattgattgaacattgtgtaattgaactggcatttattgttctaattcttgtacttatttgcaaaatgttgtaattctctaaggtgagtttgtataaattttattgctgagtttggtcatagttattaatgagagtttcatttgtaactgttgtgctcaaattgaaaaagtaatcaaattaggccaccatggtttacttaaacagctgctgagtaagtttcccggccatgaataggctcgcggtgaagtttatctcctcatttggaagactagtcaagcttggtttgggctctaggattattatatgaaacaaagtgtgtgcttcagctagccaaagaatctagtttagttgcagatcgtaaataaactttcttacttggaaataggattgaattgcatcaaagattgtaactttcagaatgttgttgttagaatttgcagttatttgcccatattaaaattggagggtcattgttataatctttatttgtgtattttgttatcttcactctgttgttgttgaacttctagaaattcaccatgtgacatgtctttcttgttttcagggaattattgggatgaaaacaaaatatggaactctccacataaaggtaactatagtgaacttggtagctagaaaagaaaaagtaatagatgaaatttatgtaccaagatgacttgacttcactatttttactcttggatgaaatttatgtctcattaaatggtattgtgcttatgaa

SEQ ID NO: 62880 - DNA, 738 bp, Cannabis sativa
aattataaggagttcattccttaattaattttaatgttgtgatcgtgtttatgtgttgaaactaatttagtttttcccaatattagtattgtcttttgacatgattctttagtcttttccttttaatttttcctattagtcttatcttttgacatggttttttagtcttttccttttagctttttctggttcgagtcttgtcttttggcatgggttgtgtagctcagaatcatcatggtgcattcaagaaggggaagattagatgtgtttaacctgaaattgctgagataataagcattaaagaagcattgagttagattgcaactcattcgtgggatagaatcatgttggaaacagatagcttggtgtgtgtccaagcgattcagagcgatattttatgccttcacagtttggtcttattgttcatcaagatgttcgaaattcgcttttggctgtatcttttattgatttatgttttgtaaaacgatctgcaaataagttggttcattacttggcaatagactttctctcgtgtgcttcagttggaggactgttcgtctaaagtacgttctattgttttgaacgaatttattaattaataaatcttataatttttattaaaaaaaaataatctgatatgaattaacccaatattttaattaagtgaatattacgtgagtttgttacatgtagctataatctttttatatgttgtttgtttgtgtacatgaatatata

SEQ ID NO: 62881 - DNA, 756 bp, Cannabis sativa
aaaaaatgccatagaagagtggcaaacctataagtgccatatttttgtaacttttttacaaaatctcatatttgatgtaattttctcttaatttatgctaagttaatgttaggggtgcacatgagttgggttggctggattagaggtattttaatacgccaacacaatgattgcggtttggataagctataaaccattcaatttttttattgtacagcccaaccttacttagtacaataatataggggtgggttgggttgggttcattgggttgagatgaatattttaaactttaatatttatgttacaaataggataaaattatttaacctagtacatacataaaaaaacgatatatatgtgtgtaatatatttctttaaaaaaaactaaggtagtaggggtatcattgtgtgagtagaaaagttaacaatagtgattgattatcacattaggcttgttggtagaagtagtagagtagctataaaatacatgttagtgatgtgttttggttaattcacattctaaggttatcacaatataatttatttatgtatgaaaacataaaatatatatttgtatatattttggggatgtaaaatatattttatgtatgaatgttgtcttaaatttagaacatatttcaaggaatgggttggtttaggttatataaagttaaaatgtgtccaatctataagcaacccataattatatggcctatcacttttcaacccaatgagccatgacctactcttaac

SEQ ID NO: 62882 - DNA, 679 bp, Cannabis sativa
ttcacaaataattatcatttttcatgttttttgggattgtcaaaaattgaaggcaatcaagaggctttttcccatccaaattccttctaagttttaccttggtgtggacttctatgaatccctcttgctccttattggtatagaaggaacaaattggtccatgaaggagtttgtttatcatatatattcatgggataaacaactctttagacttttgagatacatatcatctcactttgactaatctcattttagattgttgggatcttatgctattcctttgggtttgttaaagttttggctgtgagacatggccttattctttgcaaaaggttgggttactctgcctttggtgttgttctagaagatatcggtgccttttgtaagaagtttgttgatttttcttttgtgcattgtaaccgaatggccaactctatagctcactaacttcccaaacttacattttcttcagagagcgttaaaatttagtggcctagccttccaagttgtgtttaatttgtttgttattctggcttgttttggctcaactttttattccggtttgtgtgactttttcgccattttaatgaatttcgtcactttgcttaaaataaaaacctttaggatcgaccctgaagcaagatgtacatttaggtccaactccaaaattgtaagaaag

SEQ ID NO: 62883 - DNA, 1076 bp, Cannabis sativa
  modified_base (692)..(694): a, c, t, g, unknown or other
  modified_base (741)..(746): a, c, t, g, unknown or other
ttttttttcttttcttcttcttcgtcttcttcgtcgtcgttttcttctcccaaatcccagaaacaatcaacccccaaccctttagcctccacactctttggttcaccacaagaataacacccaccaccatgaccatggtgatgatgaccgtgcatggttatgactttgtcgcgagccctaatttgcgatgggttcggagtatgccgagcgaggttatgtggtcgtggcactcgttgctctcttcgtccatcttgtcgagaacgtatccgacgattcttccattgtagtcttcggctacgtagaggagttgcggccatgagaggatgtggtagaggtagaggtagtcttcagatttgagtttttcttttcatagtcaaaatgttattttaatttgctactaatcgattttgtttgattatttggcttgttttgtttatctgtttgggtggaaaaaaagaataataacggagctaaatcctttgaatatgtttggtatatatctaaatgggtattactagttttattctatgggggcaatttccatagttgaatcttgtttgattatatatggttgaacttgtagggtggtgcatcattgatccaccatgtctgaaattcccaaagcttgcagggtggttactctggtgaggttagaagaagaagaagacgacgaagaagaaaagaaagaaaannnaaaagaaaaaaaaaattattttgaaattatttatttatttttatttnnnnnntttaaaattaaaataataatttagaccaataatatttcgacacgtggcaattttgaaaaaataaacggctcagttaaaattgggactaacggacaaataaaaaacatcagcttaaggactattaccgctattttttgaggttggggacttatctgtatcaaactgaactttttgaggacttttgccgcaaatttaccatttatttttatgtgagtaaatttagtcaagatttatatatatttatagagcattgttatactacaaaaatttttacttttagtcacaacaaaacttatgactaaaagtgaaaaaaattgtgactaattataa

SEQ ID NO: 62884 - DNA, 609 bp, Cannabis sativa
accgaaaacatcacaggacaaaatcgtgtccaataaacttattgtactaaagtatatctacttatttattatatagtactaagcataaaaatatttgaaataaattaatatttttataaaataaaaaaaaaaattaattacttttattttattttaaaaaaatattacttttttttcctgttgatttagcaaaagaagaaaagaggagtgtgttatatcgtcaacatcctattacgatctcttaatcaacctctgtgtataaaaatacatgtcgtaatagttttcttcaaaaaaaattatagcagtattcgttatagttacaacatcattcctataaatatttttaaaaaaaaatttgaataatttatagtgtcaaaaataggtttgatgttttttgaacacgcatgataatatggaacatcacgaactctgttttcagtgctgtaagctattctgaattttttaaaaattcataggtatgatattttaactataataaatacttctatgaaaaaatgttgtataccaaaatggtacgttttacatttatcaactcccaagcgcacgaatctttattgtcgtattgagattgtgaagaacgaggtcgaa

SEQ ID NO: 62885 - DNA, 864 bp, Cannabis sativa
  modified_base (26)..(35): a, c, t, g, unknown or other
ttgtgttttaaaaacttcaaaaactnnnnnnnnnnctcatttctaaaaataattttttaaaaccaaaaacagaaaacaatatcaaacatgctcttagtcttccttcaaaaaaaattctgaatagttagttgttccctccgcaatagtcgactctaattattactatttatatccggaaagttccttcagggtatgcttgccaatctgtcttagaataataataatatggcttcaatggtgtctattattgcaccaaaaaaattaatatttcccattgaattcaggtaatttgtaatatattatggaccatttagatatgttacatatcatgactttattgtttactagccacgattaatcatccacgtaacatctcatcaaaaattcaaaaccctcaatggctcaatattctccctaaaaagaaaagaaaaaacaatattctggttttttttatgttcctgagctttagctaaataccaaatgtaaatcaatttaatactaaatttccccgatcgatttctataattatgaaagtgattaaataaattaaaaaattattagaaaatatccgtcactttgaagaggtaataatttgatttccatttaaaagaaaatgaagcaataatttacttttaactatatatattttttcaagaaatttaaaattaaatcataatgtgtaaaaacaatgagtgaatacagatattactgctgtagattatattgactaataacaacaatgtacttgtccaacaaaaaagaaaccagaaaagaaatcaaaattagaagagatggcttattacatgttcatcgtgtatttgttcaacagtgtgagtagaaagctcgcagaaaagacagcaaaag

SEQ ID NO: 62886 - DNA, 1252 bp, Cannabis sativa
ttatataatactatgttaaacattaatctatatgtactaaaatattatatatttaggtgcccataaaaattaatactacgtataggtttacataaaaatattacataaaatacaattcaatataatattatacaatacaatacggtgtgtaccaaacgaaacttttatgtgtattgcatatataagattctggtattataattttaattgatttttttttaataaagttatttttgctgttcattcatcagaccataaaaatcaacaataattactgaagtgcacgcacacaactttctaatttatttttcttagatggatgttttgagacttttaagataactcaaatgttttattttcacattatttggttaaatattttgggtctttacaattttagtgactaatatctttgcgagtcccttgttttagtttgttttggggtaatttaattattttatttattttgaagttaatttaaagctttttaaacaataaagtttgagattcaattaatttcaatccctttcagctaaatcccaccaactaaagcacttataccaaacactgtgtaaatagcactcaaaagctataccaaacacttataccaccaaccaaagcacttatacaaaacaccctcaaaagttagcataatatcagtttaaataaaaaataaatgttagatggaatagcaaaaatggcgatatggaatagagaagtagtttgggtcaaatgttgaaagaaattttttcatgaatcatttatccacaaagagttcccctaactttcacctaccccttaaactagctaatacgtcatctccatttaatgagcatatagacagaactaaaaataaaatcttaagtccttataatgatagctatttgaaagtgtcatttttgttgggcccttggtttgctttaatgctagtttcaattttatggtttttttcataattgcataagttcttgagaaaattatatcataataccaacttttaaaaatatttatgaaaatacgcttaactattttaatttactgtgaataccttttttaaaaaaaaataaataaatgggtaggtgtgtaccgaaaatcaatatttctttttttgctagccagaatcagaaattctcaattttgtcttttatactctctcagatattagtgttgtttttttcttaactctcttattttttttaacaatgactttttttatttattatcttttgtctttttgtctatttttaatttt

SEQ ID NO: 62887 - DNA, 1052 bp, Cannabis sativa
cgtgtaaggctaaataaaaaaaagaatcgttaaaaaaaatcgttaaaccaacaattgccgttagatagacactttttatatataaagatatacaatttataaaattcataaaaatagcaataagttatctagacttcaattaaataaataactaaaggaataatcaattaaaaaatataatatactttctttacaataaaaaaataaaataaaaatatatgtacctataaaaaactaaatatatattcattttatttttctaaattgaacaattaaatgacaataaacaaacaattagacaacaatccaattataaataaaaataaaatatcaacatattatatcaactcaaaacaaatagaaaaataacatacaaaaatgcttaaaaattaaaagtaattacaaaatactttgaacaactcaaaaatatatgtacccataaataaataattatatacttatttttatattagtcaaacaacttaataacaactaaaaaataattgtataacaacactatacttacatatgtaaattaattggacatcaataaataatgtaaagaatttgaaagaaacaaacaagcaacacaactacagagttatataattttattttgctctttgatcataaatacgcataatatatataacaacaatcttgatatataattttattcctttcatcataaataaaaaaaaaaaaagaaaaacataacaactatcttgatatatgtaacataaaaaactaaatatgtatacatataattttatttttttcttaattaaacaactataaataacaaccaacaaaaaatttcataacaacttcactataatatgaaattaaataaaaataatcaaaacaactccacaagttgaataaactctaaaaaataataaaaaaaattatgtacaccgacttgaaaatatatttacatgtaaaaaaataaaatatatattcattttctcttagctgaacaactaaataacaaggaataaataactcaataacaacctactttaaattaaaaattaattaggcatcaacac

SEQ ID NO: 62888 - DNA, 1125 bp, Cannabis sativa
aggtttgaagtaggtagtacctgacagccaagggtccgtagcacattgaatattggtgccattaccaactttccaacgaaggcctttcaataacaattcttttccccatacgatccccctccaagttaatgaagggtaggaacccaaattcgcatctaaaaaagaagaattcttgaaatacctcggtttaaggattcagctgagaagagaatttggatttgaaaaaatcaaccaagcttgctttgccagtagcgcttgattgaaatgaacaaaactcttgaatcccatacctccttccacttttgattgagtgagagctttccatgttttccaatttatgccagataaagaagaattggaaccccaccaaaatttattgcacatggtctcaatttggttgataagagattttaatagtcgaaagcaactcatagcatatgttggaatcgattgtgcaactcttttgagtaagacttctttgccaccaatagaaaacagtgtctcttgccaagctgagagtgaattccataatttctccttaattttaccaaacaaaattttcttgtccctgcccaaataggatggtcatcccaagtatctctcgtgataaggctttatggccatttgtaagatctggtagaaattattttggatagcaggcaaggtattgtgtgaggaagaaagtatcgacttatccgcattaaggcattggcctgaggcatgacagtagtaattaagggaatgtttgatggccatagcagatcttctattagcgcgacaaagcacaagactgtcatttgcaaaaaataaatgggagactgttggtgcaccacgagaaattcgaataccttggagatttccaatatgttcctcatgttgaaataaccttgaaagaccctcagcacaaattataaaaagatagagggataaggggtctccttgacgaataccccaggtgggagtgatatgaccatgagtagaaccatttactatgaaagaaaatgatacactgttgatacatcgaatgattaggttcaccaccgcataatcaaatcccatagcaatcatcattctttcaataaagtgccattcgaccctatcaaacgccttactcatatcaagctt

SEQ ID NO: 62889 - DNA, 1186 bp, Cannabis sativa
tttccaaaagtccagctgaaaaatgcattcttttctagcatagaaaagagcaataaaaccaaataataaaggtgagaaaaacggattggaaacacaaagcaatctcaccataaataaaaaatattttggcatctaacttgctaaacaaggactttacaatctccccctttggcactttagataaccaaaataatttttaaacaaagaagtacctgcaaatcaaagttagcaagagcaaacaaaaacgccccctaagaaacacaatcaataaccaaaaaacaagctaacttttaatccaaagtaatcacaagtaccaaacacaactccccctggaaaaaaggtccagagttgagaaacaagaaattaaaaacaaattattactccccctttttgtttatctaagggccaaagaccaaaaaaaatacatgaaaatatagaaatatgtccaacaaaaacataaaaaagaaagagaaacttatgccccatagagcttgatcaaagaggacagctgcttggacatctcttgctgaacctcctgcatggcatcaagacgattgttcacttgttggaccacgtgcttgacctcttagacatctgctggagcagaactcgagcttccactagcagcaccaccagcagcagctttaggacgcttgggaaaagctccatcaaattactccaagggttggaatatggtgccagtaaggggaggctcaagtgtttcatgagagtaggccacatcttttcgagaggacaaaattttatagattaagttaggaaacacaagcttatgatttagctttttacctctttgaaatgacacaatctgatccaagatataggaagccaaattgatggatgctcccgaggtgatacgaaagagaaaagaggccacatcttgagacaccacggttttgttggaattgagaagccaattgctaagtgcaaacctcatgagtgatgcatgagcataagtgagatgtgtaatacgaagactctgcccagatttccactcaacccgtgcaccagtgagttcagtgagcatcaaatgtgatccatggacattatagcatttgtcacatcttctagcagttgcagagccttggaaatgtctttttcagcaaatgaaaaccaatgtcctctgacatacactttacgaaagaattcagaattctcatcaagaaaa

SEQ ID NO: 62890 - DNA, 845 bp, Cannabis sativa
tagagactagaggacctaaaaaaattttccaatccagaaatataagtttttttttttttgaaaaagagaaatatatgtttgttgactataataaatttactttaattcagaaaaatatgaaattttgaaaaacaaatttatagagatagcaaagacatattgttcccttttcagagagaactttcatactgaaccaaaaaaaaaaacttgaaaattacttaaataagtttaaactttgttagaatttagggagaagatgaattgggttccatctcaaaactaattggcaatgggagaagtagctcattcatcttatatatcacaatttattttcacacattatcaatgtgggactaactttaatataccatgctcacgttacgttagaaaatttgtagattttgaaacaggtcaaagacccaacactaaaaactggtacacattggccgaaaggtcccaaatggaggttaaaggggagatagcagaagtatctatttggaccggtgtacactttggctcacaacggatgacaaacggctttttggaccggtgtaacggataacaagtagctctgataccatgttagaatttagagataaggtgaatggggttccatctcaaaaccaattgacaataggaagagtagcacattcatcttatatatcacaatttatttccacacattaacaatgtgggactacctctgataaactttttttcaaatcatcttgtgaactattttatttattaaattaatgtaaaaaatttatactattcaacttagatatacttaaattagtgtccatcaaatttcacattgaatcaacactaaattagtgcttata

SEQ ID NO: 62891 - DNA, 787 bp, Cannabis sativa
aatcccaaggcaaaaccattggcttcgtacccacaatgggttatctccaccagggtcacatatcactcgttagagaagctcaacaccattctgatctcatagtggtctccatttatgtaaacccaggtcagttttctcccacagaggatctttccacatacccttctaattttcgtggtgatattgagcagcttatggcaattcctgggggggttgatgttgtttttcaccctcataatctctaccactatggaccaacaaatgagagtgttgacagtgatggtgataaggggttagacagaaaagggactggcgtggtttcatgtgtagaagatagtggttttgggcatgagacttgggttagagttgaaaatttggaaaagggtatgtgtgcgtgatatcactgctggggaagctcaatcgagcccaattggtaaagtatagctccaacatccttttatccaaatttcttttttcaattatttcaattttgggtatttaatgatagtctctatttctttattttttttttagtggatttaataatgtggaaagagatatcaagttcagttttcaccattagaataaaactgaagtcaaattcttattttgggatggagcctaagcaagtaaagcttttgaagcatgtataattataaacattcattgattgaaccattgatgccttactactaacactgatggaagagcactcgtaatatacttgatgaatttttaactacaggaaaaagttgcttgtttagtcgataatgaagcaaggcttgca

SEQ ID NO: 62892 - DNA, 1282 bp, Cannabis sativa
  modified_base (264)..(264): a, c, t, g, unknown or other
  modified_base (777)..(782): a, c, t, g, unknown or other
aattcataaataactataaaaataccaataatcaatgctaattgcctttactaatccatattctaaagtgcagtcattacagtatactgacacattggataagcgtgatgtcctttccaaggcattggcaaagcataccactatcggatgtatggagtatatattagaagggaccgatattgatattggatatgatatcataaacttactgttatatcattctaagtcaatatcaatggttcatcttaggtctatggatcttantcctgatatggttaggttcagctaagttgtattatgtattcaattgttaaaaaatttaatacttgatctgcatatttttctggactgttctgggacactgagggtcaaatatatttttgtacaaatatttatgcaggttatgatttttaggtttatttaaaatacagccgttatgctgccaaattttctagaaaataaaaaggaatatgttcttttgttatggtataatttgcatgctttggttatactgatgagagcaatgttcatcttgttcggtggatattgttgtttcacgacctagtctctgtgtcatcataggtagattaggtgtgcactcacctgtaggtgaaagacatagaatctgtacatgaattaaatctgaatcctgatattatggtggttatcaggtacaattacctggttttggatgtcattttctatgattggtattgagagctaggggtctagtggacagtgtaatatgtgtttgacgcttgattttgtgattatttnnnnnntctctactttgtttatacattttgatattggtaatgagatattttatttttacaaagataacccatgcaggaatttttttaaaccaagggtcatttgatattataagttgttttcctacagggctttataagctcaccccctattttctcccattccaagaactcagtttgatgctagtggatgaggattgtacggttgaggatgaaagtaaatattagtttagttttattctactatttaatctttctataaaactaattttgtattgcatggttggcgatgcttgggaagttgaagacgaaagaaagactgatgagatttggagtaattgaagaagatctatgcctactgtgtaatgacagcagtgaaactattgagcacatatttttctgctgtaagttctcgaaatattgcttgattaaaatcaaagggtggctgcaatgggaggtcacgactgtatacttgaaagctatatgcaggtggctgtcaaaggcaagat

SEQ ID NO: 62893 - DNA, 796 bp, Cannabis sativa
attctcatctcttctctattttctttctctaaattataatattacataatactaatatttcataacataatataatttgtttctattattacgtgtacgtattatatgttacaatcgttagaattgatgttacgtgacccttaggtttgaagcatgtgtttaaatagtttacctttgaccccaagaaacatattcaaacatgcatcaaaatcaactagatgaaagatattaatagattcagcagttttgactgattaagagataaggtcaatgtaagcttcattccatgtagtttcataaacaataaaaatgtatacatggataaatatggtcaattatcaattaccttttgaatataaataaaatgggtatgaattaacaaataaaaagtcaattttattattagaccaacaaaagaaaagggttactgttactagctattataacaaaacaaaaaacgttaattttactagagaatatttaatggtctttgtttgttgggcttcttttattacatggatattcttttggcttttcaattctttctcaaaagaaaatactattcagtaccaaaattacacgcgtctacttgtctaaattgatattccacgacataaatttagaacatattgctgaaaaatatttgtaagatttgtccacacacttcacactataaaagttacatttagtgataattttttagttacaatataaattttttataactaaatacttgtgactaaaacataacatttagatccaacattgtcactatagttttagtcacaacaagtat

SEQ ID NO: 62894 - DNA, 1796 bp, Cannabis sativa
agtatttttgtaagtttcccctattatacagctcttgctgtgattgctcttaacaaattttccatatataggcatttgcataataaatttttaatacataatctttcacacatactgccttatctaaattttttctttttgaaaaaaaatgtatataatttacaaatctcctatgaccacttgagttcagaaagattacttagtgaatataaaaaattatcaaagtaattaaaattatgaattcaatccataatctccggcaagattatttgtcatatctatattataaatgttctctgctcatttagtttggacagttatacataataattataaaatgctagactagaatctctttttaataaatttcttttaataaacttaattaaacaccaatgtgttaataaattaaattagattattttattcaatcccatatgaacttttttttaacttacatatcagaacacgtcaaaagaacacgtcaaaaaaacacgtcaaaaaaaaaaaaaagaaaaaaagaaaaaaaacttacatattagaagtaatttatagtttcatagctagctcatgattttacgattacccacatcccaaaacttcattttaattacttaagtgtgaaaaattaaaaatatatacatatatatgtacataatatgtcaattattaatttgctattcctaataatatatattagagaaaatcagtactttttagctaggtacatatttacactggttcttatttgatcgattataagtgactaaaatgtttatccttataaatgattggaaggtgaggaacaatataaatatatatgatcaatcatataaactcaagtatataaataataatttcatgataaactataatttttttggtcagaaatataaacatatacataaacaagatgtcgtgacaaaaatatgaggtactttgtacttggaatataattacttataaaattgtgatcacacttcacaaccttgctgaaataatatctaaattaatacatctaattaatttacaaccgcaaaatatcaaaaaataccattttatataaagttctattttcagcctaaaactgaattagtggatggaatattatagatcagtggtattggggtaattaattaattaaactgagattaacatggctgatgacattacaatttggactgtaatgcaatagcaaattaaagagagaggagaaaggagggttttcaattatcaaagacccacatgcaccacttgctaggtctgcaaattctatctttatctatacaagttcaaaacctcatagctttgaggtccacttgctttaaaagcatgacacgtgtctcctcccccgctttcttcgggtctaagtcaaaaatcaatcttggattacaattggactagtcttgaattacttttaattaatcattcgcctttatcactagtttactttaaggttgttaatgcctttgctctaatttgttcaaaagcaaacatcaaataattatatatagaagaattagtaaatttgctcctgaactcatctcactaccgacttgtgcctctaaattaaatatacatgatgttaaaatatctcctcaatatattatcagtataataatgtcctacatttaggtttttaacaatatccatttgatatggcataacagaatttggtggtagttaatttttttttgaaatattaaatacccctacttaataaaaagggaattaaaaagaaataaaaaaacaaaaaaagcatactataatttctcaagtcgtcttcttcttcttct

SEQ ID NO: 62895 - DNA, 1032 bp, Cannabis sativa
tgtcgagaatcatcaattagatcaacccccttgagagttggattttgacccttgtagagtgcttaggaatagatactacttaaatagaaaccttcttgatgttggtgttggcaactcaccttctttaacttggagatcaattgtttggggaaaggaattactaaaaagaggattgtgttggaggattgttacatgttcaaatgttctttgtagagatgactcttggatccctggtcatagtctttgcaagcctttttatttggttaagagaacttggttaaaatgaatgaggttgcgaaaacccattcctccatgaacctttgctttacagagaaaattctaatttttccaatgaatggactgtcccgaagctgatgagccccacaaaaacctagccatgagttgttcaatttgtttgcataacttaactggtagttggaaacagctcaaagcatacgttggaatttcttgaataacgacatttaataaaacctccttaccaccaatagagaaaaattgttctctccatgagtttaaaagtttccaaatgtagtatgtattaccactaaaaagctaatttttatctcctccatcaaagaatggtaagcctatgtattgctcatgataaggttggattgtcataccaaggagctgctgaaagaagcttccgtcagtagctctattgtttggagaaaaagagagaacacatttctctatattaatgaattgctttgaggcacgattgtataagtaaagaaattgctgaatggctcctgttgaagattgattagcatgacaaaacgacacagcatcatcaacaaatagtagatgtgtgacaggcagagttgatctagaaacttttaaaccttccaatgaagcattcctttcttcgtaatgcaacaatcaagaaaaaccttcagaaaaaataagaaagtggaaaggggataatagatccccttgcctaatgcctctttatggcaaaccatcaccattgatagcaccattaacaagaaaagaataagaaacagtctt

SEQ ID NO: 62896 - DNA, 1054 bp, Cannabis sativa
  modified_base (294)..(325): a, c, t, g, unknown or other
  modified_base (716)..(716): a, c, t, g, unknown or other
aaataaaaatagttatttttaaatctaaaaggaattaagagtatttgctgacttagtcaaactgggggattagccttacgattcttgattcaatatatttttttttaaatttatatatatttattttttaaaaaaaatagccttaggattcatataatttaatatatatttttttttaatttatatataatttaactgttttttttttcaagaaattttactctttttcgtacacctattaatttgtgttaaagattagttagtgtatagtgtacattattattattattattnnnnnnnnnnnnnnnnnnnnnnnnnnnnnnnntattattattattattgatgaaaagtacttaatactattatgacgctagctaaaattcacgtcttaaaaaaatgctaaaatttgattttgttatttacttatttattttcttgaaaaaacgctcttagatttactctttatagaaacccatattaacttttcatattacaatatgaagtcaataggaaattatcatataaaaccaaaaaaaaaaagtgcatatctttattttatttttttttatccttgaaaatactttatcttattcatagatatacatgtatatctatttacttcacaataaaagtaaagcattagatgtctttaaaatatttaaagctgaagtagagaaacaatgcaacaagcaaattaaaatagtgagatcagatanaggaggtgagtattatggtagatacacagaagatggacaagcacctggtccatttgcgaagtttcttgataaaaataagtttgttgcccattacaccttgcccagtacacctgagcaaaatggtgttgcaaaaaagaaaaaccgaagattaatggacatggcgcggaatatgttagtagcaactctaattttcctaaattcttgtggactgaagctttaagtacatccgtgtacatattaaaccgagttccaacaaaggtaatctcaaaaaactccttctgaattatggaaaggttggaaaccaagtttaaacaatgtacgcatttggagatgtccat

SEQ ID NO: 62897 - DNA, 1350 bp, Cannabis sativa
ccctgccccgccgccgccgcggctttcaccggcgacgggacccgaatccgacccaagagctattcatgcacgggccatcgtcaatggtatctccgatcgatctctctacaacaacctcattaccctctactcaaaatcaaaccactcctcttactctctccctctcttcactcaaatcccaaaacccaacgtcgtttcctggacggccctcatcgccacccagtccgacactttcctctccctacgacacttcgtttcaatgctccgccacccgacactgcccaaccagcgcacgttagcatctctcttcaggacctgcgccgccgtgtcttctctctccttcggtctcgccctccactctctttccataaggctttcgctttcttcgcagccattttctgggtctgcccttgttcatttctactccaaatctcgtttgccactcgatgcacgtaaggtgttcgatgaaattcgtgacagagatgaggtttgttacgctgctcttgttgttggtttggctcagaattctcgccccattgatgctttagcggctttttatgagatgatatctagtgaggttaggtccacgatgtatagcgtgtccggcgcgcttcgttcggcggccgaacttgcggctttggagcaatgtaggatggttcatgctcatgccatggttactgggcttgacactaatgctgttgttggaagtgctttaattgatgcttatggaaaagctggatttgtttcggatgcgagacgagttttcgatgagaatttgaggattaacattgtgggatggaatgctatgatggctgcttatgcccagcaaggagataatgattcaattatcaagctttttacttcaatggaagctcaagggcttagaccagatgattatagcttcctagcaatcctatcatcactttcaaatgcgggtttggatattgagtcagagagatggtttactcgaatgatagaagattacaagttgaagccggggctggagcattacacatgtgtagttggagcattcagccgagctggtcggttatccgatgctgagaaaatcgccaacacaatgccatttgtgccagacgctgcagtttggcgagcattgctttcgggttgtgcttatcatggtgaggccgacatggcttggaccatggcgaaacgattgatcgaacttaaccctaacgatgactcggcctatgtgatcgtcgcgaatgtgttatcaagtgcaggaaggtgggaagaagtttcagaagtgaggaagatgatgaaaaaccagagggtgaagaaggaagtagggcgtagttggattgaagtgcgcggtaaggtccacgagttctt

SEQ ID NO: 62898 - DNA, 636 bp, Cannabis sativa
ccctacaaaatccaaaagacagcacagcataactttgggtcggtaggagctaacccatttgtttgtgtctgcttttagggttattgatccaattggaaacctccaaactaatctattatatcatataactctcctattttatatttatttctagtaaaacaacttgtcctcagcaatgatataaaaacttttcattattattattattattataattttattctgatcattagtttattattattataaaatataattactttactgtccctactttccatataggatatatggctatttagcattatggtattccaaaaaaaaaaaaataataataataaatagtgaggttttaatttaatcactggatcacttttttattatctttatgacaggatccaatgggatacatatatgattggaaaattctgtaacttacttatacggttcatctctatttatttatttttagtatcttaattttttagttaaattttttttcatgatcattaaattataattatttaaagtatcttgcaaaataatttgaaaaagtttaacatgctgaaaactgcattcaaacaatgtattacacgcatgattattttatttatacacgtgtaaaatagactgttt

SEQ ID NO: 62899 - DNA, 1336 bp, Cannabis sativa
caaatcatccaaataattctagaacacagacctatcttatccttctgcaaattctcaaaacctcttaggagaaattcattaacatcacaattattatttaaaaagtaaaattgtttaaaagatgtctttctccacacagttttagcactggaacactctaaagagggcatggaccatcgagccagagctgttgccgaggaccacctagcgagcgccgttgctgaggaccaccgacccaggtgcagtcgatgagaaccaccacatagaaccattaatctcaaccaccgtgtagaaccaccgaggacaatctcttagcctgttagccctgattctctctctcagccccgatcgatctcctctctctcacaatatcgatcacctttctctctcctgatctagagtttttcaatttttttttgcaatctttgttgttgatatttttgtgtatacatattcctatttggatatttttgtgttctttggatttagatatgagaaaagataatagttgtggggaaataaatttaaggtttttaagtatcagttttggggcggagatgttgtgtgtatatatatgtatatgtgtgtgtttatttatttgttggatttcgatttgtttaaattggtttgagtttttgttttgtaattttttttgtgatttggatttgaaaaataggttatgtagtgatttcggtagtggtgggtggttttttttttgtgtgatttggatttgaaaataggtagtggtggtagttttagcaccaataggtggtggtgattttagaagtggtgggtggtagtttcggtggctatggatggtggtggtggtgatattttgtgactaaaagaagaagaaggaagaagaagaagaatgaaaactcaaaaaaaaaatgtatgaaaaatatgatattttagggaaaaaaaattattctttaatgattttttttattatgttttttaaaatatatatttttaagtggggcaataaaattgtgtcacgtgtatactgtgtgcatatggacaatccaacataatacttaatagctaaatttaaatgcaaactgtaaattgctaacagtatcgtgattttgggggttttgccaccaaaaaatgaattttgagggttaagtgcaagcaaaatgaaaatattaggggttttcccgtaattaaccctaaaatttaaaacagatagactacaaaagatggattacaataacactaaatacactattttttcaatcgcttctgattgctattttcatcatcactatcatcttcaataattatgttttttctatttcttttggtaagagaattgctattatgataatcttca

SEQ ID NO: 62900 - DNA, 1182 bp, Cannabis sativa
atagtaaataaaaacaataagaaaaccaaagagacaaaatgtttggaggagttgaaaatattgatatgtggctccataggtattgatattataataaactttaaatatttttattttaagaattaatgaactacaaaaacaaattaaattaaattgtcaaataacgaaaaagttgcatatatatgacaattttttttacatagttattgattttttaagtttaacttataattattctgagatttttagaaacttaatcaaaacaatgaacgattaaagctaaaaaaaaaaaaaagaattagaagaaaataaacaaacaattagttaacgtggtttgagtgataatgagccttagtacacgagtcaataatattaaacattgtaataatggtgttttaacaacttttctctcaagaatatctatttaaattttgagtcttagagttagaaccttttacattatggtaagaccctatttttataagctatcatgcattatgaatcggacaaatcgaaacctgattagggtttgtagccgatcatggtactgttgaccgtgatgggacatgagtcgtagtttggtgcatggaaaaagattgtgtcgtagtagaagtgtaatctcaagggagaatacacatttttgcgagttggtagaggtgacaaatctctaaatttctcatgatatactttctttttctttagtaaaagtgttttaggatgtaacacaagaacttctaaaaaaaagtcacacatcttaatactaccatcgcagcctgaaattaggtacattagtgttgcccaattttgataaagactttgatagaagagattctcaataaattggtatttaagaaaccttaaattgtgatccaaccattcaaatagagttgaaaatattaagaaaacaatatatattcctcctttttttggttacaactattgttttagttatatgtgatctttcccatttttcgtagaggtgtgttatgttattcattaaatatagaaaaaattatcaccaacttaattacaaagtatgtataacaatctcaaaatatatataattaagaaagactaaatattatttttcctaatttaaattaataggatctcaatgatatttggcatcatgaggaaaaaggtggaaatgaaaatttaagagaaatcatataaaaaaaaaaa

SEQ ID NO: 62901 - DNA, 718 bp, Cannabis sativa
tatagtgatgctgattgggctagttgccttgatgatcgaagatccacggggggctatgcaatgtttctgggaaaaatttggtgtcttggtccgccaaaaagcagcaggtcgttgcacgttcatcaaccgaaagtgagttcagagctttagcaaatgctgctgctgaactcaaatggattacatctttgttgtctgagttgcaagtctcaagtattcagcctcctgttttgtgggttgataatcaaagtgcaatatcccttgctgccaatcctgtgtttcatgcccgaagcaaacacatcgaaatcgatcttcactttgttcgagatcaaatcattgctcagcaactttcagtccgttttgtcccttctgtagatcaaactgctgatgttcttacaaaacctttgtctacagaaagatttttgtacttaaagaacaaacttcacttagctacctctaagtttcgtttgaggggggatgtaaacctattaaccacttagttagttaatacggttttatatgttggtagttagttagttaaaagctgttgtaacggttttgttgatttcttgagtttgttttctgtacaattctctataaataaaatggactgagctaaccatttttgttaagcttttcttggcaacatttctttttttctgttctctttctctgtttttctactggtttgtaccatctggtatgtaccagttcttgctgc

SEQ ID NO: 62902 - DNA, 900 bp, Cannabis sativa
cagatgaggattttcttccatctataatagttcattgtctatcctaagggcatgcagagataccctaggagaactagacaataaaaccataatatcaaaaaagaaaacatcaatactgagagttgtcacttccgatccactagtagaacacctacaatataaagagaaaaaaaaattaatacataataaacatttaataaaaataaaattcctcttacaaataaaataaaataaaatatgaaaattgaatataatagtcacatagaattctctaatgtaaatactagaacttatctattttcatctccattgctgacggtgactgcactacatttgatgtgttattataagagaacctgaccttataaaattaaaactaaccatataataactttagaaaaccaaaactagccgtgttagccttgcaaaactaaaactagtcatactgaccttataaaattaaaactagccatactggccttacaaccaaaaactacctaaaaagaaggtcaagtgtatctaaatcataaaggctacaaaagagtaaagaatagatgaggaaaataaatatatgtaatatataaaatttaaaataaaacaaaataacttaattttagagttaaaaatgaaaactttttaaaataaatagtagtaaaaataataaatagtccacaaaattagagatagaaaatactgtcaaaatactttttaagatatctgaaaattattataaaatttaataacatttcataccttaaacaaaggtaattaaaaattacaaatttcaccatcaagagctatctttacgcgtgaaataataccataatttcggacccgtcggaatatctaattcttcattgcggtttgacggactttgacgctgtggagaaagggtggtgg

SEQ ID NO: 62903 - DNA, 3754 bp, Cannabis sativa
aatactcctttttataatttggtgctcccttatattatattttagaataattagtaattgtgcttcatgaactttcgacaatattgattttatcctttaaaataagcagtttgttaaaaattatctttgaacttttacacttatagatttttagtccttatgttaggtttcgtctcattatttcgtttaaatgctgacctatttttgtaaattagtaattttaccgcataaactttgacaactatcaaattttaccccctcaaaataaaaatgagaaagatttaacatttttttggtaaaacttaaaatattaatttagatctttaaaaaaatcattttgaataattaaagaaattagagaaaaaaattaaaattttaaaactaatcaagcaattttaaaaattattagaaaaaaatatattaaaattttaatttttgtaaaaataaattttaggggaacaagttgactctattttttttctctaaaaatctaaatttttttaagtaaacataatatttttttttagtttaatttctaactttatttcaaaataatttgataattttattgaatttttaattattttttaagatataagtttataaatataaataagtttaatttttctttaaaaaaatcttattttatttaaataatttattgaattttcaataattttggtttgattttttaaattacgtgtttataactaaaataaattttcagaatatatttttaagaataatttagattttttaagtaaacttaacattttataattaatttaatatttccatcacgttatttaataatttttattaaaaaaatttagaattaatagaatagaataatttttaaaattaatttttttaataaaatgagacaaaattttgtattaatcaaagttcagaaggtaaaaatacaaatttttaacggttatataactgatattttaaggagaatactgatattttaaggagaattttaaataaacagtatattttaagtggcaaaatcaagtagtatccacaaagttagtaaaaatactaattattctaaattttactaagaacatatatttttgtattgttaagttcaatgaaaatttatatggtgttctcttaaaaactcaaatccttaactccactactatttaatttcctatcttaatctaaatagtaccctatacatgtaccaatattaattattaaggaaactagaaaacagttgagctttgtgaaatctatactctatcgaggatagacttcagttatcatggatccgtcattagcagaccattgtgatgaattaggcatagactggtgaaactggtgctcacccgtagttgtcgtgctcgattgtgttctattatgattataaagggctggttgttgaggtggtggaagtatagcagagtaactgttgagcatgagaactattgttgccatggtgggtctatgaacaggattttcttgaacacataacaatcccatatgaatgcatctaaccacttcatttcttgagaaggaatttcttagagttggatccaacaattccaagaaagtcccttccttccaaagctcccaagcctgcaaacagttttacacacaatgatttcaagtattacaatacacatgaccttatcagagtaacttatatgaaaatgtcactcacatagctcaacaagtctgcaccctcgtgtgattgatagaaaaaattgtttctcttgccactgagaatctctagcaccaacactccaaagctgaacacatctgacttaaaagaaaattgaccatgcatggcatactctggagacatgtagccactacaaaataacatgattattaatacttctaagaattaaacttgaaggttaatgagtattcaatttgtaagcagtggtaataaataggacttttaagttaaaacttactaagttccaacaatacgattggtatttccatgagtttggtccacaacaaaaacctttgccatgccaaaatctgaaatcttaggaatcatatggtcatctaataaaatgttgctagcttttagatcacggtgtataatttttagtctagagtcttcatgaagataaagaatccctctcgcaatccctgatataatcttatatcgagttgaccaatctaataagtttttcttatcttcatctgtaacaggtatttgaatccaattagacagaacaattaagagtaaattaacacactttaatcaattcaacacctaaaaagtcattaaaaatcaagaattattatgttttacttttcataggttagtatcattctcatgtaatacgtttcttaacttagaatgtatggaaaaagaatttcacacagaattcagggatgggccgtaccgaataaaaagaaatcaaggcttttattagtcacatattcatagatgagaattttctcttctgcttccaagcaaaatcctaatagccttacaagatttctgtgttgaagtttggccattaatttggcctcattcttaaattgttcttctgctccttgtcccaaatttccaattagtcttttcacagctattttttctccatcattcagcgtaccctaaaagtaaaaactaatgtgataagaacttttaattcggctcataaattattgcaatatacatatcaaagaattttatcataaaactatcatataccatgtaaacttccccaaatccacctcttcctattttgttctcatccgaaaagttgttagtggcagtcttaatctccaccattgcaaattgaaatgtctctcccttcgaaatttcattccggactataccacaagacaaatgcatatatcaaattataaccagagcaatttttgttttcctcctaaattcataaaacgctctcgaaaaataaaataaaaaatcaattatataatataataaagtacagaaaaacaattaccactgtcttgccgctgaagtgagagatatttctttatcttctttgctttattacggaggaagcaaaagccaatcaagaaaactacaagaactacactaattggcccaacaatagcaataattgtaattattgatttttttccttttcctgctgcacaatatgtatgaaagttcaataaattgttgctcagcatagctttccctttttacaaaaatttaagtgagtacctgaaagtggaacctgatcagttgaaattgaaggtctagtagtggagttgaagaaggggtagaactcgaatctgacgatgcagctgggcaagaaaacggccccacctcttttgccactgcagcactgagggaaaaaaccgatggcgctacgcaagcacgtgttgcaatcggccgccgacaagtctggtgtgcattgcgccaagctgtacaaggtctccgaactcgtgaaattattttcagccgttgcgaacttcttaaccgacccagaattcgcggctttgttcgctagtgcatccataacacccgccaacaatttgttgaaccgctcggcttccctcacagtctccgaactctgcaacgaagttgatggcactattcccggattaggcaagaagatagagctgtcctggtaacgtatccaacacacgtcgtaccagattacggcttgcttttcttgtgggcaccgtttaagtacctctctggaagcgtttaagacgcattctctgcacagggaagcagttatatctccgcggcattggaagaggccggtagatgcgtcttgagtgccggtggcgactg

SEQ ID NO: 62904 - DNA, 748 bp, Cannabis sativa
aataataataataataatgttatagatttaagtactactacttcttctcaactacaggagcaaccattcaccttggactcttttgatcaactctaaaaaaaaaaccctaactcttattgttaatcatcatcatgatattatattttttttaattgtaatatttatctgtgaaaaagggaaaacccatgacaattaatggggccttttttttttaagttgtattttattttcatgattttcttttgtattaatgaattgttgtagttcatgttcattagatatgtatttcaaataaattaagggagaatccctattttatgttttgatccatgtcatatgtattattaattaattcacattatatatagatatttatatcactatcaaaaatctttctaattagtcacaataaaatttatggttaaataaatgattatcattcttatgttattatatgtgactaaatgtattaattttaaaaattataatttgttatcactaaatttattaggactaaaactaaattcagggttggccttaggcatagtcaggttaagtccgtacctaaaatccactcattttaagggcccaaataaaaaagacctttaatttaaaaaatatacatatttttttaataacttctaaaaataccatttatatttgaactaattgaacctaaatgagattaatgtcgatccatacttagttgacacaagataaagacataattaatcaaaaagttcttggg

SEQ ID NO: 62905 - DNA, 1962 bp, Cannabis sativa
  modified_base (1639)..(1643): a, c, t, g, unknown or other
  modified_base (1748)..(1762): a, c, t, g, unknown or other
  modified_base (1884)..(1887): a, c, t, g, unknown or other
cgcttacggctaaaagcgaggtcaacaaatgtattgtgtaaatgtttaagcatgttcatatatatgagattgaatatatgactgttatattgattattattttgttcacttttcttgctgagtctctgtgagtcatgggtgctatatggtgcaggtaaagggaaggccaaagttgagcagccatgagtgtcgtagcagcaatgcacatatcaaccacggtgtcacgtcccagtgaacatgatgtttctttttgattgtattttgaaatgtaaagttatgttgtaagatcacttttaaaccagattataaatattttagaaacagggggaccctgagattaatagtatttatcttttataaaaagaagctttatatgtttgtcttaaattagcaaatttttaattaaccacacttttggtataatcttaaaaattaaatggaagaaattttataaaagcacacacacgtggcgtccctgttggacagggcgttacaagatcagtaggatcaatacccttagtttcatcttcttcatcgataggatcttcatgaacacatttgtcatgttgattgtcattcacatgacgattggtcacctcaataggatctccattgatccatgttcttgtttgagtgttgggatcagcttcgtccatcggagggtccttgcagtgaagacaagatttggtttgggtgagtaccatgattaccgtatgtaatcgtcagaggtatcaccactttctttaactctcaccaaaagcacccaaatatttatgagttttttagaaataaataatttaaatgtaagagccaatgaataataattcagaaataaaagaatagctacactcaaggtttttacgtgattgggacgttaacaagccttagtcacaattcaatattattaagtttagactagaaaagcctatgagattacaagaaggtatgagcactctatgtttttcctaacaactgagtaaagaatttctaacccttttgtagggttcattgtacatttatagtacataaaggtcatactagttaccatcttttctctaatgggatgtttacaaataatatattaactttgaatttatctggtgaagcctaatccatgaagtgccttgtatactgacgtagatgccacatcacgatgccaattgttaatattgtacgtgtcatatcatcgtgggaactaatgacatgttaattacttgattgccaattatcatctttccttaatttgagagatatgatcttctatccgagaatattggaaggcaatctgtgatctcgcgtgatttggcaaaaaataggaaactatgttgggcttctagatactcgctagaggtttctttcggttacatgatttcatgtctttcggacaaggaccatgctggatgggatctttcctggataagttgctcattcttcaccatgaaggactgatgatctatggatccaacccagttattaatggaatatattttaccaggatctagaataactaacaagtatgtttttaatatcctaatatgaatttctaaaatgatgaaaataaacacataaaaggtatgagaaaccttacagtggttacagcaaaattaaatgactcctttcgctcagatctctaaccctnnnnncctttctgtagcagggtatcaccaagatttgagcccgattctccttcttgttgtttggattcttcatagtcttacatattatgattgaggactcacttgttatgnnnnnnnnnnnnnnnaatcactaatggctgaattttattttgtgaagaaagactatggtattttcgaattagaggaagaagaaggaagaggtctcgtaatcctagagagaaaataggtttttagctttggaggcatnnnntggataatgagaccatagccttccatttatactaatttccactagggttaaggttcaattatttggaataaaaaa

SEQ ID NO: 62906 - DNA, 1473 bp, Cannabis sativa
gtagggttttagatcctgatacatgttggtggttcccggatgcagtgaataaggtgtggtgtgagcttcatcaaggatttctttcttaagctcatcaacattgggagcacaaacttgagctttacacagtaacatatcattatttgagattgaaaagtctctaggttgaccagccatcacctcatctcgaatcttaactagctcgggagcttctaactgtgcatttttgattctctcaagcaaatcagactgtaatgtcaaactatgcaactttccaactacaaacctaattcctgcattaaccatctctgaggctagtcgaggagctatcataacagcaatgcaaacttggccgagaccttttttactcagtgcatcaaccacaacattgactttctcggggtgatacaaaattttgcagtcataatccttaacaagttccaaccaccttctctgcctcatgtttaaatctttctgggtgaaaaagtacttgagacttttatgattagtgtaaatctcacatttttcaccataaagatagtgtcgccaaatttttagagaaatacagcagcacgctctagatcatgcattgggtagcgctgttcataatctttcagttgacaagaggcataagctataactttgtcagcttgcatcagaacatatcccagaccctgtctggatgcatcacagtaaacaacaaacttttcccgatctgatggtaaagctaacactagagctgttatcaaactttgcttcaactcctgaaaacttgcttcacatttgtctgaccacacgaatcgctaatttttttagttaacttagctagtggcatagagatcttagagaacccctcgacaaaatgtcgatcataccctactaaactgagaaaacttcaaacttctgtcacatattttggcctcggccaattcttcactgattcaatcttactcgggtcaaccataattccatcttttccgacaatatgccccaaaaaagatacctctaacaaccagaattcacactttttgaattttgcatacaacttatgatgcctcagtcgctgcaatacaattcaaagatgatgctcatgctcctcttttgactgagagtatacgaggatgtcgtcgataaacactatggcgtaattatcgaggaaatccttgaatactctattcatgagatccataaaggccgcaggagcatttatcaatccgaatgacattaccagaaactcatagtgtccatatctagttcgaaatgcagtcttcggtatatcttctgcccgaattctgagctaatgataactggatcgcagatcaatctttgaaaacacagtcttcccctgaagctgatcgaacaaatcgtcaattttgggtaacgaatacttgttcttaatttttagtttgttcagttcccgataatcaatgcacattctgagggaaccatctttctttttcacaaacagaaccg

SEQ ID NO: 62907 - DNA, 810 bp, Cannabis sativa
tcattccgagccttccaaattgcctaaccaaccatgacagcttcttcaactaaccccttattgcctactgacaacacttccataaatcagtcaaaaaaattggttgctgtagaatcaccaacacctaacgctgattggagccaacatgaatgagtaaaggagcattgaaccaaaacaccaaaaaagaaagagaaataaataatatattggtagtaatttactatcttactttttttttgtcaatttttttttactaattctaatcagaaagagaaagagataatatattggtagtaatttacttttatatataaaaatataaaaaaaaaaaaaaaacgacatcatattaggaaggaaaaagaaagaagcgcaaattttcataaaacgacatatttaggataaaacgacaaaattctgaaaaaaaaaacgacattcttctgaaaaatggacaaacatctgaaacaactacaagcctactgaaaaacgacattacttctggaaagaaataaaaagaaacgacatcttattataagcgctttaataaaaaaaaaacatatctaaaaacaacatgaattttacagttattttgtttcaatatatatattccttatttcataatctcttagataaatcacaaaaatactagtcttatctatgtatgattcaataaattcgtaattttctttttcttttcatcttttctttaaattagtcaaagttgtcatctagaaaaattgaaaaatacaattccaaataaataatattattggtttttttggtgggatggagaaatattattgaatattaaaa

SEQ ID NO: 62908 - DNA, 612 bp, Cannabis sativa
  modified_base (76)..(78): a, c, t, g, unknown or other
  modified_base (328)..(333): a, c, t, g, unknown or other
ttaattctaaaaaaggaatatttatttattagtaacctactattacaggtcaaagaaaaatgtaaccatgatggtnnnaataaaaatgtaactattgaatagtcaccctatatcaaatatatagatatatatatgaaaaatatttaagtcaaacttaacttttttttatcatttttttgctaaaaagtttttcttttactattttttcagcagattgaacaacctcagcccatataatttaaaaatgagaaatttttgtaataaaatagaaaaattaaacattaaaattcaaaattttctattattatccattcatgggtaatacccnnnnnnagtgcacccatatatatatttataaatagactgtaagagatatatattagagaagttttagggattagatattttaattaattaattaaataatatttataaatataataaaaaattaaaaaatgagagaattaaggagggaatagatacaagtatttgagataattttagaacgtcacgtcatcgtcttatacttctcctttagatatatatatatatttatagatgggtgactattcaattgttacatttttctttgacttgtaatagcatgttact

SEQ ID NO: 62909 - DNA, 1983 bp, Cannabis sativa
ttttttttaattattatttttagtcattatgtctatttaagtggtgatcttggaggaataatatcaatcacttgacatccatcaaatgcctccactataattattttgtatccccctttttcttttggtatgattttgcttactatactcgtcgttgtagcattataaacattatttttactattgatcccattagaataaatttgaccccttcctctgttcgtgcctagatatatggtatattttaagaaataaacatctatcttagtagcgggatcccgggaaaaaataggaaagttgattgagaaccttaacaaggataagtcccagaaaggttaatcaaacattgttgaagcaaaatccagttctccttcttcttcttcttcttctaataagaaaaggaaatagaacagtaaggacaacagcagtggcaagcctaaagacaaaaaggaacctaaagccaaaaagaacaaagccaatcctaagtctaaggacaaaaaggaaaaaggcaagtatttctattatggcgtaatgagacactagaagagaaaatgtaacgagtatctctctaagcttaagaaaggcatatatgatctacttgttcttgaagataatttagggactcctattattatgcttgatgagattactaagaataaggagagacttaacttcccaaggatccttactgaagtacacatgtatcaagactttccctatacaatttctttcactaatgaaatcaatcaggatattaaatttcaagtgaaatatgaatcgattcctatagtttgtaatcattgtaaggctaaggggcacaaagtgaacgtttgtagagaaaaggaagagccaaaaggtatgaagcaaaagaagatatgggttgaaaagaagaaattgttagtggaagacccggttgtagcaccaaagatagtggttgattcaaaagagttccaacaagtgaaacagggcaggaaacaaactgctatagtgcttcatcctcctcatattttaaatgcttttcaggcactagatgaaattggcgaatgctcaaaaagtgcagaaaatttgcaagtacaaaagaagggagagcctcctatttttaagggatgagattatgagttagaacatccgagggatcaataaccacaaaaaaataaatagagtttaaacttttaatctataaaatgaacatagggtcggttagttttctcgagacgagagaaaggtatcaaagttgtgcgacttatatgtaaatataattggaggatagttttttacttcgaataatgcatggtatgctggaggtcaaattatagttagcggaaatcctcaaatatttcagataatataatttggtgttctatccaactaattcacttgtaagttctaacaacttctggaaaagaaatcttttcgtaccgtttttttatggctttaatgaagagcaaggaagatttatattatggcaagatttaaaagagctagctgtaaagataaatgaaccatggattatgcttggcggttttaatgatattctccattctaataagagagttagtaagagattcaagatgagtttcttggaagctttcaagaattatgtgaaaaaaggtaaaatgaaagacatcaaatattctaggtctttttatacctggaataataagcaaggcaatgaggaaagatctttttcacaaattgatcgagttatggcaaatgaggaatggttattgaagtttcaagcagtcaaagtggttttctcactgaaggttgttttgatcatagctataactccctaaaaattaggcacgctacaccaaccgattaagacaccctaatcccctaaatcgggattactagaaagataggcgcaaaaaatttaaactagatttgaaacagaatgaaaattaaacttgtaacaactttaaactttacaaccaaaagatacatgtttcgagatcttgtaaatattttcataaaaatatt

SEQ ID NO: 62910 - DNA, 717 bp, Cannabis sativa
ctcacgaaatgaacatcaatctctatatgctttgtcctagcatgatagacgggattcgatgcaagtgcacttgcactcatattgtcacaccacacgactggtttctccaccagtttgaactccatttcattcagcaactcttgaatccaagagatttctgcagcaaggtgagccagagctctgtattcggactctgtgctagatcttgcaacaacagtttgtttcttagacgaccacgacactaaggtttcaccaaaaaatacacaatatccagctactgaccttctatcatctggacaagacgcccaatccgcatcagagaaaccagtgagagttaagtgattacttggcacaatatggaggccataatggacagatcctttcaagtatcgcataatccgtttagcagcattccagtgtgtcgtggttggtgcctttagaaactggctgagtttgtttactgcaaaggagatgtcaggcctggtgtgacttaagtattgtagagccccaataacacttctgtacatgaacggatcgtttagatcttcaccatcagttagtgacattgtttttcccgctgtcattggtgtaggacaaggcttcacattcaccatgttgtgcttttgtgggagttcaaagatatatttagcttgagacagataaatacctgttctatctctgaaaacttcgattccaaggaaataactaagtggcccc

SEQ ID NO: 62911 - DNA, 2225 bp, Cannabis sativa
gagcacagaaacagcttcagatgaaagttttaaggcttgaagctgtgttgatgatgttctcattctttatagacaaattcatttcgttcacataattagtaccacagttttatatcaaaggctttctttttttttatttatccctattttttagaggcttctgaatgttctttagtttattatatttagttatttacaataacacatgtatatgttttgagtcatacagaagaagtcagtgtaaagaatcttgtaattggttaacaaataaattagtgtatggttaaacttattagcacatttttttttatctctagttgtttcgttttgttttaatcattgtatagaatggccattcctaagtggatacaatcacaacatttttttttaattattttattatttgttttagtaattaacggcataaatatttaagtttatttgtttacttaaagtatctaattttaacaaaaatgacgtgaatcaatcaatctacatcacttattaaaaaagtaaatttaagtatttatgtggtaatttttatttttcattaattatctattctaagtctttcattaataaaaagttcaatgatgaccacgaaccaaatacataacaaataaagtgacattaaaacgagaaatgatattagcacacgacaagattcacaatatgatttttcattcattaattctcaacacatttacatcatcaccaaacaaagaaaagattaaacccataacattaccaatatgaacaatacaaactcttctctttctctcattctctctctctttctcttcctaaactcttcactttccagggacaaagttggtagcatatgaccaagcattgttgttgactgggtcagcaaggtggtcagccaagttttccaaaggacctttaccagtaacaatggcttgaacaaagaatccaaacatggaaaacatagccaacctaccatttttaagttccttaaccttaagctcagcaaaagcttctgggtcatcagcaaggcccaatgggtcaaaactaccacctgggtagattgggtcagtaacctcaccaagaggcccaccagcaatacggtaaccctcaacagctcccattaagatcacttgagtggcccaaatagccaagatgctctgagcatggaccaaacttgggttacccaaatagtcaagcccaccttcactgaagatttgtgagccagccttgaaccaaacagcctcaccaaacttaacaccatttcttgataatagctctgggaaaacacagcccaaagctccaagcatggcccatctactgtggatcacttcaagctcacggttcttagcaaaagtttctgggtcagctgaaagcccagcagtgtcccaaccatagtcaccaggaaattcaccagttaagtaacttggtggctcacctgaaaatgggcccaaatacttaactctgtctgggccgtaccatgggcttcctgaggaaacttgctttgaggcagctttcctcatgttgactcgtccgccgtttgacattttgttggcggcgggcgccagctcgacggccttaccggcgaaagccggggaagaaagagccatggtggaagaagacatggttttttttttgtttttttaccaaatgtatttttttgggggttggatatgtgaggataaaatgtttggttgagaaactttggttaaattttgtcacatattaatagattaaagggtccttatcttaagagattaatatctttaatctcattggttgtgagatttttttagtgtgattttctatgtctatgtggctctcttttctgtcaatgtatcaaaaaaaaatctctactcaagctatgtttcttgataggttggccaatgggatttggacacttgttactttggatatataacatttatcttgggaaaaattgaataaatacaaaaattatttattattttttgtgttaataaatagaaccacatattagtaggaccacttatatgtgtggaggaaatttttctatgcaaaaatagatacgttagaatccaacaaaaaaaaaattaaaaaattgtttggatattttgatatatagttagttgtattcaagattgaatgtcaatttttatgatagtaatttcaagacacttgttataaatacttgttgatcacttaaaatatctcctaatgacctatagagaattgacaactttgattatattggaaaaaaa

SEQ ID NO: 62912 - DNA, 646 bp, Cannabis sativa
gctatatgaagacggtatttctcgagtttatggacttcccctctcatcctttgtttaggaagatgacttaatggttttctcctagtggcatttttgtaaagacaagtttgtaacccatcttaggtttttttttcttatcttaaatgcattgtactattttcattcgaacttaatacagttgcgtttgcttgcatttttattcacaatgtaaacaattatattttgatcaaatgtacagtacttctgggcttttccattcctcgtaatcatcttgtttaaatagttagtgatctaccaaactttttttattttcaagcagttgtaaattttgcctcgatatagcagttataatctgccttaagcaaacttaaatatactttaatgattttatcaccttatatatttttaatttgctcgtatgaatagttatattatctatcaatttttctaggttaaagtacttttatcaaggcgtcgtgatgcctcgtttagcacttctctagctcgcgagaaccgttagtactcaattttatacccgagttacaactattgattttcctttcccgtcagataggtttttaataaaaaattatatttgtttgatcccttcttcgtcaaaaaggtttgatcaagatgttataacaat

SEQ ID NO: 62913 - DNA, 1790 bp, Cannabis sativa
  modified_base (51)..(51): a, c, t, g, unknown or other
tttatttaaaaaaaattagtaaaataaacaaatataataaattagctaatnaaaattataaaaatacatttattacatattaattttttaaaatatatataataattaaattaaattatatactttttttagtatttatattaatatattgtaacaaaaacaaataaatatattagatcattaaatatatataacagtatttaatatattgtatcactaaaaattaatataccgtaataataaaattatataccacaaagaaattataaaaatactaaattaatactcaaaatatatagcatgctaataataaaattatatataccactattaaaatatgtatacataggaaaaaatttatttataatcattatatataataaaatataaattaaatatcatcttaaataaatattatactatacacaataaaaattatataccataaaataaaatatatatatatataactacaataaaataatataatattattaaaaattgtatataccatatatataaaattatatacaactataaaataattatactatactttcaaaattatatataataaaataaaaattaatatgcatggtctaaaacaaaatgatatcttatacaataaaatttatatctatataacaaaaaatatataccttacaattgaaatatatataataataacagataaaaataaaaaaatatatagtatgctaataaaattatgcgtcatgtcaacaaaagtacaatagaaaataaattttaaatattattttttaaaaaataatatacagcataacaaaaaatatacatatcattcaccaaaacatatatactaacaataataataaaaaatatatatacatatattactaatatatatctttatactatactaaacaattatatactacaattaaaatatataaatcatgaaaataaaattatataccaccattgaatataataaaataaaaactaattaaatattgtttaaaataaataattaaaatatataaaatatatgtagcatgttaataaaattatatacacgcattaaaatatttatattatgctaacaaaattatataccactattatacatagccaaatcaaaaataaatatcatctagaataataatatgtcatacaactaaacagaaatatactgtacaataaaatttatatatcaataactcataaaaatttgaaaaatcaacataactttaaaataaaaaaaaaaaaataacaaaactaatatagatatatcataatctttaggtaatttatttctaattctaagaaaaatataaaaaaaataataataattaatttttttatgtggcaaaaaaataatataaataataaataatgtaaaagaatcatttatctacaagttttaaaatgagaatatttacttacatgctataatttatggtcatttgttataattttcttttacaaaatgtggttattggttttattattataatatatatagtttattttttaaacttttaaatattacatatttattttttacatataattaatgttatatatatattataaagttataaaaaaaaattgaaaaagtggttagttgttataattttgaattatagttaaatgatatttctgtttaaaaattattataaacctataagtattttattttattattatatatagatatatttaataaaaattagttacaatagaacctctatccaagaatacacttatgaccaagtaaattatattttaattgagaggttataactaaa

SEQ ID NO: 62914 - DNA, 989 bp, Cannabis sativa
tctcactgtagttgtcctcttcctaatttgagttattatcatgtcttataatgtcttattgaaagtatatggagtttaaaataattataataggaatatactaccttttacttctcctagcataagtgaagtgaaccaagggtctaacacaaacatgagttttgcacatgcaccaaatgattgggtttgaggaagttgcattttaatggtactttagaaaaatatgattttaggtgagacagtggcatggttaagtaagaactagaatccaacattatgtacaaaattagaaagatatcatggtaaagatatgattaataattgcatggggccagtcactatgattccatattgtttcctgtattggtctatgtgttcacttggctctcaaattgcattagtgtattctcatgatatgttaatggggttacagctgaagaggttgatctctctcatgatgttcagcagtggaatactttgtctgattcagagaaacacttcataagtcatgtattggcattttttgcttcatctgatgggattgttttggaaaatttggctgcacgatttctgaatgatgttcaaattccagaggtgaattccttgttatgtgtgtgtctttgtttatttagaaaaaatacttgtaagaacatgaagaactttttctttctttctttttattcttatttcaagtacaaaatttatggcttagtatctgtatttaatattcggtgtttcatgtgcttcattgttgcatcttacttttgacttctacacctttattcaaggttatcctttatcctactggaaaatcatgtcttcaggctaattccttgtttgatggtacaataggtacaagtttttcattgaaggcctatattttattccaacctttattagcattcttttaatttagcataagaatatatttaccaataacaagtgaaagaatatttaattaattcttcacactgtattgcattgtctta

SEQ ID NO: 62915 - DNA, 909 bp, Cannabis sativa
cagaaggaaggaatcaaatgaatcagcaacagtgttctttaatcacagtctttctgtaaagctcaatgaccataactttctgctgtggaagcaacaagttatggcagccatcataggaaatcgtttactgcattttatccaaggagttgctcctccaccaaaatacttgtccgatgcagatcaagcttcaaacaccttgaatcctgcttacactgactgggatgttcaggactagttacttgtgtcctggcttctctcatcaatgtccgaaagcctattaactcgcatggtgggatgcgaatctgctggccagatttggagaacactggaaaaatattttactcttcaagtttcagccaagatactagagttcagaaccaaacttcagaacatcaagaaaggaaatcttggattgaatgagtatcttcttcgaatcaaacaacatgtagacttgttggcctcagttggagaagttctatcagcacgcgatcacattggagccatctttaaaggactacctagcgagtatgatacttttgtgatttctgctaatacaaggatcgaaggctactctgtagctgagatcgaggctttgcttcttgcctctgagtctcgtattgagaaaactgactctgaagtggatctcagctctcatattatcactaatgagactgacattcatcctgaagctaattacaccagcaacaggaacttcagacaaaaccagcagggaaatcacaatcagtttcatcctcaaagagggaattacaatggcaacttcaatagaagcaatttctctcaaggtaacagtcctaatctttcccaaaataactccttttactctaatgatcgtgcttttggaagtgtatcaaggggaggtggatctggtttttcaagaggaggaaggtt

SEQ ID NO: 62916 - DNA, 1436 bp, Cannabis sativa
atgtgattagaaaagtcaaattaatattaaaaatcttttaaaaaatcactataaatttagttcaaaaacttaataatatatatttagtcagaatcatataaaaataacttagcacaattaaaagagtgcaaaatgaaggatttgaacttagaacaatatattatataaaaataacacggttatatcttgaatgtaataaagtcataattatctataataaacattattaattatagcagatgaacgttatttataaactattttttgcataatgattgtatgattgtgcacctagtcctaatcagccttttattgatacattaatatgcatttatatatataagaaaaggaaactaacttttatttagtcccatcaaaacacttggagagaaactcaaaagaagatcatcctcacaaagcttcttaagttcatcctctggaagtgtaaccataaccaccttacttagtggaccttcctttggtggaccaggaaggattaaaacctgtcctaacccaattactggctcaacataatacgatacacgaataggctcaaccatgtctccaaacacagccaagtatggattagccacatctaaattagcacaaactaaatcacagccattcatcaatggaacatcttttttctcattatgttggagccactcgatcaaatccatgattccttcattgtccatcttcaccactacatctcttatttcattggtagctttcaacaactcattttctaagacaacatccttaggattattgacttggttataaaccatacaatttccaaaaaaacgcttatccacatttagaacacgcctcatgtccaaacacaaagacatgttcacaagcccatttgttattccttttactttgctaatacatacccaaaaaagcccagctatggcctcgaaaggtgatgggcttgtttgacttgaattgtttatcatttgggccgatttaatgcaggcccgaacattttggtctgaaaatgaaaaggacacagttgtgtactttgtgtcgattattgcaatagatttagtagtctcaattgtggaattataatggttgatcaagggagtgtaaggaacatggtggatttttttggtagtgaggtttcttgtaggtaatgggtgaaaataggaggccaacattttgccatagaaggttgtttgggcccaagacttgatgaacatggttgcacaagtgaggtcagccagtagatgaatgcagctcagcccaattgcgaatccaccctcttcaaattctgtaatctgcttccatcaaaatcaaacttacaaaatcaaaaagtgctcataaaaagctacactcacaataaaactcagaatatttcacaataaattttactctcaatcttctaaattgcaacaattaaattttaaataaattatagtaattaacta

SEQ ID NO: 62917 - DNA, 1377 bp, Cannabis sativa
ggtcttaacatgtcatttatcaaagtaattcacatataataaattatataataatataattccataataaatacatatttaactagttagattttgctaattcgttctcttaatcttaggatattacactagagctggtcaattcccatgattaagccctagggtcggccaggtctcaagcaagacctcccatgccagacaaggttattttttaatccaaatgggtattttttttttcaaaactcgaacatgtgcctcgtattctttatggctcaaagagtcaagaatcacaacaaggcctaaatcgaataatttccatcaaaaagtcacacattatatattccaaaatggtcacgaggatcaatattctaaagagattacaaactaacatgagaatcaaaaagtttccaaaagcttaaaaggcttaattgttaatggcaggtacaaagaagacatatccaagaaagagaagatgagacgtatatacagagagaggattaaagatctaaaagcatgccatgcaaaaagccaacacttggctagacaaggctaatcgacggagactactacaaacaagacgagagctagaaagtctctatccgaccagatgttcgaatagggacttgggggacaaatgatatcttaatttttttttcacctgacatgacatgtccacgtaagccaaagacacagtacatgtggaatataaccttgccaatagcaagaaaggatctccatataaggtatggcaaaactgtcaagtaacaactgaagggagtgaaacgagccatcaaaaagttgtaccaatgtgtctagccgaccaagagaagcctataggctggccagagtgagcttgtatggtcggccaggaatcgagcacaagctggccgaccgcaaggtgatttccaaaccaagggaacctgatctctataaggaaatggtgtacaaagctggcctccacttgctaaaggctggcccccacatccaaaagctagcctcctcttggtaaaactgacagtgacctgcaggattctgacaggcacatgacctgccaggtcttggcaggagcatggccggccagacctcaacctatagaccttgcatggtcggctagaccatatcctgcagtgcataggcagccaagattgaccttgcaagatttcttgtacaacttgatacgtggactacaagctacttgcaaattgggcccttaacagcccaacaaactgatggaaaatatctactttcaaagggtaatttagtcttttgttaatcaatttaatatgtaaatatctaaggaattcagttgtaaattagggtttaggctttcctatataaaggcattaactctaacctagaaaacctaagtctaattct

SEQ ID NO: 62918 - DNA, 922 bp, Cannabis sativa
atatatattttaaaaataaaataaaataatataaatattaattagtccaaaatattaagcctatatctatatctctcttcttattaacctctctttctctcccttggccaaccgcactcactcccattattctctccgacttaatctttgctcaaccaaaacagtagtagagtttgatccttgtttaagtgcgttcaaataataatgacagtttttttaattttgctattttttttctctatgaaaaaatttggtaaaatgatttgaacctcgaagagaattaatgttttaactcagtggagtggaggaatgacagagtcccaaatgatttattacttcctgctttattacttctgaaggccatacacgtaggacccacaacaagtataaagcagctgcattccttttttaattatttttaatttagagagaaaatcagctgtataaaaatatatctacatcatttggacaattaatttgctttactcttactggtccaataaccttccccatatcatgaggtagtaacaattggccttacaatagatttaccctataagtttatatgtggatcttttgaagtataaaaatgaaaaaaaattctttgggagaaaaactttttaaaactactaacaaaatttcattactaaatataatctttaataattttatattacaataataataataatataaaagtgtaattctaaaataaaataactttcttattttatttttgtccaccaccaaacaattataattttccatctcaaaatatttctttctaatagacaaatattgagttatacataaaaattacaccattaatcactaattaattttaaaatgaatatcacatattttttaacacagtatatttttcatttgaattatgatttagtactactacttagtttataga

SEQ ID NO: 62919 - DNA, 1761 bp, Cannabis sativa
  modified_base (1647)..(1655): a, c, t, g, unknown or other
  modified_base (1703)..(1718): a, c, t, g, unknown or other
aaagttcacgaggcatgatttagtacatgtcaaagtttgaggggtgtgatttagtagttatcaaagtctagggagcatgatttagtacatcacaatcactgaattagtataattgaatgaaattggataaaaatccttaaatccaacaatttcaatcgtttagggagaatttttaacggtcagaaaattcagggagcatgatttggtatatgtcaaaattcaagggccaaaaatcctaattagtctcaaaataatattggtaatataattttgtaaatttagatataaatatataatatattttaattatagaaaaaaaaaagaattaaattattattaatattgaacaatgaccatgttagtgaacaaaattgcataagtcataaagaaatattgaaaaaatattcaatcaaactagctcacattcatatataatattgtttataaaataaataatataatattagaattaaattgtgatataaaatacattattaagtaaataatatgtaaggtaaattaatattttatgacataagaaatgttacattatagtgtaataatatacataaaattgtaacataatgaattacacatttgaatattaggtttgtaacatacatacatttgataaaatatatttaagtgtaaaattatatgtagaagttattgttgacctcgcttttgaacaacaatacgaagtctttaaattgatagtaattatagatcatttaataataataaagagcgaaaagaacacacattgtttatagaggttcgacacctcataatagtaatagcttactccactttttattgtattacttacaatgaattactaagatcacaaggtccggtcaggtgagtttcttaataatcctttttttgcattgattttgttatccgcgtttctggcattggacacgtggactccagatcagctttcaagactcatcagtgggaccctcattaaagacaaaatgggccaagcctatttaggtgttaccttccaggaacatgttgtggttccaccctcgcaaagccttccacctttagtaaatcgagcccaaaagatatgttcgacaccacgagaccagagaggcaaggcgatacgttcctagaagacccttccggtttccttttatattcttgtacataaataaggaaactccgattggcagattaattacccacaatttgtgcatgcggtgttgaccaattcaatctcaatccaatccgcctagttagcagatcgtcatctccatgggctagacttcatgagaaagcccacaaatattctttactgtaaagtctccagtagaggaaaaaggaaaacctaatgtaattctcatactactataaatgttgggctttgtgccttaaataaaactctatttcaatgtaatttcttatattcatttatcaataaagaaacatatttattttcattagttattggaaaatttgcggtaaaagtctccaaaaaggtcactttgatgcagattagtcccctaccttcaaaaatagccgcaatagtcctcaaggtcatgctttttatttgtccgttagtcctaattttaactgagctgtttacttttttaaaattgacacgtgtcaaaaatttattggtccaaattattattttannnnnnnnnaataaaaataaaataaataaattattttaaaatattttttttcttttnnnnnnnnnnnnnnnnttctttcttttcttcttcgtcttcttcctcttattcttcttga

SEQ ID NO: 62920 - DNA, 1080 bp, Cannabis sativa
tattcttgtattgtgactaaaaaatccgtggctaaagatattagtcacaaaaattataatttgttgtgactaaataagtgtatttttagtcacaatatttgttgtgactaaaatttaaataagtgataacttatatctaactactatgttttagtcataactaacattttattgtgaataaaaattacatttagtcacaataaattcatgttgtgactaagaacttgtcattaaatgtagcttttatttgtagtgttggtttggtttagtttcctttaacttagtttaaggtccaaccaactaatttacaaagatataaatatataattttatttatacacacattttataagaatttttctttaggttgcgccatggctgcctcttagagcagctcctatgcggagcttacagacgttgtttcgtgtaacatgtgtgttaagatggcacgttacaagctaagtgatgcaaaggtgagcacgtgacacttcgcagggtgtgtcagttggtgggttatcacccatgggtgtttcaacattaaagatgtaggagaaggttttcacgaatgctactgtcaagcaatggtaggttgggttatttatttatttttttctaaattaaaagtgtaataatttaatatttaaataaaatatgtggatccatactgataatttttagaggtgcttaatattaaaataattttagaaataaagtggcttaaaataaagcggatgagagagaagatataatattatattattttagaatgatatggagattgttggctctttttaaattgagcattgctattaggcaccttaaagtacctagtattatactgatcgacgtgacgtattgtgagtggttattggttttctatgttattttttaaatcaaaatgtattggacccaatattgaattgcactaatagcgacatatcacctcttgtggtactatataccttaaagtgctccctaacatttttcatggtatttccattatagttgctcataggtgcacatgcaactgcccctgccctaaacaaattacaccacgtgacatgacagtgttttgaagtc

SEQ ID NO: 62921 - DNA, 702 bp, Cannabis sativa
atggggctttgttgcctctcaagcggatacctctctcttcatatacagatctaattctgcagtgattgtgctctaatttatgtggatgatattattgtggctggctcatcctcctctactattgctgaacttcttgtcaaagatctcggacccctccacttctttctcggtgttcaagttcatagatttgcagccggtttccacttgtctcaaacaaaatatatccgggatctcctcactaaaactgggttacttgataccaagccggtcaacactcccatggcccttacttgtttgtctctctatgatggtgagcctctcaccgatgctacttcttatcgaagtcttgttggggcattgcagtattgtacgctaactcggccagatatttcattcacggtcaacaagctatgacagtttcttcatgcccctactaccatccattaccaagatgcaaaacgagttcttcggtatctcaatggcacgactcaccttggcattcttctccaacccgacactaccagtgaacttcattattttactgatgctgattgggcatcatgtcctgatgaccgccgcagcactagtgcttattgtatatacttcggcttaaacctcatctcttggtcatcggctaaacaaaatgttgtatctcagtcgagtactgaatcagaatatcgagcccttgccaatggagcctcc

SEQ ID NO: 62922 - DNA, 597 bp, Cannabis sativa
gactagtttagaattttaaattattggtttggcaaattagttagaatgaccaaaatacccgtaggctccaaataacttgagtgtttaggctaaggggcaaattagtctttttcctaggttagggatttttcaagttgaggtaacttttcttcttgtgttctttggtgatttcttaagttttagcttaggttttaatgagttttctttgaattcaggtatgcgatgattagatgagtttaaattgattcgagggttaaattaggtttgtttagttatgaattggatattttcatggttgttaaagttagaaatgaaggaattgatgtttaagaacttaagtttctcaatcatggtattttgtttattttgatgaatttatgggtattgattgattggttacaatgtttttataatatggaactattctggaaggtttgagcaagtttggtggagaattggttgggttttgatgtggaaaaccagagtttcccatttttgcagtagaaaccggttaaccggttttacaatccagtttgcctgcaggggaaaccctagtttacgattagaaaccagttttgctcggggtgtttttcgaag

SEQ ID NO: 62923 - DNA, 939 bp, Cannabis sativa
attgtatattatagttataatgtatcacctcttttatttttaaaaaaaaatatgaataatttataatattaaaatattaaaaataaagttcaaaatagcgattagtagcacaagtatcagacccgtctcaagctaattgaggatcttaggctaaaaaattgaataaggctttttatatgaaagttttatgttttttgtgtatatatatatatataatggtaaaaatctaaaatataatatttaaaaaatataattaactattaaatattagtattttaaaacataaattaggcatttattttagaaaataattatagttttttttaataaaagtagtaaaaatacaaaatatgttgattttaaaaaataaatttagagccttttttgttaaagaattttttggacttgggtggaggcccttgggcgtgggtccctgctgcctcatccttgagtcgaccctgacaaacatatatatatatataaaagacacgctttacacatggtaaattgttcaaatttttttagaaacaacagacagaatatctattataactataatatatgttattatttttaaagaaaaacctaaaatataattcgaaaacatccttacgaaagaagtaaaaatagtgtccctacctaaatttttcaatatatatatatattatatatcaacttacaaatccaaagcctccaactttatatgttggtggaatcatagtgaagcccttgttgcaatgtttggcaaggaagagtttggccaaagaaatctcaagaaaaacaccaacaacttgtttggttcttagggcttgagcatactcatcttgtgtgtcgaatttcctaatttgatttggatggtatttcaaaacttttactaagtacctttggagataagaacctctgcaatagccaaacatggccttactactctgcagtgat

SEQ ID NO: 62924 - DNA, 649 bp, Cannabis sativa
ctgtagagagatggattttcgagttgatcaccatcattaattgagataactctccctgctgtcattggtgttgggcttggtttgatattttccattttgtatttctgcaagatctctgctatatacttcctttgggaaagataaatgcctgtgtcatccctatacacctctatcccaagaaagtagctcaagtctcccagatccttgagagagaaaactttgttaagtctgtcaacaaattgtccaatttcttttgagttgttgccagttattatgatgtcatccacgtagattaagaccatgataacaaacttttgtgtcttgagcatgaacagagaagagtcggctttagagttgacaaatttccagtcaaccaaagtcctttttagctgatcgtaccaagatcgaggggcttgtcgaagtccataaatcgactttttaacttgcagacatggtgtggtttgctagtgtcttcaaagcccgggggctgcatcatatatacatcctcttcaagtacaccattaaggaaggcgttgttcacatctagttgacgaatctcccagttgtgagacacagcaatagttagaacaacacgaacggtagaggctttgattacgggactgaaagtttcgccaaaatcaactcctgg

SEQ ID NO: 62925 - DNA, 1161 bp, Cannabis sativa
caaaattttctaattttacccattcatgggtaatacctattaagagtgcacccatatatatattaaatagtaatataaataataagtgaggaatcaatttagttagtttaagattcaaaatttaaattatattagcatgatttttatcttattagttagatttgtattttaaaatttaaacttataatacgatatctcatatatacgtatatactctacaaccctagcagccagatagtatcgtattctcaccatctctcaaaatttttatcctctccattgtaccaaatcaattgttctaatcttaagaactttggggtcggcaaccaaccactcttatctgatcatcgttctgtgtcttcgaaatcttcaggtaaaattcgtaattgtgtttttatttttgttttcaaagaaataggcttccataaaactaccatatttctctccccataggtccgttttcagtgatctatgtaccgttttaaagataatttaatgatatatattttttataaagaaaatctttcctaattttgattatttcgatgtcgaaaaattcatgttttcatgctggctgttgaattacagtttttaaaatttctttccaatattgcctcaataaaagtgcgatatctctcacgatatctattatttttaaacgattttggtacctttggaaagataattcaataatacatatttttttttgaaaaaaccatttcctaattcggagttcttacctatcaaaagtcggtatcttcactcagttaggatatctcgttttaagttttgtttcagaaaaagtatctttagtaaaaattcaatatctctcttaattttgatccattttaaaagatctttatctcattttaaagcttaagaaaagatctacattttttatgaaggaagtattatctagatcgtagtgtaactatctttaaaacttttatttttgggctgcattcagaaatcggcttgatccatgattttaaagaaactgttttaataaaatatgcataactcttaggttataactccgattttaatgatctttataccattagaaatgtcttttaattaactaaaaactttgtgaacagtaggacttctaattcaaacgttttatgagtcaaattctaggctaaacttgttgtacagtaa

SEQ ID NO: 62926 - DNA, 901 bp, Cannabis sativa
ttatttaaaatattacattgtaacttttagatctaaaataataaaacactttctactaacattaagaattggtggtattgtaaactttgtttaagacatttagttactttttagatactaacaaaaaaatatatgctttacacatattaaaatgatcatcttcaaaattgatcgtggtacttttttgagctaaaataattagtggtacaattaaaattattttttgaaaaatctattcaaaaatagaaatgaatattttttcaaaaaaaaaaaaagacacatgtttttagtttaggaaagacaactagaaaaaaaaataataataaaaactaaaggttcaagagtctacttatttatgttttttaagttttgcttttataattttttttttttttgacagaaataagctgcaagaaaaagaaaaaacaagaggaacaagcagcaaagaagggacagaacaatcccctctaaacttcttctctcagcctaagagcttctttggcaagaccgtgggcgtccatattgagttgacgaggaagaaaatgcaaagaagcttcagggaagttggagaagagcagacgaatccaagacaccagaccagaaagagcagagtgatcgtgccattcactgttaactttggagaccaaattcaagcaatccgagaacacaaacttaggacttagctaagaatccaaacaccacaataaactctgcagcatagcctctccttttgcaaacaaaggagaagaagccctagggagcaggaaaaagtgagaagctacaggatgctgacaaccaattttgaaaatgaaactggttcctgttaaagcattctttttatcaaaggctgcatccacataaagggcaggagaatcttcttggaaaccaatagtttgcagcc

SEQ ID NO: 62927 - DNA, 1122 bp, Cannabis sativa
ttgtcacaacttctgtgtctccaacaaccactacatctgcttcaacaagcacatccaactccgcataaggttcctctgttgacccccattgtgtttcatgctcctttaattcctccaactggtccccaaactcttgttaatagccatccaatgataataagagataaagttggaacatataaaccaaatgttcttatagcctccaaagaacctctaatagtagcagcaaatcttaaagatcgtaaatggaacaaatctatgtaaatgaagatatttgctctcaaaaagaacaaaacttgggttcttgttcctctccctataggcactattgtacaatacaaagcaagactaggggcaaatgatttcttgcaacaatatggatatgaattcacaaaaactttcaaccatgttgtcaaacaaacaaccattcgagtcatattgacaattgccctatccaatggctggcaaataaggcaacttgatgtcaataatacattcttaaattgagagttaaatgaagaggtttatttgactcaacctccaggttttattgacccaaactctcctaaacttgtatgcaaattaactaaggaaatatatggtataagacaggcacctagggcctggtttgataagcttaaatcagctctaaaagttttcaattctacctttaccaaagctgatcaatccttattcattagaatcaccaaatatcacaccacatatgtccttgtttatgtggaagatatatttgtcatagggagttccactactgcaataacatcactgattacagctctcaatgactcttttgcatttaaggatctaggtgaaatcgattacttcctaggaattcaagtgcaacaccttgattctagcctacacttatgtgaaaagaagaacatgatggatcttctttccaaagttaaaatggaatttgctaactcattacctacccccatgacaggtggtaagaaactttctacatataatagtgactctattgttgatcctaaacactacagaagtttagtaggtgcattacaatatgctgtaatcactcgacctaaaatttcctatgcagtgaacaaggtatctcagtttatgcacaatccacttgag

SEQ ID NO: 62928 - DNA, 970 bp, Cannabis sativa
aaagtgtatagtgacactttaacgctcgtcactaatgagactgactagaaagacaatttttagtaacactccacacatgtcactgaaaccttttgtactcattttctgcgcgtcactataggcgtatagtgtcaagttttatcagactaaaaagataacagtcacacacatgaagtgtcactatatcctatttttcttttttattaatatttttaaagatatagtgacacaccaaaagtgccactatattaaatatttttttaaaaaaaataatatataattgttctaattcaaatttttatataaataattactttttttattatttttttttgaaaaatttaatttattaatttgggcagaataattaaatatttttttaatttatcatacacaaaaatttattatttgcaccttaaaattcagaaaaattacaaaattattataatgcaaaaaaaaaaaaaaaaagcaaattccacaggattgaacaatatcaagaacaatattaacaaatataacccaatttcttttacagagattgaacaaattcaaaggcaaaccccaaaataaaaaaaaaaaaaaacaaattccacagattgtgattacaaaagaaccaaaaacgaaattacaacacaaaatccaatcaactctcaattttcattttactgtttctttaatttacttattttattgtaaaaaaaatagcagactatagaataaacccaccacgatcagcgatggtggtgctctcatgttcttctttcgctccatcatcgttgatccactctgccggcgttaagtccatcccctcacggagcacctcgcgcgactccttcgtcaacctctcttccaacttcatgaagcccaactccggtcacttgttcgtcctcaagcatagattagcaccgtccacctgtgtaaaatcgtagctccaatggtccgcttatatattcccctacacacacacaca

SEQ ID NO: 62929 - DNA, 653 bp, Cannabis sativa
caagtatggaaactgagagtcaacaccgtccaactggtgaggtggcatttgtgaccaatggcctccataatcaattcaattactttacaaacatccaaaataggagaaattatgtcaacgggagctatataatgtagattaatttgccgtataattatttaagttttatactgagtaacatatatgtattgagttgtattttaagcagtaaaaatacattctatcacatttctataacttccataagtaactctccgttaggtgccatatcagtatttacgtggcaacatctcattagtccgcataatttattaattactttttatttaaaaaaatcacttaaatatttaaaaataaaataaaaaattgtttaaaaattaaaaaattacgaaattatgaaacataaaaaataaactcataataaaaattattgtttaaatataaatcattaaacacaaattttaattcaaaacctaaatccccacgtttacatcaaacgagtttcctatctaatctttttttttctctttttttcattcatcatcttgttcttccttctcaccatcattagatcaatcctattacaccacaatctaacctccctcttttaatctcttcttcttcctttttctctctgtatccaaattgtaaaa

SEQ ID NO: 62930 - DNA, 6320 bp, Cannabis sativa
  modified_base (1425)..(1452): a, c, t, g, unknown or other
aactcaagtatataagaaaaattctaggttgatgttgcttgttaatattaaaataaaatataaattattttttttaaaaagaaataagagataataattatttattttattataattagtttttttttatttttttattcttttaatatgtaataaataagtaaatatgattttagtacaaaaaaaattattatagtcttttaatcaaaacaactttttctaaaagttaggttggagcagcttcagcttttagctgtagcttctctaaaaattcttcaaaaagctgttttttttgttttttgattttttgacaaacacattttttttcacagttttttcaaaaagcagcttttagcttttttaaaagttgtgccaaacggacccttaaactcatatactatgtggcagttaaattttttattaaagtactatgaataataaaaatgtgatacttgttaccctatttgcaacaattgttattacaataattaatcagaactattaattacttctagaataatgttacatgccaaatcgttaataatattatgtcaaattaaaatacatgcaacaaccgttataatattacgtcaaattagaatatacatgcaataagtgttaatattttgtaagatcatgcacgcacgtgttaatattacgtcaaatcagaatatacatgcaataagtgttaatattgcaataagtgttaacacttgtcaatcttttattgtagtattatatgcaccaaccaggtcctttttcttgaatcacatatacaggccatggatggagattatgatgaatgggtttgatcatcattgtaaaaatacatgactttgttaaacaaatggtgagtttgcattataaaactcttgtaactatattacctatgcattgttggaagaagatctaagaaaattcttgaatatgatttgaaactctttaaattgaataagataaaaacaatataattctcatatatcgattcattatattgttacaaaagacacgacacgacaaatgatgattaaatttaaatcccccaagccacttttcctacaactataataaacccattcccaatcccttacaacaatttaaatgaccactaagaaacaataacattaaaagggttttgtgtgagtggctgggataacttgatcagactcttgtgactatcatttagaaaaagggatggtcatagccagcattggtgtcgtcgttattggggttgttgttgaagagatgatccccataagtactactattcccctgatactgctgatgaggattaggctgctgcaactgcaatggcagttcaagaggtgatcgcaaaggcaacgaggccatagcagcaggcagctgatgatgatcaccagcccaataagaggagaaatcaaaatgactattattattattattatnnnnnnnnnnnnnnnnnnnnnnnnnnnnattattattattattattaacttgctgctggtgctgcatctgattatgatgagaaagaagattgttcacagtactaccaccaccaggagtagtcatcatcataccttgcatattattatgacccatattcacatggttcacattgccatggccaacaccagaattcattatagcctgcaaatcaggtatatcagtcacaacagcaggagaagtattaacattattattatgattataataatgatagttatcaaaaggtggaagctgttgttgtggttgttgttgctgcagcatattggttactgctcctccttggttgggaaaattagaggaagacgaagcagcaaaagcagaagcaggtgcaggcacaggcacaagtgcaggagaacttggcagctgaggcagtcctcttcctcctccaacggatccctctccgtctccggctccatagaaggaggacaatgtgttcatcatattcatattagtattaacagcagactgttcagtggtgacatttcgcaacatctccatggcattcttgagatttcccaactgggacatttcatggacattattcctaacaggaccatccaacaagttaagggcatctctgaagttacacggaatacccttcagctccttagcgcgcttcttcaaggattccatctgctcagtaatatgggtgagctgctggttaagctcacggagagtggcgttcctatgagcctcgatgagttgaaaggtccctgagttggcctgagaagccatcagcatagcgtaatgttcagggttcatatatcgatctatgaccacattcacgctggaatgaccaaacgagtaaaccttatttccgggagagaaaactattatggctatctgtacaccgcaaagggtgcaaagctcactagctttcttgaagagaccagagcgcctcttcgagaatgtcacttggagattgctctcgttcgtcatccttgtcattgataccctacgccttcccctgttgatccgcctgctttgagtgtttctgttgtcattgtttacagtgttctcgttgttgttgttcatttccattgcttaaaggaagtgaaacaaaaacaagaatggcaaaaaggaataattataatgatatgtaatattactatagagagagagaggtggttgtggatgtgttagtgtggtatttagggtggtatttataggaagggttcaggcgttttgcttaagttttttcaatattattttattattttgataagcatgaatttattttgtgatttacaggctctgatttgctgttatattcctttttttgatggattttttttttcagtttttgacatgtatgaaacaaatgttttaagtaaatattaaattctctttctttaaatttgtgtatttattgtattacaaaattactttctccacttgcttgttattgcatttctaggcctgtgaatagatttttgatagaatatatatcgtataattgttatatgtaacatacacactgttcacttatttatttatttagaagttaaaaatttccagtcatgtatatatataacaaaaaagaaaagcatatattgaacaacacaaattcagacaatttatagtttcgttctaataaataattaaggattaatgtactatatgatttataacatatattcctatagaattttgatcttatttgataataaaaagtacaagtagaggtcttctaaaagggaagtaaaaaataaattaatctaactatattttttaaaaccatggtacattgtatatttaattatatcactgaaaaaatgtcactacgggggaacaaattaaatttagtcaacttaattggttttttaaaagaatattgtgccctaatgtgaaataatactgtcacatttactagtgttttggtaataaaaaattgttatatttgtctttgttccaaatatatgaagtattattcttattgtggcatatattgtaatgctaataggaaacatattcactttttcttcttttataaaggatttagtgtacttcttaagtctaatatactatatatatgtcacatatgttttacttatatgtaaataatatgttccatatatatgaaacgactttttaaagggagaaaatatttaccaggcaactaatatttacttttatttaccagaattttacattttaataaattcatatagtttggttatatgatgatgaattgatgtataaaaaactgttttaaacttaatttacgtattattaactacgagctaattgaagaaactaaaaagaagagaattaatacatatctcgacaataaatttgatgaagctaagatgttttttttttttactaaattatattatcaccataatatataagatgtaaatggatgaaaaaaaattggttggtaataaatagattagatttttttaaaagaaaataaataaaggttagattttgtttgcatgaaatgccattaattagacagtgtaacacacttaaataaatctatctaagacaacaaatacacaataaaaataattttcaattatttgtaaaaaaatgtactttttatttaaggagaaaacacatccacttaaataaattatggatttttttttcataattatagattactttctaaatatgatcaacattgttcaactacaaaaaatcttaaagtcacaattgaaagtaaaaatattgtgacataaaaattattaagttagtaaaattttaaattataatatatgaacgataaagaaatagacaattattttgtcgataattattgttacttttaaaatgacgttactgtaataatcgttaatattatgtcagatcagggaactataaatttaaatctaatacactaattatcaattaaaaaaataatgacacgattagttgttataaaaaaataaataatttaataaaaattaattattgaaaagatataagttaaagtgtgtattaataactgtaatatatttgtaacgaccgataggtctaactgattttattctaatatatttgcacgcttttcttcatagaaaaaaaaaactgtaatatataatagaggccaagcgaagaatgaattactaggggactaactattaaaaaataatattttaaacaaaacatttttatatatattccaagttgcaaaaatttgttcatacgttaagttattaacttttaaatatttttcacattagtaattaattacactgcgaaaaaaagagaatttatcaatagtttaaaatgctaggtattgtattgttgtccgtctctatgactggcacctattcaaccaatgcaaaactgggcggaatagacatcagtggaaaatagttagtaacgaagtttaccaacacttcaaaatcttcgacaataaaggaagaattgccaagacttttgcaccaccagaattagtgttattgccgatgattttgcgccatcggctatagtgttattcctgatgaaaggtcagggctggtaaaaacagagattaaccataaggaaactctttatttcttcccactgaatcgcaatgtgatctccaaaccataactcatgtaagtagtcagagatgtgaagatcatgaggagtgttgataaatccactacgtgccaacctgtccaaatagtttaaacaaatacttaataacggtcaatcaacaactaatgaactactcaactaatttcactgccagctcagacaaatcagttagaagttattacatttcttctcttaacaacaatagtatttaaagacgcttccctttttagatctaggtgattcgaagctgtttcaccttgttgagagaaaaagagagaaacacagaaagttagagagagagagagagagagaagaagaagaagaattaagagtaaaacaagatacatcagagttgagaaaaacagagaaaactttaagagaaagaaagttttatcgattaccttctgagatttggctggaatcgatgaatactgttgtaatcttggcctgagtaatatgattgactgagcaatctattgtggcgagctcgatagaggatgtaccccaaacaatttgggcgaacctctacaatctacatgttcttctttgattccctctctattcttgatttaattttctgttgatttctttcatgcatgaatgccttgagaaacccttgataatttttgtgtttggtaaagtgtttcactcgaagactagagacaaaaacttaacctgcagagatgggtacccacaagtacccaccccaaatggggttgagattacccgccttgatggataatgatgggtaacgggacgggggtggagtgcaattttatatacccaaaacggattcaggacagggttgggagtgatactaccccccatatttaacccatatttatactttctaaacatcccatatagttttttacttattatttattacatattaaaattaattgctataaatataaggttgactactaattttgcctaatttattattgtaataaaagcattttaatatataatatgatctactgtctaatttatatatcaatttcattttcatatcttatggtttccttaattgtttttcttcttggcaaagtaatttaatcttatggttttttttattttaaaaaattaactatatatgtgtaaaatagattttcatctcttccaatccaagtcttctcaaagaacattaacgttcacatttttttttttgtctttgcaagtctttatatactctccacgcttatatatatactagcaaaaaactacgtgcgagacacgtatactaaattttatgctaatttttttttatattatttgaaagtaatacaattaaa

SEQ ID NO: 62931 - DNA, 1031 bp, Cannabis sativa
caaattaaatattacttatagctagtccaattatgattaattaattattgttgccactaaatatatatatattgtttttttgttagtttatcactttatttattttgacttgttatagattgatgaaggggcgtttaggaatgttgatgataacctatgctttgacgatggaacgattaaacttaataatttctaccatgaaatgaagcatatacaagaatatgtttacccccaactgccaagaacttttgctatcttaacagaaaagaatatagtgcactataatatatgatcttatatatatatatatatatatatccctgctactagctagatctatttgtgggatttctttctatatcactgtttaggtcttcaatatttcccttcttacagagatgatcatggatttttaatttttttttttcttttttagttttgaagttattttgaactaaatttgcacgatgagcatgatttgttttattagtgttatattgtttatggcaaatgaaagaaatataaatataagaaaatttttaagtgagtgcattacttttgttgtggcatttaagtgcattttcttagactttttattagttgaatggagtggttgtatagtattaacatgtattgtgttaaatagagtagtgtttggtatacaagtttttttacaaaattttattgtaattttacatatttatcactctcaacctcttttgtttttttattattttaaaaatatattgttttttctttgatagtatatactcataaaaagtttgagatttacttttcaatttttgtccctattattattattattattcataaatttatatctttttggaagaagaagtgcttaacaaataaatgagtagatacaattaatattaaacaaattgggtatattttctaatgctccatacatcattcttttattgattgaatcaatattcaagacacattggatcggtacaaagaaaaaaatgaatatgtggaaaaactacaactaatagtgtagaatcaaa

SEQ ID NO: 62932 - DNA, 628 bp, Cannabis sativa
gcaacaaaaccaaccaaaacatcagaatcacaatccaccattagagagcaagaactcaaaccttgctcaaacaccacaacaaccatcaaaaacaactaagaacagcttaaataacctcaatatatcatcagaacataaaatcaaactactcctaaaaccacagaatcctaaacctaaagtcatgcaagaaaactaactttgagctaaaaaaatgacaaagagtagagctagggatttaaccttgaattggatacactaacaacttgctaaaacactcagaatcaagctaaaaactccacaaacctttgctggtttcttcaaggttcgagagaaagggagtgagttgaagagagaggttaattgtgttaatctccaattttgaataaaagaataaacctaagtatatgtctactaataacactcaaaataatcagattttactaacgtactaatattccatttaagacaaaattaacttagggcaaaagactattttgcccccattattactaaaaagtctctaaacctcctaggtgtatttttgtcatttctaaaacctcgaatattcctgacattcccaatatctaactaggtcgctccgctattactaaaacactaaaatgtgatt

SEQ ID NO: 62933 - DNA, 1063 bp, Cannabis sativa
  modified_base (32)..(58): a, c, t, g, unknown or other
tttagaaagttcttatttaggatgttaataannnnnnnnnnnnnnnnnnnnnnnnnnntggtaaaataatttctaacaatacgatctatatttttctgtagcacggcatggcacgacctgttttttgaaaggcacgcataaatatagtcgagccagcacgacacgcacgaacttacaacactaacttcatctacactaatcaaggcattgaattaggagatgtgacactacttttagggtgttttagtacttctaacttaaactatgagtttaaaaatccgtaattactttatgacccaaaagactcctaattcctacttacgcccatatatatataacaattggtgacattacacctacttgaagaaaactattgtgttgcttaaacaaaccaataaattatataattttttataataatatttagggttaataatatttttgactctttattttgtaaaaattaccaaatggactttttattttattaaatgacaaaatagaccttatatttttttaaaataatactaaattgtaccatgaactgatttgttttgtcaaaataaaatttaacaataactaaatctagagatgttatgacaaaatcgacaattatgttttctgcatctattcgaattcgagttagaaattatcttcaagttgattatattaaaaaaaaactgtcaaaacttaagcttagggtcctagttgtactattttgaaaaatatcgagtcatcaattttatcatttaataaaacagatagcctgatcaataacttttacaaaatacaaagtctaaataattttaaccctaatatttataaatggcctcttgaataactatgtaattaatcaaaattgcaaaaataccaatctaaacgaaaataccacttttaaaaaatcttagctatctattgtacatgcccccctaacaatcttttccccttgcttgtttgtctctattttcccttatctccctcttttctcttctcttctctttcgttttgtttcactatcaaaccaattgtctctatcttgtttttcactttaatttgatgttgg

SEQ ID NO: 62934 - DNA, 729 bp, Cannabis sativa
ttataaatggagtagtccatttcatgttattcttataaatggtcttaagctattaagttttcacacaagtgaccaatgaaattatttcttcgatcactcgaatggcaaataagacatagtatacgggagctatgcacgttacatgagcattcatagaaaatcatagtacgcgagagccatgtatgtcacagacactttggtatacgagagccaggtgttatcctggtatacaggagctagtggttgcagtggcattcaagaattttgcacacctgagttagtatttctatggtttaatgaaatattgatgttatctctagtaaccaagtttcttaatcctgaagtactagtgcgagtactggtaacttaattaagttgaacaatcgcacatagaaactatttgcactctagagttaagcattgttatgataaaaacacttgaggtcacacaagaatataataactggggttatatatttaaagtgctagtgcaagtattcattcttggatcataaatattaaaaagaaaagaaaagcatcatcaattgtagaaagctctctagaagcataacattgcgtccagaataaattttctaatttattgaagaaaaccctctgggagtgggacagtacctcagttgtggtattctttcagtgactaagctcttcctaagtatgagacattgtacttagcacgagtttaatccaatctttcttttttatttttcc

SEQ ID NO: 62935 - DNA, 1368 bp, Cannabis sativa
agagggattcaagtttcatgatagatgttctgccttgaaacttaatcaccttgcttttgcagacgatgttctctcattctgtcatggagatttcatgagtattttatacatgttgcaggccctcaaaaccttctctctaacatcgggattgtatccaaaccccagcaagactgctatatattgtagcaacatgcagcccagagaagtgagctctattatgagattatcaggtttcacaaagcaggaatttcctttcacctatttgggaataccaatatgtgggaaaaggatctctgggaaagaatgtgaaattctagccgagagaatgactaccagaattagaagttggagcaccagaaatctctctttcgctgggcgaatcactcttattaactctgttttgattgctatacaggcttattggagtcaaatgatgattttgccaaagaaagtcctgagaatcattgaatctatttgtagagattttctttggaaaggtaatgctatgtatcaaggtgcaggctctgttgcatggaataacatttgtcaacctaaggctgcgggtggattgggaatcaagaatttagaggtatggaataaagctgctatttgtaagtatatttgggctgttgctaataaacaggagagcttatggcttcgatggattcaaagtgtatatattaagaatcaagactggtgggactacacttcttcaatacactctagttggtattggaagaagttggtagctctcaaagaacaacttagaactgtgatagaacctgctgagtttcagaagaagaaatacaccatttcagctggttataacttgttactgccccccacaaaccgagtgaactggagcaggaaatatggtcgaggctcaacactccaaaacacaatgtcatagcttggttggccacacttaatagactaaaaacacaggacagattactgagctttggtattcagatttctggtgtgtgttacttgtgtaatatgcaggtggaaacatgtcagcatttattctttgaatgcccggttgcacaccaatgtctgatggaagtcaagagatggctgggatggcatgcccaaaccagcaattttcagcaacttctgagatggatagggagatctagattgtctaaattcaagaaaagtgtgttggctgctgctacagtcaggctggtgtatagcctatggagaagccgaaatgatgcaatctggaaaaaactaaatgtcaatccagttcgaattgttgaagaagtacagtggaccaccaaggctcggattgaaagagttttgcccaaaaaaattaagagcattgacaaagagtggtttttggcattatagagcttatacacaata

SEQ ID NO: 62936 - DNA, 787 bp, Cannabis sativa
tacgaagaataaccagttcagatcttagacagaaaagataaagtccttcagaacaagaccataactttggtcaaggtactctggagaaataatatggtggaggaagccatgagggagttagagtctgacatgagggctcaatatccaaagttgttcaggttagattttgaggacaaaattcttttaacagggggtaaagaccttaattttaatttagaattagcagataattaagacttaattatgaaactagagtattaattatgatttatcattttatagagatttatttgaattcagggtgtattatttatgtcatatatggaattttatatttttgcatattttgtgcccgataacattagaatgtagcatttggccaataaaataacatttagtatttttgtactagcgggacaatatagttagatattgggaatgttgggagtattcgaggtgtgtgaaatgtccaaattactccaaaatggtttaggaactttttggtataagtgggggcaaaatgggtcattttgtgccttaggattctttaatccttttgtgggtttcatttttagattgtatgctgatgttattagattgataatagataagataagagttattttcttttatacaagtaaatcaagaggaaaaacacataaactacgttctctctttgaccctctttctctcgagccttcaagaaacccagcaagaggttgagtttcagctgctcaatttaggatttctagcaagtcctttgtaaatcaagttaaggtaaaactct

SEQ ID NO: 62937 - DNA, 1045 bp, Cannabis sativa
aaatgaactttgtaatttttcattttttttttgaaaaaaaatattcttatattagataaagtgataattagacatcgctgtcattacaaaaaagtgttcagggatcgagagaataggaatacatccaaatttctggtgggtaaacacccacttaaccgtattatgggcagcaaaattacaattcctactaatattagagaaaatacaagtgaaaaaaaagaaagaggatctaatacaatatgaaacatagttctcaagctcccacctggactcagtccggttaagagcgttgataactactctcgaagcactttcaacaataataaacttaaagccataagtcttcgcaacgtccagcgcagtgcagaaagctgccgcttcaccacataacgcgtcagcaaaatccaatttaaaagtatgaacccaaagtaccttgccaagatgatcccttgcaacaacagcagtacacataatgtccaatcccacctaaacatcacagttcagttttatctagtcttggggggagggcgctaggttttcgccaaactcagaatcgagcaagggagcaacgaagcatgatgaacaacaaaagaagagcggatactatcaatactcttaatcacatcaactggacagttattatgtaccttttcattcctggcccgccagatggtgtcgacagttaaagaagcataaaggaacacctcatcagaattgatgcctttgtttttaaagtcccagatgaatttgacccagtcccacatccgaatatcattaccacaaataggaaagatgccccacgaagaggacctccacaagtggaaagccacattacaagataagagcatgtgttcaatagattcatcctctgtcccacacagagggcatatcacatccttaataggaaatcttttacagatctcataccgaacagggatagtcttggacagggtgcaccaccaaagagtcttcaatctttcagagattttactattccatagtcggttccaaagagacggggcaacctcacaattgggcgctcttt

SEQ ID NO: 62938 - DNA, 1177 bp, Cannabis sativa
ttatattaataataataaaaaaaagcgacttctcttgaaaataagcaatgaagagaaaataaagttttatcaatccacggatgaaacctcatcagaaagtgtgtgattacttgctccagatgggtagttactttgaggaagctgagaatcatggagcgattatagatcaagaaactcaagtgagtttgatcttaaatagtctgattccagcttttctgccctttacttcaaattatgtcatgaataagttgacatttgagttccacgaattaatcaacaacctttagacatttgaaaatttgattggaggaccgcagaaaagaagaaacaaagctcctagttctagtaatgctactgctagtacgacaaagcctgaggcaaacattgcctctacttcgaaacctggaaagaagaagaaattgaggaataacaagaagcctcttaaagctgttaacacagctaataagaataagaagggtgctaatccaaaatcaaaagataaagaaaaatatttctattgcaacgaaaagagcactggaaccccagtgtcttaagtttttggcaaaaaaacaaggtatttctatctttgttataaactcatgtgttttagagaattattatccatttaggttattaattctagatctactaaccatatttattttcttcttacttcagcttcagctgcttaaacttgaattgttttcctagcgagttaagacggatggttggacagaagggtggagattgtccaagttgaagatgaagctcgttatcttcattaatttttgagttaattgttttagtcaatgaacaattcagtttcaattattagtatggaatttttatccctattttatattattggagacaattcattatgacatttttgagagtattaataaaattttctctttaagaggttttcattatgaattgcttttataaaattgagattcatattctttaacttttatgccaatacaaattatatttatatgtttatcatgttttatgtgttttgtgttttaatattgatacaaaatttatggtatttttttaatctttgaaaagagataataccacataaacacttgattttttaaaattcaatgtttatgaataattctcatttcttaagcaattattaagattttatttgataaaaaaaactttt

SEQ ID NO: 62939 - DNA, 1470 bp, Cannabis sativa
taaaggtttggtttaccttataagttaatttctgacaatggaaaacaatttaattgtaagaaaatgcgccagctatgcgatgaattagggattaagaaagcattttcggcggtcgcatatccacaaagcaatggacaaacagaggcggtgaataagatcattaagcataccattaagggtacgctcaaagaatgcaaaggtacatggccagaagaacttccccaaagtctatggtcgtataatgcaactcctcaatccagactggtgaaactcccttttcactctcttacggtgcgaagccatggtgccagtcaaggttgaggcaggacgtctacgaatagatgtttttaacattagtggtaacactgaaaatcagttgtttcaacttgatcttttggaagaaaagcacgatcaggctcatttgaagaatgcggcctatcaacagcgaacagctcgttatttcaactctaaggtcaaagaacgaagtctgggagtaggtgatttagttctacggaaggtcatgccaaacacaagaaacttaccacatggagtttttggtcacaattgggaaagaccatacctcatcactgaaaaaattggtagtgcgacctatcgactatcagacctcaatggaaccacgatcaaaagagcttagaatggcaaaagcttaaaatattattatcaatagtacttgcactgtaattatacttagccaatttattttgataaatgtcctaagtataggggctataccctacctttgtactattgattattataatgaaaattctcgaagttttaatttttgcaagtttaacatttgtaagttattacactgagctatattagtaaaaacattgcaaacagaaacaataagataaaagcaatttaaaattatgcaagtactcctgtaccgtttaaaaatgcaaaagaaaatatcctcgaaaggatatatattgttcgagaaagtaaaaagttgaaatttgttcaatgtacgaaatgcaagtacctgtgtaccgctgaagagtcaaaagttcaacgacaataatagtaaaacttggataaattaagaagctggagtagtggagtcatctgcgaccttgctagcaactccatcagtgacttcctaagtgtttgcgttctctgcctcctcacggaaaaggtttcctccgcatccttgggattgagtaggcaacatagcacgaaaagcctcggctatctcagctgcttctgccccaagaacagagaagtcaaagtccagcaatttggataaagttgtataaatatagtcagagacaacctgatcgtactgtctcttcccatactcctcgcggttccgagtcaattcctcaactcacggctctgagaggttagccttatcctctgcctgctttgccttctcctcctcctactctttggctttttggaggttctcgacatctttctccctggaagtcgcatccagcttca

SEQ ID NO: 62940 - DNA, 1020 bp, Cannabis sativa
cataaaccaagaatttcagttatatagacacactttatatagaatagatataccattaatttagctgaaaaaatgtcttattttattgaggtgtcctcttaaactatttctaattgagtgttataaatatgatgtatgtacatttttttttatttttcagttcatattcataaaatcaaactcgaataatagtataaattgtataatgtagtttaaatttgacacatgctaaaaaaatatactaaatttaacacaaaatataatataatcaaattttacactataataaatatctctttttatttacacatgtgccccttactaatataattaataactctttgtattttttttttttatatattttatatggttcttatatgctttcaataaattgggccaagcccaagatctattttgtctcccgggagaacaccaatacaactcacccaaacggggtttcgtcaagcttagttagcatccagaaagactatctctgtgtatgtgaatgaggtccttagcgtgtatctagaagcccaatactaattttttgttttatctaaatcgcaaaaaatcagaaattactttcaaagaattttggaagatgaaatctcactaaataagaaaaataaataactcgaaatctggtaattaatatgtcattgattatccataacaagacgtggtataaataactaacttcgtgataaggccaccaccacgtcagcatacacaaggcacatcatgcgttgggcttaccaaataagttcaaagtccatgcattatttgtaaactccccctaagagagaaatgggtaactagtatgacctctatcacactataaatactaattgcatcattcatgcaaagggttaaaaaatcttggcatacttcctcaagcaaagaatagaatgcttatacttattgtaatctcttaagcttttctagcaaaatacttaataatattgactcatggactaaggcttgttaacgccccaatcatgtaaaaactctgagtgt

SEQ ID NO: 62941 - DNA, 962 bp, Cannabis sativa
aacaacgggagtcccttgagactcaaaggtgcactccactacgccctcaactcgcagtgccttacccaccatatcaacataggtggtgctgtcatcgatagtaatcattaagtcatgtttgatcttcgtattcaacccatccagggtcttctctttcttactaaaatcggttggcacgattcccgaggcgaaccttgccaaatgatcaaactgagtcgtgtattcaataacactcatgttttccttctgagtcagctgggtgaattcttttctttttgcacttctaacggcctccttgtaatactttgcattaaatagttcttggaacttttcccaggtcatcgttgcaacatattgagtcagggacaccatgtcccaccataccagagcgtcttcctgaaattggaatgtggcacaggccactctatcattgccaatgacgcccataaaattaaagattctagtaatcacagttagccattgctcgactttcttgacattaggacctcccaggaaaattggatgtgcttgcttacgaaatctttcatacaagggttccattcggttcactgcagctacaggttctgcctacataataggggcaggagctattggtatttctggagcagggattgtaggagcaccctgctgtctcaattgtcgaatctcttcatcttgtttattaatcttgtcttgcaaatctacaaacctattttcctaatccaaggtaacttgggcagcctgtggcgagttaacatcaccctgaccacgtgccctgcctctaggacctctacctcagccacagatattaaggggaatttgagctccctgaccaccagtggatccaactgaaatgcgctggctcttggtctttcgcctggcgtccatactaattagaacagcctgcgtaagcaagagctagtctggtcagatcgtgatcaagtaaaaacttactaattgcc

SEQ ID NO: 62942 - DNA, 930 bp, Cannabis sativa
ttacaaagtttatgatcattgtctccttaaatccttagaatctgttttcttgattaggagaactatagagtcatatcctaattaaatttcattgaaaagtatgatatggactttggtgtctagtcacattcatatacaaacatttagctcttttttataccccaaaaaagaaaacagatttttgctttagtgaaaacctgttgcgtggctttgttgaatggtgtaggcaattaattagttcgtacagtcgcatcttcagtgaaaaccatgcttgtttgctttcttatccaaaatcttttctgggaaacaccctactgttcctattgcattctccaacttttcgatgaatcagattgctcgctaatgcaatctggattcagcactgcacttttctaaatccaaatccagagtttcttttgttctgaaaaagttaatgacaatgtttactctctcctcctcaggctcgctggatggaacagtgttattctgtctcggtatctctatcggcataatatcttctttcataaccaataaaactgaagttgacaagttgaaggagttgctgaatcaaactgagaacttagttcaggatttacatgatgaacttgaaatgaaagattcattgacagtgaaggagctggctaatgagaactatgaatcacaggatacatatgagtattccatttctgagagggctccgaacacattattttctgaacaaaatattgatggtcctatcgaagatgatgctagagattcatatttacagaaagcagaggagagttcagagtctatgagcaaaattgaggcggagcttgaagctgaactagagagattggggctaaacataaatgcatcaactcagcagagaagattgtctgatgttgttgaggtaagcatgaggttttttttcacatctttttatttatt

SEQ ID NO: 62943 - DNA, 725 bp, Cannabis sativa
attgtagttttaatgtacatggttttttttttttttttttcctaaagggcccaattttaaaatttcgcacaaggcccccaaaatgcttgggccggccctggactgagccgactggtatgggatgcgactgagccgactgacgatgtgactgctctgggatgggactccgccggcgaagagaaccagtcgtcgactcgccgtcgccggtcttggagaagaagctttggtctgatgcgtggtaatggtttaagggtagggtaccgacaactcaagtcgactggtgtgggtgagtcgaacgagtcgagtcagtggactggtgtgggagggacgctgggtgtgggtgagtcgtgtgggtgggaggccggtgggtgtgggtgagtctgtcacttaaatgaaagtgaagtgaagtgaatatagtgagtgatactgtgatagtgaaggaatacgaatagacatgcagtgagatgagggtttttgtatttgtttgaaattaatcgattcattcaatgaacatgattaaaaatttcaaatagtaattagtaaagtaattagtaaagtaaagtaaagtaaagtaaagtaattaattattaattagtaattaattattttaagtattaattttttaataaaaaaattacttttatattttcggattacgggttataacccgaccagaaaataaacacataggctgacccgaaactgaaacccggttacagtccttt

SEQ ID NO: 62944 - DNA, 754 bp, Cannabis sativa
atgtgggattgggtcaaatttatttgggaccttaaaaacaaaggcatcgatacagatgaagttttcctttatgctttgtttattgttgacaccatctggcggatctgcaatgataagatacacaataattgtccaattaatgtaattaagtgtattgacaatattcgttcttcttttgtaaatcatcatgcttctttgttcccttgcttgtctcctagtttggcagatatctggcgccctctcccttaggactggctaaagctgaattgtgatgttaaagtggggttggcagcatgtgtgctgctgttgttgaaagggatcatctcggcaaggtgatctaggttcatacttctagattagagttttctgatctgttatgtggagaagcggtggcttgctgcaatgctctggatattgcgatggatcgaggctttaagtttattatagtagagagtgattcgagggtagttattaatgctcttaatagggaggagtcacgttgggagcttgagaactatgtctcattttgtattagatcctctacttattttgttagttgtgttttctctaatattagtaaaaactgtaattttgttgcccataatatggctaagtgggcgtttacccaccaaaggtttggttgtattccgatttcttctattcttgaatatcttttttgtaacgaccgcgaggtctaactgtttttttgtctaatctatgaacgctatttaaaaaaaagctacaactttttctt

SEQ ID NO: 62945 - DNA, 813 bp, Cannabis sativa
gaccgaaaactgatggatttttatataaaaaaaaccaaccaaattggccgatgctcaaccctaggtgagtcttcttgaccttggttgttattatcagggttttttccctcgtgattgcctccatctagataatatggtgtcctccacccagattgacctcgccttggttttctccaactgttggggccatagacaactaattggtttccttccaagtagaattcaatgtcttggagacgccttgaatgccttgccatgttggagtggtaatggatgattctaagagaaaaacatagctaggtctttgtctttctcatagacggtaccaaactattgaccataagaacttgtcaatgatattatgctttgaaatcttgagctatgaattgagaaaattatgaagtgtgaaatatagagtgagattaattgaatttagagagaaagtctggagtgtttagtgagctttgtattaaaatgataacctcccgatatacatggtttctaaaacccccttttatattgaatgtatttataggaggctctaatggcattttgttacaagctttgataccctaagtggtcccttctacaagaataattggtatcactaacagcactattactaacgcaataaagtcctcactaaaagtaacattattaccaacgacatttaagtgtcttcagtaataaaaatatattttttttggtaaattagtcatcaatggtgacaaaagatatcaatgacgactttgtcgtcattgatataaatacactagaacctctatccaagaatacacttgggaccaagtaaat

SEQ ID NO: 62946 - DNA, 873 bp, Cannabis sativa
accaagacgagaccctagtacatgtctctcttcagatgttcaactgtccagaaggtatgtaaattaacaagtttttatttttttatttttttacatttatatctaatcatgcctatggatttacttcacttggctgctagcaccttcacagctagcaactttcagttttttgtttgtcttctttggaagttatggcattgaaggaatgtatacttacatcacaactcagttttggtacccaccaaagtaatacagttgattgcaaactacttggaacagtatcagcacaacaatcgtcaacatatatttgttactagtgtctcaccgctacaagtatcatatcgtgagcaaaaaactccatcctaccgatcaaagctcaccgtggatgctggtcaaattgaaaaaaccaataaaatagattttggtatggctatttacaacaatcgcaatgaaatacttttgactttggcaactccattgcaaagactccatgcacctttgataatggaagctcacgccttccagcattctctcacatggtgtcgagtcacaacatttagtcagattgtaaaattcttgttgactatatttttaacaatactactcatcatctccaccttaacaggtttgcaacgaagattcaaagcttgctgtcttcttttcctaatgctttcgttagctatatacctcgagggacaaatgaaatcgctcatcgcctagctagatgtgctttaagcttagatgaggaagctttgtttttttctatataatgttgtattttggactttggttatctttattaatgttagaattttagataaggtgaatggggtttcatttcaaaatcaattggcaatgagagaagtagctcat

SEQ ID NO: 62947 - DNA, 1537 bp, Cannabis sativa
ctagatgctttcttagtatcgatcaggccacttttttcaatacgtccttctatttccaccaccccttgtacattgcttctaagattctcactttcaaaataatgattaccgcttgtatctgaagatactttgtcactaccttgtttgctcctagtattagtccagccaattattgattttttcttattatcccgcttcgatttctcactagatgcttttttaatatcgattgggccacttctttccatacgtcctcctattccaaccaccccttctacatcacttctaagattctcactttcaaaatgatgattaccacttgtatttggagatacaagtacatcactaccctgtttgctctttctatcagtctggccaattattatttttctctcatcattggatgctttcatcccagcagaactctcataatttcctttgtcactattgattaaaggagagtaatccttgcattcttctcctccaaccaccccaagtatatctcctacatcatcactagggtcaccaagagcatgcttacaaatattaccataatcattacaatcaaccattgcatgatcaggtatttcacccaaattatcatggttacccatcgaatgatcatggatcaatgcaacatctgtcacataatcttctttgaaaatatgagcatgacttttagctatttccatgtgtgtggcagaccaatcaaaacgactccatagataaagcagaggtggcttcgcattccattgttccattagtttgtcctttacatcagctgatccaggaatataaaatgactagaaggacaaccaaacatccagcatagtaaattagttatcatatcttaaatcctacatttaaatagggttacaattcatcaaggataataaaaggcaataactcttcacctttcctgataataaatggtcatcctcccaaaccaaatcatacggtaattcctgttcatctagcctgtacaaaaatgtcacaaagcaaaagtgatatccttctctctagatgaggcaataatactttaaatacatgagatgaataggttgataacaagtaatacctttcagtttctggtggagcaataagtataagaacttttggtttaaactcaagagccttatcaatgaacttcttcgcaaattttgatccaactccaaagggaggatgtaatcccatgatctgtccgaaaccaaaataaacattctaaagaccccagcagtcaatatatctttgatgtgataaaactaaaatcctttcgctcttaccaattttgatccgcttggcaattcctttggcttgacactcatccagtccctctcctcaaaacaaaaatcattctgccaatcaaaaagataaaatcatcttttttttcccttttaatacagaacatacaattgacttttctcttggaaatacaattgttttcgaatgttagcacgtcaatattgacagccatcattaaaccaaacgtacactaacttggagactcaaatagaaacaacaaagtttgcttagagtt

SEQ ID NO: 62948 - DNA, 747 bp, Cannabis sativa
tactaaacacattgagttagacattcattttgttcgagacaaagtgttaagcaagcaattagaagtcaggtacattccctcagctgatcaagttgccgattgcatgactaagggtctttctcattcaaagtttcactacctgatttccaaactcggtgtgaagaactcaccctctcgtttgaggggtggtgttaagaattagttaattatcattagtgttaattgctctgttttcagtgctttgtactaaagtgtaatcaaccttttattttttgttatttcttgttcccttggtgccaacattagggccacctgtcatactcttatttgtcattgtaatctctctacagagtataaatacaacatgttttactcagtctcctttgagctgagaattacttttccatttctgtgtaaacctttactaattttgccataaaaaaccagagcatattactattaaacacaaaggcccatgttttaaaatgtactctaaaaccaagttttttatatcaagtaaaaatcctctccataacaaataattaagttaaaacaaatccttcccgagcatataatcatatataataatcaatttatatggatatatggatacatacacataataggcatcatttggtttcatcttatcaagattagatatttatttatacatatttatcaattattagcatattattagagagtattataataataataataatccaatgatggaggagccataac

SEQ ID NO: 62949 - DNA, 856 bp, Cannabis sativa
caaattaatattgtagttgaactttttattgtagttgaacttttattgtacaaaatgtaatcactaaaaaccactgatcctttttttttctaataaatcatcttaaggatgaagcaacaaactttcttaaaggacaaatggttcaatatgtatgttgtttagcaatcgtaagcaattactaaataacttaacttattagaattttatcaataacttgtggattattaatgattagttattgattctcaataaccattaaatgtaagggttgttgtgatcataattaatataatacgttgggtagaagtttgataaaacaaatgatcttttttagaaactagattcctagattgatcactcccactgatcaagttaatattcttaattccacaattctagtgttgtgagatggataataaagtatgttacccttataccttatagcatttatgatgaaatgatcatttatggtatttgggcccagttctttcatttggcattgtactctaactgtacatgggtatttttaaaatgtgtacatatcataaagtcaggttccagccttatcacaactcaaaatacgtttaagaaacattttttgttagaacataattcgatatgtacactcccattgaagagtatcaatcaacaaatatttataaaagtttggtgtttgctatgtaggctccaccccatgtccaacaatgcttagtttcttaaaactggcgcaggccattatttgggtgtactaggaatatgtattgggcaattaatgaacccatgcttttaaagaaactttgcaaatgaactgtgagtttatccatacccatgaattttaatgtagtattctccattt

SEQ ID NO: 62950 - DNA, 1087 bp, Cannabis sativa
  modified_base (353)..(354): a, c, t, g, unknown or other
tttttttccttcttcatttcttcacaaataactgaaattttcaaactggagttgttaatagtttctttgattgtagattttgtttcaatttaggggtttagatttgtgaagaaaatttaaaatctatagtattttttttgttctggattttgtttgatttaggataatagtggtggtaatagtgagatgatagtggttcgatggtggacacaccataagtattgtgactaaaaacacgtttagtcacaatacattgtgattttattgtgatttttatgactaatacttttagtcacggactttttaattagtcacaacttacgtaggaatgacaatttataattagtcacaanntttttacttttagtcacaaatttcgttgtgactatgaaaagtaagattgtttgtggaaaagtaagattgtttgtggaaaagtaagattatttgtagtgagtcacaatgtttgttgtgactaaatgttgttttagtcataatatttgctgcgacttaaaactaaattagtgacaacttatatctaaatgttatgttttagtcataattaattttttgttgtaactaaaagtcacatttagttacaaaattaaaaaattatgttgcgactaaaaaattattactaaaggtaactagtgtaagatctttatgagtattataaatatttaaaagattatttttgtttttgattggactaattaaactattaaagaataatttattgtacgcacctaactttgatgtattgtataattatttggaatatttgttatggattttcactgtaggtgcttttacagtgcacccataaaactaaaagtgttccaatggtgcactccttatttatttcggtgcctatttgagaaattttttaatataatatttttatagtcatatatgttgtaattatttgagacatattgttaaattttaagaaattcaaaaaatttaatatgccaaaaatatattgttaagaaaattttcataaattttgaaacagatagagttgagtgcaccattctaaggggtggatcgttaaattttcatatattatcactactacaaaaatgggttt

SEQ ID NO: 62951 - DNA, 1265 bp, Cannabis sativa
  modified_base (179)..(179): a, c, t, g, unknown or other
cttttttatttttatttttataagttttatataaatatataaatatatatatatatatttatgaatttttatattagaatttctatagtaattaatggagcaatttaaattacaattaatctacattgcaaccattagagaaactacggaacaacttaaactttatttttttaaaaaanaaaaattaaaaaataacatataagataattcttttttttatttattagtttttaataataataattaaatttataacatttttttttttttaagaaaatgatattagagtttgaaaaagagtgatgtattaggtgggatcctaaagatctcacctaacatgattcatgaatgtcttaatttattattatttttttcaaattttgtaattggtatgagtagaaattgtagaatgtaagaataattacaatttttatcatatagtggaaaattctctcttaaaaaataatcaactcataattttttttttaaaaaaaataaagattaatttggaattcatcatccactaattaattaaaaaaacatttttttacttgaaatccacccgttaataattttttatatatagtttattggattatatttacttgaattcttaatgcataaaagttgaaaataattagactaaaaaaatacaagtgaattacaataaaattaaatcatatatagagattagatattcttctttgtgagaatatagatggaaaaaaattatttttcctataatttggcaaaatggaatatttattctatttattagtgatgaactatttcaaatacacttatcttgagtgtagtttagagaacatgggctaagacgagttaggtccgtacttagagttcactcaaattcatggtttaaaatttttatagtatacttttttgcattgcaaaaaccggaattttttgaaaaattttataaaaagaagttcaataatactcacattttactttagataaaatacacactcaatttttttttggatccattaattgtatgatacaatatcaattgtatcggtatttactttttgagtcaaactctaaatacacttttcgagatagtggcaatctctcaattaaatcaaagttctattttcgtattctatatccattaataactattcaattacatatttataagttttacatactaattgcaaattactaaaaagcccttacactaattcttagtgtagctgaacaccacattgatttttttttcttaatttctttataattttgtt

SEQ ID NO: 62952 - DNA, 3607 bp, Cannabis sativa
gaaataaaattaaaaatatttagcatctattgcttaccatcagaagataggccatcagtttgcatccatcaaagcagcttccttgtgtttttgctagaaatatttctagagaagttacttaacaaatcagcattacttaatccacgtgcactaaaataatctaacagccacattatggcagaatggtttatcataattccatctgtattatctataacctcagtgttgttaccaagtttttctgaaaaaacagctacactatcaaataacatcgaggcatcagcagcagcccatgtagaaagaacagcacccccaaaattttggaaagcactattaggtaatgacatgatggttccaactagctcaggcgtgggtgtacaagaagtacacagtgtcaaaagacctccaactgctatggcacctgtattttcatctaattcagcatatgagcaaaagaagctctcaattatcttctccacttcaattttggaaactgagaactctgatctaatcaagccccataacttatgctgcaacaggcaaccccaattcaaagagcttttaataatattggaaatagtttcattattcttgccaaatatggagaatttcttcaggctaatctcaaattggatgtcaagaagatgattgtgactcagttgattcacaactaacttgatcaactcttcatcaccaactgataaatctgaaagatgacagaaaacaccacagaacatgttttttaaatttctcctcttccatttagaacaagaaattatgtcagaacaaaggagttttggcaaagatgtatcttcttttgataacatagagatcttcttagaaaggaaacaacggtaagaaacaaacgcactatttaccaactttgagatggatattttgtccactttagaactattattcatcatttcacggatatcatctcctttggcattcaaaaaagtatgagagccattaatatgaaaagcgagtaagttcacgtttgatttacactctttagcagattcattagcgatcatttcatctaccgagcagttagtcacttgttcctcgtaagctagtcgtgatgcatatgataataaccgtgctccaacaggaaagccattcctttcccagaacaaaagcatttcttgcatcctctgatgttgagaaaagacaaagaatcgaagtattaaggcagtgggagaccctacctcatcatcgtaatcaggattgtcttgaagaaattccaatggaggaaatagtttgtaaccctttagttctaatagcttggctattttagaagataaaacttcaagctcagtgaaaacacttgcaagtcctcggttatcaagatctacaaaagacactaataattgttcaaaagtcttgagacacatatttggtgtctgaaatgcttcttcaaatctatcaaccaaattccctatagtattaatttgatgaccagaagttaccgaatcatcttgagtcaaatccaaagcatcagaaagtttgcaaacggatccacctttctttgaaaatatagtttcttggtctgctgatggtgttggagattccagttcaaatgaactgttccatactgaaggtgttgcagacttatggggaacatctgatgaatccaagcctgtacagacttccagcttcttaccagagagaagatttacaagcctttctttcaaaaagggtgaaagtacagcacaagaaaacaagacatctaatgagtgaataactcgaaactgtacaataacattaaaggataatgagacacctttaactatgagatcattcctctccacatcatagtagtccacaagaaggaacaaaaactcaagaagagtgtgtgtcatatcaacgtattttggtatagagtttaccattaacagagctgcaggctcaatattcatgattttgtctactttatcatcaaaaaagagccaatcatagaacagagcaagcttcacattggcttcaacataattttttgtgcaacatttgagcaaccaacctacaaccgcccaccttggaataatttccgactgaataatttccttagtcgggtgatgtgcacaacatataaaccgaacaatgtcacttatcacagtctccctctctgggccacataaaaacttcttggtaaaccatgtttggtggcgcttttggctccccaacttcacgtttgtcaacaagaacctcaactgaatctccatttctggagtaatcctaagtaaaaaatatctactagatgtcctcgtgcaataaagctgtgaaatatctgaaaattctggagtcttaaactcacctggattgaatatcaaatccttccagatagttctaatctctggcacgtgaatcaaatcttgtaaaagacgaatgagatctctcccaattctcaggcacaaatgaaactgttgcttcaacactctaacacaaaactcaacctccaatcgctttaatgcccctaaatttgtattgtgaattaacctacagtgatcagctaataatcgaagataagtgtataaagcactagctaaaatcattggttctgcttctaaaagagtatcccatttagtcataaagacattcaacagctcagaacacagccacaaattgccattactaaaatctccaccaacaatttgcctcaataaacacactaagagaccatcaaaaccaatagcagatacatcgatcatttctttacaaacccatatcaattgaactttcacagagtccaaaagttttacatacaattcatcaacaaccttcacaagcataccaacaaacaatcgatacccatcagatacaacggcatgtaaatgcttaatatgggctttagctaaatagggttcgcataagaccccataaactattgcacggttaagctgtaagtactcttctgggtttgggatatcgagtgaaaatgggggtttcagcgctggctcaagcagcttaaatgcttgtctcagggagtgttctgttttattttctgcttcatgggaagcgattaccataagttttgaagccatgtgaggcttctatgctgcactaaacataaaaagaaaaacaagtagacaactgaaattgtgtgaaaggcttttggggctaaaatttaaacaaaaacgctgggagagtgttccaacttacctgattctcgtacagtagagactttgagattgaaattgcaattgaccataaggtgtaagcttcagctcaggacaagtcacaagcaagaaaacccctttgagttgaaatttccatttgatcaggcaactatctcctgagaacagagcaagtgttgatcatggtgatttaagggttaagaaacctaataccatttttatcaaatcaattcttcttaagctagggatcgctggtggttgccaccgtttggacggagagggaacaagtggaattagggttgttaattggatcacatccaatcttttcagattcatccaggtccaatccaattatatattagatgttggattttttcaaccgatccaatccaatgttgtaggatcaactgaaccgaaccgatccaatccaataattattggattggatcggttctatctaatggatgtat

SEQ ID NO: 62953 - DNA, 707 bp, Cannabis sativa
  modified_base (27)..(34): a, c, t, g, unknown or other
aaaatagattacattgaaatggagttnnnnnnnnggcataaaacccaacacttatataaatcccgttaggatacaaaataggaatgaaatctcaagtgttgagaatcctatatgggcatgtaagagagtgaggaagagagttatctgacttagagacctaggcttagaatgaggttcaagcacttaatgacttggaggctagaattagacttaagtcctttagattagagttaaggtcctttatataggagagcttaaaccataatttataattgaaatccttagatatttgtttattaaattgattaattataaaagactaaaatacccttaatcacaaatattttctagctactttattaggttgttaggcccaatttacaatccaatttgcagtccatgtgtaaaattgtattgagaatcctagcaggtcctatcctggccagccagacacctgtagcaagaaggctggctgaccttgtgttgtctagaggctggccagcctgaccaggggtggctgaccaacttctttgaggaagccagttggctgtagtggtaacttgacctccttgttggtgagttgtattgtcacatgttgttgattttgtccacgtaagcaatgccacgtcaggtgggaaaaaattgggataatattagggtttatgccctgaaaagcttgtaacgacatttctgattattaaataaag

SEQ ID NO: 62954 - DNA, 926 bp, Cannabis sativa
gtcatccatctgctgtagtcttaaatcaagttttgaacatctcaaatgtaaaacatcaagttaatgaaaaacactctttctgtgatgcctgccagtttggaaaatctcatgcattgccatttcgaaattctgacagtcatgcatcacatgttttggatctcatacatactgatctatggggaccttcccctgttgcatcacacaccaattttaaatattacattcactttcttgatgattatagtagattcacttggctatttccacttaaacaaaaatctgatgcacttgctgcattcattcaatttaaaaatctggtggaaaatcaatttgacagaaaaattaaacaactaagaactgattggggaggggaatttcaatcattttctgacttggtcatagctaatggcattttctttcaccattcttgtcctcacacttctgaacagaatggacgtgctgaaagaaaacatcgtcacattgttgaaatgggactgactttgcttgctcaagcaaagatgccacttaaatactggtctgatgcttttcagacttcagtatatcttattaatcgattacctacagttgtcttgaagggaaaatcaccctttgaagttctgtattctaaagtcccagattataaatttttaaaagtgtttggatcggcctgttttccttgtctgaggccatatcagacacataaatttcaataccattctgtcaaatgtctaaatcttggttacagtgaagtgcataagggatataagtgcttaagtccacaaggtcgaatttacatttcaaggaatgtaacattcaatgagtcagattttccatgtcattatggtttctttaataactatcaaaaggaaaaactcatcacacttgatgcacctcactcctggtttcaacttccatctcccatacca

SEQ ID NO: 62955 - DNA, 958 bp, Cannabis sativa
  modified_base (258)..(260): a, c, t, g, unknown or other
tttcaattcagtgaagttaacaagaatgtttcaattcagtgatatttcatcaatgttttcacatgatttttataactttcagaactctgtttcctaggtttactatcattgttgttaaacttatttggacaggtgatcttgagtgttgatcatcttgatatgagtaaaggaattcaataaatgaaggaaaaaatgttcctacttagctttgcagtgattagtgtctgatatggcaattttttttgaggtcatttgaannnctgtatataggtatattttgatagataatagcactaataagtgccccttttatttgtagtttatttggtaatgtttttttggattgagttcatagtttgattcatattttgatcctttatttttgtgtgttgaaagaagagtaagagaacccctcaagaatcacaacaattcaagagagatgtggaggaaggaagaatcacaatgattgcaccattaaaaatcaaaataggaatgaagctcatggtaaattccacactcatgctactgttattggtgtacattaaattcaagtatgctaactttcaagacttgttattctaacatatatatgattcttctaatagcactaatatggtaccttgttaaactccatatagaccatctattcattagtgctcaattaaattggatgtggccactataccaataaagacatgaaaagtctaacttaaatatcctcatctttataattttcttagaaatcttcagaattaagtaatatatgtatagagacaactgttgaacattggaccatgacatacatatttatttatattttgagatgagttatgttgtgttgcatataggatcaaaagtacattagtaaacaacgaaacaatcatatcctagatttattttattttacatacaaaggtttcgatcatgatatttaatatatgatataggttttggtaat

SEQ ID NO: 62956 - DNA, 1317 bp, Cannabis sativa
tgaggtggtaaccctggtaattcctcaggaaacacgtccaggaattccttaaccacgttaacctcctcaggtccgagtaacacaggtgtacgaaagtcaattacaactaataggaaccccacacatccactgcgtagtaaatccctagctttcaacgccgagattcttggaacgggagaacctagaactgatccaacaaaaacaaatggttcctcattctccggctggaaggttaccatcttccgtttgcaatcaatactagccgaatatttggacaaaaggtccattccgagtataatatcaaactcggccaatggtaaatccataagatcagcgctcaattctttgtcttcaattctaattaacactgatctaacccactttcttgaaataattaattccccattaggcaatagggttcaaaatcccatctcaaatacatcactaggcctaccaagctgattaagaactcttgatgatacatatgatcgtgtagcacccgaatcaaataaaatagtaaagacaaaaccattgataaaaagctgacctgtgactactgaaggactagcggcaacatctgcctgtgtgatggcaaatacacgcgcaggcttggcctagcttcaggcttaggttcttctttcattaattggggacaatctttcctgaggtgccccagtgacccacattgaaaacaagctctccggttacaagtcgtgggatgatgtttcttgcagcgtgggcactcaggataggagtaattccgacgtccccctttattttggtttcctcgaaacctcttaccttgccctgaactccacaaagatgggaaagttctcttcttttgctcaaaagtgaaatcaccactctcttttccagggctaaaaatagggagagtagtggtcccactagcaccaggagtctctcaggtttcttggaaaaacttgactgctccttcagctcgaagagccttatcaaccattttagcataggttgtagtatcatttgttgtgataaccatatcatgcttaatcttggaatgcaaccctgccatgcacttctctttttttactaaaatccgttggtacgaacccacaggctaacttgccaagagcgatcaaacttggttgtatatttagtcactgacataccctcgccttgtaccaatttgacaaactctttccactttgcactgtggaccgcctcattatagtacttagcattaaaaaaataccggaattcctcccaggtcattctagcaacatccttggtgagggataccatctcccaccacaccagggcatcctcctgaaattgaaa

SEQ ID NO: 62957 - DNA, 1578 bp, Cannabis sativa
ggcttcagagatatacaaaatgtaaatacattcttgcggcagtcctcaatttcacatccaaatttcaaaatttaaaggtcaagcctagtgaaagagagtgaacctcagcgccagtcttggcagcgaactcaacgacttgaatgagctgagaaggcggaatgggtccagttgagagggcaccgactttggggtaaggatgcgtctgattaggaaggtcggaaatgatggccttggtgcacagagcaatggaagatctggcactggatttggaagtgagaattatacgtggggatggggttgagaaagttgaaggtgaaatctgggagagcctccatggaagagtgaaaagagtcgccgatgccatttgaagggtaaggaggagatgaggaagagattaaagtggggagaaaaatgatgagcgaatagcgatggattggttggtaatggtagtggaacagagactagttcttgtatttccgtgccaggacaaattctctctttaaattttagtcaggtaattaacggtggaggtcctccgtctataatagcttctataattcttttttcgcaaggttaatacttagtcggttgtataatttggtttggctgtttgtcttcctaatttaaaaaaaaaaaaaatgtttttagtttttaaaaactaatagaggttgtttggcaaaaatttttaaaataaaaaacaaaaaacatcaaaatgctatttttaattttcaaaaataatttctttttgtctaacatattatatttcatatttttgctcacatactcgcatcttagacccagacccgaatgggttcatattatggtatgatgttaaaatattaatttttttaaaaaaattaaaaatagttttaaaaaacttgtgccaaacaccattaaatttttaaaatttaaaatgacaaaaaactgttttctattcttactttttaaaaacataattttaaaaactaaaaactgaaaatacaaccaaacaagctctaaaacgtttacttagacttctctataattcatcttcgacatacaatcaataaagttagttgtggttagaggaaatggtgaattagtttagattgaaaaatatttttttttttcgttgatggattaaactctgtttttaataagaattattacatagaaaatataaattgacactttatttataaaaatactttcataaggtgttgacaacatttattgattttaattaccaaaatacctcttacactataacttacacaatcagacgatagttgcaaggtggttgctgcgtggttgcatcagacgtttcaattagacgataattacatggtggttattgggtgattcatcatatgataaaacttttacttagactaattttaaattttatataaaaaaaaaaaaagaaaaaaaaaacttttacttaaactcattttaaattttagttaggtttataaaggaattggttctctactagcccttatggtgaggttgttggttacactaacataagatcttatttattttttgaatgaaattcttcaaatattatacaagataaaactctactcaagataatta

SEQ ID NO: 62958 - DNA, 741 bp, Cannabis sativa
gaagagcataaggatactccaacggattatagaatgggacaaaacacagtttgacatatttctgtatttggggttgtcctgctcatgttcttaagcccatgtttgggaagcttgctcctaagactgaagtgtgtatatttataagatatttagatgagactcgaggtgcctgtttctatagtcattaagataataaagtatttatttctacaaatgctactttgcttaaacatgactatatgaaaagtcacaagtcacgtagtcaagtggttatcgagaaaataaaaaatgagatttttgaaccaacaattttagcaccattaattgaataaccgacagcggttaccacagttcttgaaaaaggaaaccccgatacatcatcttagtgggagggttgtgagacaacttgtctactatgaacatgaagcacatattcttatttctgatatagacaaggatgatccattgacttacaaataagcaatgtatgaccctgacttagacaagtagaacaatgtcatggatttaaagatggactccatgcgcactgacaaagtctcggtatatgaaactctacctgagaatattactcccattaagtgtaagtaaattttcaagaagatgaaaaatgatgaagggaatgtatagatctttaaagctaggcttgtggccaaaggctacacaaagcgagaaggcatcgactatgaagataccttctctcatgtggcaatgcttaaatcc

SEQ ID NO: 62959 - DNA, 902 bp, Cannabis sativa
gtagttagtttccctattgtatttaggagtattcattaaaatgcccataacacaaactatccgcaccgcttaaaaaatacaatttgaaattatttgcggtgcagttatagtttgtatatatgttaaaccaaacgatacagtgcgatttcaaatttaataattacggtttaaatcgcactgcactatagtacaaagttatcgatttttacaatataatttttattttattttttcatgtaaggataaatatataataagatttgttttaatattattaaaattttattatattgattttaaaattttagttataatatttgataatagtgatagtataaataatatattaattacgggtttaagatctcgcggtgtaattaattgctatttgaaaaattacaatattataacttgcaccacccatatgaacacagctaattgtattttcttttgtttagtatctttattgtgacctgaccacaaatgagaataccatatttgattgcatttacaccgtaaatgaagattcaatcaaatcttgtggatcaattgcccaattaaaaaagatttatggtgattgaaagaaaacaaaactagtaagtaatacacggcaaaaacacgtcagcataataggatatttaaatattattttatcataatgtttgaaggctttttctttttctgcataataggaatataactaaagatggggcatcgtaaattacctctaaaattgataccaaaagatagagcaagaaaaataacatatttgaagagaagaagtgatctaattaagaaagctcacatggcctaagaattctcatgaagttaggtctctcataaatgattttacataacttccattgctcaaaaaccagcttcaaaaagacttcatactatgg

SEQ ID NO: 62960 - DNA, 2639 bp, Cannabis sativa
attttcgttaactaataaataagcttaaattgataattaaataatactaaaaataactgtaaataatagacaaagaagttttgcgtagttttgaaattaaatcttcatagctcacgaatccatcttatttatgagttcttgttatatatattgttagaatttgggaataaggtgaatggggttccatctcaaaaccaattggtaatgagaggagtagcacattccttttatattctattatctttccacacattagcaatgtagaactctctaacatcctcccttaagatggtagcaattttatttactcaccatcttgcacaactcgatcataagcggctcttttttggctcactatccctgatcacaagtggctcttttcctctactttttagatcggtatttttagaatttgttggtggctctttttatttttagctctacttcaattagtttatttttttgggttagatagtagctagagatttttttttgtttatttttgctttgataccatgttagaatttgggatataaggtgaacgggattccatctaggagtagctcattccttttatatattctattatctttcctcacatttacaatgtggaactctctaacatatatagagtacaagtatcatacaagtattgatcgtaaggatctttgtatttttaaaattagtcgtccttttggaaggaaattcttctcctatttataatgttttaagggtgataattattttcctcgttcttatcttcatatccgttcataaaacgtggtcaatctccacattttattttattaccacgtattgataatatgtataactatcaaataactatttatttgaccttatcatatatacggttattttacctagatacccacttgtaaggtgttgcttgcaaattacttaaataaatttctatgcgaatttgtctcaatctgtctcgcattatacatgctctttgtaatggctcgtctcgtcttcacatatatttgcatttctttattagaacacatttatcttgtatttagttacgcttgagatgaatcatgatatttactacctctgttatcgctgcctttccaactaacaattaatacttttgactcaaccttaataaccattaaggtaagacttaaatataaaatcgcttatggcactttcggtgcaatagatatatccatattatttctgagcccatattgatgtatttgtcatgtgtctcgcgttgtatattgacaagatgacatatgcgagataaatatttggacattcttctcgaattgtttattcacgatgaaattttggataattcttatgtaagcttttaagtaagtttttcaaattatatcgtttatgctccttaggtcgaacttttttatatcgtcttgctcgaccaataaagttctttgtcttattttttccatactttattatttcagagatgactgttattgatctcgttggtctactagtgagctattattctgacttatccttagtctcctaaagaaagatttcaatttatattaatcgtgattagtattttttaaggcgatataaataacgtatttaatttttcaatatttgaattggttcattttctaactcttgtacacgtatcgtgatcatattgttgttcgttcgaaatatgagcataatagtaattattcttatcataatacttctggagtcatgttattattaagttaatttcgcaaaaattaaactcgggatttattttgtaccattttaaaaaatacagggtctaaattgttatttaacaaaacaaacgatccaatcagtaacttttataaaacacagtatccaaaatattatttaaccttaatattattatgagatgatgtcgaatgattagtaattttttataataataattattaaattaaaatatataaaattcaacacataaagaaaaaaaaatatacattaattatttaaagtatattttcaacttcataaactattcataataaaatatctactataattaattacaatatatattattatatttttttactgtaaataaaaaaaaatcccacatggggacttttttagcacccacatttaagaaatttttttatttttttatatattttttttttataacccaaagaaaattatatatataattagtcaaagtaaaattcaaaaacaaaataaaaaaaaatcaagtaaagtggcttcttcatttcactactggccaaatattaatggctgctatagcttatggtcaaaaaggctctccaataatattattaaaaggtttattaaattttcaacatgttttttctttgaacaaataattgaaccttcatttcgtacctatttcataatacaacattattattattattattaggagttaaaaaaattattaattaattaattaatcctcaaatatggtgtctgtaataagatttagtaatattattgactatattattgtttttacataattatatataagattaggtagatattagaacccaccttgaaatttagtgaagggtagaaaaaaaatatttttgaacttttattttaaaaaatataatattttttataaccaataacaaaaatgcatatttgaaaataaaaaaaaa

SEQ ID NO: 62961 - DNA, 796 bp, Cannabis sativa
  modified_base (210)..(219): a, c, t, g, unknown or other
ttgtcaaaaaagtttctgaattgtcttttcttttatattacccgtagtcttaatgtagtagcggatggtgcagccaaaaatgttagaattgctagcgacgacctgtatcaaggggagggtaatccctcagtgattcccatctatttttcttaatcaatgaacatttagttctttaaaaaaaacatgaaaaataaagagagagagagagannnnnnnnnngagagagagagatagatagagagaaatggaatggttttgccttttgtgaattttttttcccaatttttttctaagagtttgaaaccacatttgcattcatcgttgggcctaataacactttagcccatacacacgcaagtaacatctttctttcttcagaccgttttttcaaaagtgttataactttgtataattaaagattaattttcttgtagtgagaattaatttatatacatactatatataaaaaaatatatgcacaaatagctaactaattattaagcaaatcaaaataataaatttttgactcaaaaaaaataataataaattttaaaataaaaaagtataagaataacaattatcacttattaatgtgatgaaatatctaaacaatattatatattaactcatcatattattttaaatttaaattgatttttaccaaaaaaaaaaaaaaacaaatgctcagtataatcttctcaataaaaaaaacaattaatgaatatatatataagtttgttaattagcttattactgagcttatatattatttgctcttttatagctcactagcatt

SEQ ID NO: 62962 - DNA, 795 bp, Cannabis sativa
  modified_base (290)..(305): a, c, t, g, unknown or other
atttagaagtaactaatattacatatttaatagacccaataatttagaatttgagccttatatagttatatgtgcccctgtttaagacaataaccgagcatatacgtacgaaattaaaaaaaaattatagttttacaaatattgggtacttatactgctaataataaacattaggtttatgctacttacaaatttaaaattttaagtacttatgccgttatttacctttttttttaattaaatgtgacttttagtcacaataaaaattacttgtgattaaaacatagtannnnnnnnnnnnnnnncactaatttagttttaatcacaaacaagtattgtgactaaaaattcatttagccacaacaacttttaatttttgtgattaatatatttagtcacgaaccttttagtcacaatataggaatggtgatttataattagtcacaatttttttactttttatcacaaatttttgtagtgtaaacttgtgttgtttgttatagttaactacatatttatttatttatttatttttgaagaaaatgcatctatttgatatattttaattattttaaaaaactcataatattaggcttttaactaatttttacaaaagtataaaaaacaagtctacttaagtatttttgttatcattttttttcataagtagttatttgcaacaaattttcttttacataaattgttaagtgcaacaaatataattacataaaaatatttgttgtaattaaataccattttcattgaattcaattgaaacaaaaaatatatatatat

SEQ ID NO: 62963 - DNA, 1139 bp, Cannabis sativa
aaacacaagcttttcacaaaaaatggttggtaataaggcgcacaagaatttaaattttcaattataccttgttgatgaaattccttgaggccttgttcactaatatgtccaagtctgtgatgccataatttcataacgattctagtcctttcaccatacttgcttctccagctggaacaatttctccttggagaacatatagaccattgatcttttcacctttcattactaccaaagaacctttggtgatcctttagcttttgtgcagacttatatccatatcctttgtcctcaagagcacctatggatatgaggtttcgtctatggtccgggatgtgcctttggtgattctgccatcatactatttgatggctaccttttcgattccaatgaccctacatgaacgatcattacccattagaactttacctccatcaactgactagtaataaaaaaaatgactctcaatttggacacatgtcataagtgcatccggagtcgagaatccactccctattcattgaagattctgagatagagaacaattctccatctatgaagcagtcgtcactatattctgcaattgtagcagaattcttctcgtgatgatggtgctggaagtccttcctatctccattgtgagatttgtgaaagccttgttgctccttgtacttcttgcaagatcttttcaggtgtccgaaccttccacaaaagtaacacttccttatttccttctctctagacttcgatcatgattgagagtgatagtgtttattctttaaactttctttcttgggtgatcttcctctttccaaatacacttcttctttcttggattccttctctaactgtaatttaaaatcattagacttaagtgcggcaagtacgtcttccaacgtaataacatccctgccatacttgatggctaccttaacttcttgatatgcgattggaagtgaacttaacaaaatgatggcctgaatttcttcatcattgtggtttatattagttaatcctacaataatctcattaaatttatcaatattttcatctaaaaccgatgggaggaaatcattctaaaaccgtataacttttctcgaaaattaatcttgctggcaatcaatggttttaagtataat

SEQ ID NO: 62964 - DNA, 1078 bp, Cannabis sativa
gctgataagatcatgtcatttcctaaacgtgtgtatcactgccgaatccctttcattattgtgttggttgatttttcaataaataggggtagtggacaaagttgagagaagtagcccaactatttaatttcataaagaacaatagatgaaaatgaatctcccaattttgtgtcatgtaagacaaaagaaacaatgggtcattcggccttagtgagtcttgaggcccattcgaagaatggaaaagtgagaaagaattagacttgtcatcttctttctatttcatcaatttgtacaccaaatctcaaaaatagcacataaattttttataaattaaatatttccatttaaaataattttataattaaaatcatgaaaataattaattaaattaattttatgcctacaattaaagacttaaaatgtacaaatttaaacctaatcatatcaaaaggggcttacatggaacatggttatacaaaactagtatcaatacgatcctgagtatgacactttaaatgaatattaacatgatgagtttttgaaaattagaaggcatcttaaattcctataatcataactataataagaaaaaaaaaagtaagcaaattcaagcattaagaaaaatataattcttactatcagaatcaattttcttatctttgtcatctccaatcatcatcacattacactttatgcttatctattaccacatcctccaaataagtaccctgcttcacttttataactaatatggaggaactctgcttcgggcaccttatcaaccgtacatggaggactgagttgagtcgtcgactgagggatgagcgtgaaaatgtgcgcccacagaagacgaaagggtggcagaagttatcgtgttatttggagatgtaattgaattctatttcttttcattaatctaagggtataacgggaacaaaatttagaaaagtgagtataaattaaagattactaaaagaaaggtaaaaattaaaataggtataataaaggggcctgtaaaaagatatctaatggtagggatactagtatttggaaggatccttagattcctcattgtaaa

SEQ ID NO: 62965 - DNA, 1772 bp, Cannabis sativa
tttaataaagatagcaacaataaattaatctattttggaggggtcaatgatgtgaccaaatttaagattcttgactaattagtttattttgaagaaggcaacttccctctcaaatacttgagaatcaatcttcgtccaaccaaatggaagctctcagactatggtgtgactatccttgataaaattcacaagaatgttaactgctggcctagtaggaatttatcctttgctggtcggatgcaattaattcacacggtattacttagaattaagaatttttagatgagcatattcattattccttccaaggtcacgactgccattgataagagttgtcaggattttctttggagaaccaaagggaataagggaaagcttcaccgtgtctcttgggaaaaagttcacctccctaaaagtcttggtggagttggattccgagaagacgaaaaatggaacaaggctctaatggtaaaatttctttagactttatctaacaaacaagaatgtttgtgggaaaaatggataaactctatctatctgaaagacaatgacatatgaagcttcccaaaaattcaagataccagctggtatttcaagaagttgcaaaatcttcgtgacaacacggatgaagccaagttaaggcttcctatgataggtactaagttcagagccaaatagttttacaacctgctgttagaggggtctaaagctaagtatgctagagctatttaggacaacttattggtgcctaagcacatatttgtttactggaagattgttaattcttagctgctcactagagatttcctgagtagactggtttcattacagaatattttgtgtccagtctgtgatactgagtttgaaactcgtgaccataatttttcagctgtatctttgctaaacaagtgcttgaggaagtgaactcttggctgggagtttataaatggcctagtttgattgctttgttagcaggtgcaaaatcaaggctcaagacatctaaaatcaggtcttgaacatggtgacaacttctactttgtaccagctttggataaataggaaccgatgcatcttcgagttgacttgtgcttcctagaagcctaagtttggaagttaggaaagttgttcaacttaaaattatgattaaatgtcttttcaaaattttccaaagaaacttatatttactaaatgtaattaagtgttggtagtgcttttgggtgtggctactggctggttttggctgctgtcgtgctgttatttttggctcttgccttggttgtttgtagcttgttcatttttcaataaagattcctctttttcaaaaaaaaaaaaataaataataaattaatctaaaaatgtggttgagttagtacaaaaaaaaaatgtaatattaagaaactaacaaaattttgatattacgaaactaactttgtaatcatgcaaatgtatttaactaacttaacaaaaaaaatatacataccataggttatatgaaactaattacttaatgaaaagtatatacatgaattgagatatatactcataattctccttgacggaccacctctactttcaagtaatctatccaatgatcttgtagaacattaatttaatcattggtgtgcgacgtgccaaacctgacctgtgaaacaaaagaaaagaaattatgacatagtgtcatcgaaattatttaaaacaatagcttataaatatttagtaattgatttaacccatcttaatcggtgcactggatatggtttggtcatgtaacc

SEQ ID NO: 62966 - DNA, 1077 bp, Cannabis sativa
atctcataattcaattttcaggttaattttgagcattacataagagaagggtatttttggaatcttaaaatatatcataattattattagggaaattattggaaaagtcttcaaaagattcattttgatgtagataaattctcaatctcaaaaaataacgataataatcctcaagctcgagattcttttttaagtctgttggtactcattttaatagatttattagttgctccaaaaatatcacgtgttgatattaaattgcagcataagtctccaaaaaatttactttgatacagataagtccagaatctcgaaatattgtggtaatagctctaagctcaagattctcgttagtcagtgggtacacaattgaactgctccatttgttgctctcaaaaataccacgtgttaatattttattggtccaaatcataattttaatttaaaataaataaataaatgaataaataattttcaaaactaattaattaactttatcttttttaattttttttctttcttcttcttcttctcattcactcccagcctaacctgcccaaccccgttctgttcaactaaaactcttcaatttctattagcaaggggggcgctctaaagaaaaaaaaaagtaaaaattgtctaggtaaactttgaacgagaaaagttgaggtcgaagaattggccacaaaaacccatcatccaccactgtccatatctttctttttctactgcatactccatccatatctttcggtttcttagaaacttaaagaaaaaaaaaagtttcatctctctctctaagatcccaatcccgattccgatcacatctcttcttttttcttttgcttaattgattttctaagatagtgggatgggacgagaaaaaaggtgtagatgaatggatggtactagtcagcagtaagcctccgccaccaagaaaggtaggtggcaaatcgtagaagtttgtaatttttttttattttcttttatatataaagttttttaatctttaataaaagaaatgaaaaaaacttgttattttttgaaaaattttgccgcaattttttttttattatt

SEQ ID NO: 62967 - DNA, 1060 bp, Cannabis sativa
ttgaagtccttgaggatgaggccagaacttttcataaaaccagatatgaatgtactacaatagaatgctacaaaaaatattgtctactctggtacaataagttttacccaaagcttctcttcctgcatgaaataaacttaatcagatgtcatgactacctataaaattaaagaacattaatcatttaaaaactattttaagaaaacaatgtgcatgaaaggaatttgataagaagcaacagataaaatgagaatgaattcaagaaaactgaactctgtagcaaaaccaaaaaattgtccagaactaaggattcaaatgagatgatatgatgatgtaaatatgactgagattttagaaaactggaaaatgcaagtctaacatttgagaggctaaagaactctcctagagcacagctcaactttacaaaacaaagtgtctttctcccaactactctcgccattaaaaagagcacaacatcctttccaatcccaaggcctcaacaaaaaggaaacaaaccccaaatatcccagccaaaaacaaaagcagtaaaaaagaaaaagaaataataatcaactctagctaggtggccttatgcccgggatatgtaaaatgaattggaggtttatcagaggagcgacataataatgctgcagttaaaacaaaggagagtttgagtgacaagaaaatacaagaacctagtcaaaatccctctttcggaagataaggacaatggctctaccttagtaaagaaattatccaaatgtgagttagtttctaacaaaatagtttcattatcccaagatactgtgagatttgctaaacaagcagagaaccttttgaccatttgttttcttcccacttgactctttttcttttctgttttcagaaaaaaaaaaattcacttaaatttctaaagaaaccaatcagaatatgtgaaaataatcataaaaagtaataattatacatgaagcctaaccattctagtacttggctggcctgcaaagtggcgaaatgtgcaagttgacgaatgacattaaaattattttgggccattgcctct

SEQ ID NO: 62968 - DNA, 2066 bp, Cannabis sativa
  modified_base (1312)..(1318): a, c, t, g, unknown or other
gtatatagttacttatttgaattcttttaaaattaaccttaaataattgaagagccacgccttggctagaaagtagggtgtatggttagtgtctaaggatataaatggagggtttctctcatttctcactcatattcaacactaaagatactccctagctagctatcttgaccagctccccatattcatcatctagtattatcttttcatcaccaccaccattgttgtcattcaagctctatctaatttccacctccacaccctaaggttgaaccttgagttcttttctaatatatacaacaatcaccgcccataccaccttatatcaccatacgttatcatcaacttgtaaccatattctttagttgagacgtgggcgtagaaaccgttgttgctacgattgcctttcaaatcttgttgaagaatatcatcaccatgaccatcattatttcacttttttatttggtcatcatagggtgattgtaagttgttaaatccaaactccaatcttatttatttaaggttatatataacgtcgttattcttatgtgttaaggctcaaactctaatttttctttatgtgatactatatgatcacaattttattgggttccacgtggtggatgaaacatagggaatgattgcaagattttgagctctaatatatttctcatagactagcctatatttctttttgagagctaaggacttcgtgagtaaagcatacaataattctcagtgtcactcctgcaatcaaagttaaaatctccacattcgaggtaacgaaattaagtagagacttttaagttttctatatgaaataatgttcaaaaggagtgggaataaggtataagacttctaacctatttttatttgtccattatcatactatgttgtttgaataattgaccgtacaatgggtttacattatttaaacaatagatatatatatatgtgtatgtggtttgcataatggacgctacaatggattcgcattatttaaactatagatatgtataagtagtttgaataatggtcggtacaacggattcacattatttaaactagttatgttgtttggataatggatgatacaaatgattcgcattatttaaataataatatggttatgatatgactatgatgtggttataacatggttatgatatggttatggtatgattatgatatggtttggtataattatgatttcatatttaaataatgtatagtagttatacattttttaaattagatatattatagcttatatgacatggtttgaccgagaagataatgattaaatacttgnnnnnnnggtctatatggtagataggggccatttagtagtgggtacagttttactaaacccaaccctttgccacttagtccaatagcttggatttattttctaaagttggactcagaagtaacacttattatgtgacttggaaactagttattagttgctagtgacaagattaagcttatatatatatattgctagttctctaaatatgtacatctaaattttagttatatttaagtttattttatgtgactacgtgacaagtataattttcttaatgagtgtagtagctcaaccttatcaaacttaccacgaacagattaaggttgtaaaagttagaaagttggtggcaagtgagactttggaagctatgtgtgtaatggttgagagccatataactgagggtggtctagggcacactccatttattttattaagtgtgttattaaatgtcgtattaattttattttttaatgattatgtcttttaaattcaaaccgagctcaaatatgaaatttatttttataaacaaaagcgacatttttggtaaatagtttagtaatttatgaaatacgggcattacagatgtaaaaactatatatgccattttgtgctagtttgtaaccatcgaattcgataacttgcgtctctttagaactgacgcaaatagtgttaaactaacattttttacacaaaaaattgacacaaagtggaagaaaaaacaagaaaaattattcaaatctaagatatatctcat

SEQ ID NO: 62969 - DNA, 849 bp, Cannabis sativa
  modified_base (297)..(297): a, c, t, g, unknown or other
gtgttaagtgttatatttagcccaatatttatatactgtaaaaaaaatttatttttaattacaacaaaattatttgtgactaaaaataaaaaagttagatttattataataaatcatcattcttatgttgttattaaaagattcgtggctaaatatattagtcataaaaattacagtttgttgtaactagatgtgttttttagtcacaaaatttattgtgactaaaactaaattagtgacaacttgtatttgaatattatgttttagtcacgagtaaatttttgttgtgactaaaantcacatttagtcacaaaaaatttgttgtaactaaaaaattatcactaaaagttgttatttttttgtagtgataattgtgcttcaatacaaaaaatggtaaagaaaaaaattgttatatggtcatttaatacaattatattgaggatacacaaattgttgcttaaataataacaatatggtaaataaagaatttaaaattttctaaaagttaataaatcataataattggtgatattgtatagtaaataaaaaataacattaattgggtaaaaccttatactaaatttagtacaatttttagcatatgtcaaattttatattttttaaaataccattagaatagtatttttttcttaaatgtgcttataatatatagcaatacactatctttttaacactttcttggaggttctcgtattaatttataataagtttaaatatatattagcaaaatgaaaactcaaatatcttttttgaataaaaaactcaaatatcttaaaaagcaacatgcactacaaaaaattgatacttttagtgataactttttagtca

SEQ ID NO: 62970 - DNA, 712 bp, Cannabis sativa
agttgacaatcaagaataaatactcgttacccagaatcgacgattttttcgatcagcttcagggaaagacagtattttcaaagatggaacctacgatccggttatcatcaacttaaaatatgggaagaagattgtaagagctgcttctgattaacacttcgaattattaaataattaggtttattcttgagatttaattaatatttataatatgcttattgtggaaatttatttgagttaatatatgtttattatgctatatgtaaattccttgtaatatgcgattgtgttcggaagcagtggaactaacgttgggcctttagagagtcaccttttatgatttgggatgttagtattagcaggacgtcattgttaggcgtcagaagtgtcgggaaattggtggggtttaggaaagaccaagataccccttttaaatcattagatcgttatcgtttaccaagggcatgttagtcatttgtttaagtgttttgtcctttgtgtgcttggtatattcagcttagtattaatattattgtttttattttccttattaatgttagtaagatttaaataagagaataacctagagaacacttccttcttcaccattctctctctccttcgaaccacactcatactcagcgaagaattttgattcttcttagctgaattcagagaacactaaagggatttaaagcttgtaattaaggta

SEQ ID NO: 62971 - DNA, 903 bp, Cannabis sativa
ccattgaaaaaatcatctccctttacactagattctttgcccttgacattttcaacatccttggacctctcttcactgcctgcaacaacctcagcttgaatcacatcagcagcgggaacatcaccaacaaccttataaactccagaagcatcaccaccatctttaccaaactcatcacaatcatcgaaataagtttcaatattctttggatcaggtaatcctttgtcatcatcctcatcatcctcatcatcatcagaatcttgggtgacaaattcatcagatgacttaaccttgtttaaaaacagtattgcaactgaaataatataggaaaacaaccaacaataacatgaaaaaatgtaaaaaaaaaattgtgaaaataaatacctcaagagaaggtcgatcataaatgacattaactttttcttgaatatccttagatacagtcatgacagacttgaaattaaggtcaacaaaacacctcaaagatataaaatctttggccaaggattcttgattggaaatgaccaattcaaacttagattttaacatttctacgtcctttaaatcagattttttagaagatgaaccactctcgaatgtttgcttagttgtacgatcatcaatagatttatctaaaaataagccttccaattgcaacttctgcctctcctcatcagatggatgaatgttcttaatgtttaattggaaaacaaaaacaaaaaaggaaaatatgaaacaaaaaaaacaaagattaataaactggcacaaaacaaagataaaacagtgaagaaactgaaaaatcaccttgttcaactacaaattttaaatcttgcctttcaagtctcttaaagttggatttttgatcccaacctcattggtctaatttagaattcttggaatcct

SEQ ID NO: 62972 - DNA, 710 bp, Cannabis sativa
actgaaattccagcaatctttaataacttgatgacaaagaggttctcttagccaacaattctcaaagcgaaatttctttttcataacaaaagtgttgttaaccactaaatgaagaaaaatgggacaatgatcggaagtggaaaactctaaattatacagtttagcaagtggaaaaagatctaaccaacttttagtacatagagcccgatccaatctaacctcaatccactgatcagtacctcaccctttttcccaagtaaaaggatgcccaataagctcaagatcctgaagctcacagtcactaactgcttgttgaaaaccccgtaataaccagtccagataattgttgccgcctctcttatcctcttgagacaaaacattgttcatgtcacccatgatacaccaaggcaagtaccgaatccaaagccaaacttctcatttgatcccaagtacgtcgacgatgaccacggtttggttcaccataaagaccacaaaagcgccacttctccttcccttccacggtgattttcatatcaatatgggactgagaaaaccccaacagacgagtttcatcttcatttttccaaagaaaagccaatcccccactcttaccttgaggttcaacagtaatgacaccataaaagcccaacaacaatctcactttttctaatttatcttttttgctaatagtctcacacaaaaaaacaaag

SEQ ID NO: 62973 - DNA, 2298 bp, Cannabis sativa
attgtgtaagtgatagtgtaagtagtattttggtaattaaaatcacataaaatgtataaatgttgtctttaccttatgaaggtatttttatatataaagtgtccatttatattttctatgtaataattccttatatatatcctttaaaactataaataaagactatatatactgagatttaatatggggtgactagtattattctcatactcccttgtttttcgtattaaaatcattcctcactgccaccgcattacctgctaagtcgggaaaatcccgctcgattaggggcgggttcccgcgggtacccatccccacagattaaattttcatctataggcctcataccataaataaaatagcaagtaaatcacaacaaatatggaacacagcaatgaatgttgttcgtaaacatttatacaaaaatttaagtgtcacaaaatacactattttaaataatgcctatatcttaaaaaattatgtttaatgttattgttttcaggcaccataccttttttaaactataattttgaatgatttttagaaaagttaaaatttattttaaataattggtatgaggcaattaaaaggggcctgttaattgttatatatttatatatttatttatttttggttaaatcagcaagtgtgatgaaattaatccaaacaaaacttcttatgacaacttaatagcaccacacaagtgacctataaaaccatctatatacatgattaatcctcaaatctttttttggtaatattaaagatactcttatcttttctatcacaattaaggagcacctcacaggctgccactgtgccacaccaaagcaatgttggctaagagttttgtgcaaattttcttagtgaattgatagtaaagaatattattgttataagatgataataagaagcaatatgatccacacataattgtttatcataaaataatcagaacttatgagtcagacgatataaaattcgagtaataattaagtaagacaagacccagctgagaaatacagttacgtgtaatgtccttatgccaaggctggaagatatattgtttatcaagtaagtaataaatcatttaagtgaaatgaatttgaaattaagttaattgattataaaaatgtgaccaaaaagagcgaattgatttaaaaaaatttgaccagaaagagtgaatatgtcacaatatagaatttccaaccaattcctttcatgtggcctacaaaacaaagcttgcctcaccaaatttctatttgttacaaacaataagcatacgtaagattctcttccaatcactaaagctttgaactttgttgaaagaatatgattggttggaagaggaaaaccacaacatgatctcttctcttttcttttcttttaatttggtcaccgtaaattcaaatattgaaagtgaaatatgataattaattaattaattagactaattaaatttgattagtaaagtccaagagtaatggtatatgtgtgattgattttttttaattaatgagtaataggagttgcgattatgaaagtaaacttccaaaattggtatttctttcttaattatatataattatgttacgtgtaaaatactaacttaccaataaacgctacaaaataaacatgaatttatatgaattaagatcaccaacttcaccaggtctcaagatttaattaatttcgtaaagatttcaaataaagaaaacagatactggaaaaaattgattgaatattgaaaagaacgaaaaatattgaaataatcaaggtatttaatactttctttacacgtagttctttttttttttttaagaaaaagaaactagaagaaagtaaaaaaaaaatgaaagaatcgcatacatatatctaatattgtatttatatatactgatcatgatcattttggttggatcaactacttcatctatcatagtcatacacagctcttaatggcaaacaaaagtctcgaaacagttgagtccgtcaaattccagagccaagcgcggcgccggcgatgatgatccgatcttcttctgttgagcttcttgaggttgtgttcccctgtttttgtgatcttcttgttgctttatggatttgcaattgttagccgaagaagatggggaagcgtagaaggccttgacgttcttccccaaaagcatttcagcagagaaaatatcgaaggagctgaacagagagttcatggctgagtagctctgattaaaaattgttgatgaaagaaagagagagtgagaaagggttttgtgttggttggagattttgaattgggag

SEQ ID NO: 62974 - DNA, 1903 bp, Cannabis sativa
aaatctgctaaaagaaatcaactcgacaatatttacacttgtccccaaaattaagtgtccaaatactgtaagtaatttttgacccatagcatgttgtaatgtgatttataaagttgctacaaagctcataccgtttgaagctaatattacctaagttagtagcatagaaccaaggaggtttcataaaaggcagactcatagctcataacatcatgatttaccaggacttagtgagacactatggaaggaaatcatcaaagccaaactgtatgattaagcttaatctttagaaggcctatgatactatagaatggagattcattgaagaaatgttccaagctttcaattttccacaagattttataaagttgataatgacttgtgtacagacacccagattcacaattatgttcaatggaaccatgcatctttgaatctaaaagaggattaaggcaaggggatccaatgtcgcctctcatctttgtattgggatggagtagacgatcaccagaatactacaaagagtgggaaggaagactgatttcgagtttcatgatagaagtgattctttaaagcttaataatctaagctttgcagatgatgttctattattatgtagaggtgatttcaaaagcatatactatatgctacaaggcctgaagctattctcagacacctgtggattacaaccaaacaaatctaaatcagtcatatactgtagtggaatggatgacagggaatctcagagaatcattgatgtctctggattcagcaggagtgaggtaccttttaagtagcttggtgttccaatttgtccaaagaagatttcacctggggaatgtaagactcttacaaaaaagatgatagccagagtgagagcatagagtaccagaaacctttcttttgcaggtagagtagtcttagtcaactcagtattattggtaatacattcatactggagccaaatcatgattttaccaaagaacattattgctgaagagagtatatgtcgagccttccttcgaaaaggtcaacctaatgcctcgggttcaggtgaagttgcatggaacactttgtgccaaactaaaacaactgggggattggttttagagacatagcaacctggaacacagtagcaatgatcaaatatgtctagacaatcgcttcataaaagacagtttatggctcaaatgggtgaacaatgtctacatacaagaaggcgactggtggcaatacaaggctacaacccaaagtagttggtactggagaaagattgtggaaatcaaagataaagtatatctatgcatggacccgatccagttctcagctcaagaatatcatataagcatgggctacaagctgctcaggccgccacaagaaaagatactggtacaaagaagtatagtgtaggtatagccaggctaagcattgtttcattatgtggttagctgtccagaacaggttaaaaataaaagaaagattacactgtttccatattattgataactcaacttacatactttatggaacacatgaggaaactattcaatacttatttttcgattgtgttttcactcgggaatgccttgaccaaatgaggaaatggctgaactagaaagttttcacaaactctctaaacaggttgttaagatggattgaaagagcaatgagagggaacttcaagaagcaagtattttcagcaacacttacctgtttgctataccgattatgggtgacaagaaatgagaaattttgggcggccacagtccatacaacttatcaagtgagccaatcaaagtagcaacaaaggatagaataggttgtatgttgtcaaaaaagataaccaaggaggaaactaaatggcttgagactttgtaaagagtagagaaatagaaaaagaaat

SEQ ID NO: 62975 - DNA, 3583 bp, Cannabis sativa
aattctaattgaagttactctaaaactttacttttttaataaaataaaataaataatctgctaatatttttttaaaaaaatataaaattaaaaattagtagtattattcgggttatttcgagttaagtcggtttaattgggcgggttactttattttcaacccgcccaatatacagattgggcagtttttttttcgtcgggtttttcattttttttttgcggttttttcagtttggtttagtcgggttattcggtttaggtggtttacaaaaatatatgtacaaccctaattgaggattagtttgccttttggaagccttctattatctgctatgtgttaggatctaatctgccattgcatattttggaaggttttacaaaaagagtttggaaggacaaaattgacagggtaagaatgctagcttatggtatctttatcaaacacttttgctcactagaagacagggacataattctgaatggtgggtacatcttcttcaatagaaggctagtgataatgaaggcatgagaacctaatacaaacttcaagaaaaaagtgtcaaaactgtcccaatttgagtgcaacttgaagatttagacctgaaatactggggacaaagatctttattcaagattgtaggccaacttgggacctctattatggtcgactctgttacgagagaatgagataggcttaaaactccagaattctaattgaagttactctgaaccaggagtttccaaaatacactagattttgaagataaacatggaatgaatactcaagtaggagttaaatatgaatggaaacctcttagttgctttcactgttttggtatggaacattcaacaattgagtgcaagaaaagtacaaaaggtaaacaagaataggttgtcaaggaggaaaagaggaatgcagttactacaggccaacataaaacaaataaataagttgatgttgatggatttcaaattgtgactaatggaaggaagcctaaagagattgaaaaggcggctaatacgcatactgagaatttattccaagctctagatgatgtaactattatgcaagatgagcctgaaaatgtagagccaatatcaagcaagctggaaagggataaaaaaaaaagagagagggggagatccctctcttactcatggataagtttttatgctggaacgtccgaggagtcaacaaccagcaaaaatagggcctagttaagacatttattatgtcccaaggtgttggtcttgttggtcttcttgagataagggtcaaggcccagaagttaggggtcttgtattcgaatgtgtttataggttggtgtttctcatctaacatagcatggaactcaggaggaagaattattttagcatggaatccttttagtttcaatgttgacataattaggtgtacgagttaaataatgtacatgtttatgtctattgtggatggaacttttaaaagttttgttacaatagtctatgcattcaatgatgagatggaaggaaggcattatggaaggacttacaagaatttgcagctttagaggcttggttaataatgggagattttgctgatataatagcaaaagaggagagaaatggccaaagagttaaattccatactgatagagatttcttggactgtgtagagtactgtcaacttgaagatgtcaaggctagtggaagttttttccctagagtaataagcagcatggggaagataggatttatccaaagattgataggattatgactaatcaatcttggataaacaaattcataaatgcaaaagccatttttcttaatgagggaatatttgatcatacattaggggtgctaactctatatctaaaattacctagtgggagaaagatatttatgtactttatgggaggaggcttcttatatggaactatggactgtgtggttatgtagactgtttcaggagtttttgttaggagagtgaagcatgtaagctttttctccttctcccttaagttttgtggcgtaggaggattgtcaaatttcccctttttgccatttccccagccagagccattgttgttacatttgcctccattattttgactattagagggctgctgacattgcctgtgtggcaagtgtgttgggcagaactgaaagttgtctgccattttgggtcggtttggcacctgtctgtctcccagtttgggcttgtcagacaacttcttcaagcttaataaaaccttctaccccattgaggaaatcaatcatgttttgtgttgagtgtcgatggatatcttttcatagaacacccaaaggcagtatgccactcattatgactgtgtacctatctttctctgccagattcttgacttttgtagcctcagtcatgaatctttggaggtagtcttttagagattccctagttctttattttacttcaactaagtcttctagcctataatgtctttgccgggaagatgagaattgggtgtagaactctattgtgaaagagtcccacgaatcgaatctcccaacaattagtttgaagaaccaatactgtgcggttttcaatagggttgctgggaaaatcttggaatgggtatcgtctaccacattttgcaaatccatctgtatttcaaaatatttaatgtgagccaatgaatcctctttacgcatataccatgcagattacaggctgaaaccttgtaattgttagttatggatctctttagtgttacaataatgagaatgcgtgttacaaatggaaagtatgaggacacttatgaggtgatgagaagaaaagaaagaattgaaagccttagtgcttctaagctctaaatgcatgtgtagaatgaatgaatcgagatctctcacgtagggttaaggccctttatatagtgtcagggaattacaggttattattcaaaatacataacagataaaaaatatccctagaaaataaggtagttacattatggtgaagcttttctattttcatggacagttcaagtcgtttcgaagttgtaggggcgattaaaggtcttctaaaaggcccatgaaagaaactattgcccaattaggatgtcaagatgtaagttgtgagttggccggctaaccttgtttggaagttgcacggtttgtctgaagttctcccttggtcgaccagctaatggtccgatcaaggtcttgtcatatcctatctttagcttgtgctatatattcttccttgaaaccttgaggcttagcagtcaaggaggttcccgactctatgctggccggttcttagtggtttatctgtacgtgtgtgattggtcttgatgacatgcacgtcattgtacaaaaaaattgagataacattatgtatactagatattaataatatacaatacatgtttacttagaattgtattaaagttgctattacctagttattaatttaaataataccaatttaattatatttctcaaatatataaaatttaatataattaacacttcttaatggaagaaaattccattttgttattcatattgacgtatcatataataaagtatcaatgtcaacacactacaacaaataccattaata

SEQ ID NO: 62976 - DNA, 1492 bp, Cannabis sativa
  modified_base (446)..(448): a, c, t, g, unknown or other
tatttataataggttcggtttgatatatagaggggaaaaaaactaaacttttttacagtataggtttaggtattgaaaatagaagattttaagacaaaaaaaagataaaatagtgaagaaatgagggaggatgaggcttttttagtagtggttggcgagggttttttcgtggatttgggattgctatgggtagttgttcttcatgttcaacaaggtgtgaaatgaggaagatgatactgtaggggtctgatatataaccctatggcgtaggttatttggtattaactaacgccataggtgccacgtgtcgaacaacggctacacctatggcatcggttaataccaaataaccgatgacatagggttaataaaaaacccttaattttaccccaacccccaactgacgacatacatataattaaattctatacctacagtttttaccnnnaaaccgcctctaaatgtcaatttcaaaccaggcaggtattttcacaccttttaacttccctttttataaaacgggttgaaaaattgcctctaaagcccataattgtagtagtggtgggttgcttggacactaagagagattgcccgcaactcacaaaagaggaacagaagacagcaccaagctcgctccatgcaagggtgttttattttactcaggctgatgcataagctagtccctcagttattacagtacttagttagtattaattgtacatggaggatggtgatcttccaacttcagggcaaggaattgtttgtatttgtgagatcagttcagggatcccgaattccattaatctcggtattgaaaacaagagaattagtacaagatggatgtctaggatttctagcagtggtattggataccacacgacctgaaacaagtcagccagaagacatcagggtggttcaggaatttctagacgtttttcctgatgaacttccgagtttaccactacagagagatagattttattattgatttagcatctagagcagaaccagtttctaaggtaccatatagaatggctccggcagagcttaaagaattaaagatacagcttcaggggttgcttgacctaggattttcacagcttagtgtgtcatcctggggagcttccgcactgtttgttattatcgtgattgcttttttatcagtgtgtacttaatactactacacactacacagtatatattagagtaatttctaaaaaatattgtactaaatataatatttttttccttatcaaaaatatatataacataatatttattttttttagataatacacttttatttttatttttatttttatcaagaaaaaaactcaattatgttacaataaataaaaagttgtaaatattatgttatattttttttttggataatgcactaaaatattatatttttatcttatataaataaaaatataaactctacaattttaaactaatcactaactatgtatattatatatatatatat

SEQ ID NO: 62977 - DNA, 797 bp, Cannabis sativa
gatgtaagtctgattggggtccaatgggtctaatggaactgtgagtttgcgaggtaggagaagtaggtttgatggggggtccgatgggtctaatatggggtccgatggggggtccaatgggtctgatatggtatctgatgggtccgattgtgtccgatgtggggtccgataggggggtccaattgtgtaaatgggggtggtgtaaatagggggtattttaggagtatcataaaagttatcatattctacaaatattagttattatgagtttagaggaaaaattttaaccaaatgtaagaatacaaaatcaaatttccctctcatatatgtatcttatacatacaatatatgttattcgtttaataatatataatatataaaaaatttaatctcaatattattatattatttaatttataaattacattacattagtacatgttatcaatctctgatttttgatgatttggttttttttttatcacatcttgttttttttttttttttgcttcccttcccttcctttcctttctttctctgtttaatatgaaatgaactgatgaagtcaccccaataattaaactgcaggagaaaaaggctaactggcctctccgaactccaatagctaattgccctttaaattccaaactctacactaatactaaatggttcagtggaaatcttttagctaatgatacatgtcaacatacaatccaatttccacttcctcaacaaaccgacctttctactagggacaatatagtttgtcaattaataatgtatcataccagaaatat

SEQ ID NO: 62978 - DNA, 869 bp, Cannabis sativa
gcacatcatttttgttttggtttttgcaatacacctatatcattttttttttttgaaagcaatacgtatataatttttttttttgaaagcaaacaaatgggattaaataaacaaatctctggacatatcaacatataatatgacaacacacaaaatatggttagttaacacaagttattaattgtatatgaagtatatttttaagctcaattattgttattttacaaatccttaaatcaaatcatatctaatatgtaaataaatttagcgtaattatatgttgtgaaaggggtttaagaataaaatgtgaattgattggacagaatttaatatacttgaagaaaatccacacaaaaagcaccattttatgataaaggtctccatctaaggctgtcccttttgcaagtttaattagagatggagaagcatttagataatgacaaaatggttcttgaaataaaagtgtgaaattgaagcaaagccaattttttaatttttaattttcatttttattcttttcttataaggaaaaattataatttatatgtgattgcattaatcatacatagttggtgtcatattgattccaaattattctctcttttttcattattggcataaaagatactaaattagtaaattttgagaaacttacaaatgcaaagtgacaaaaaccatcgtcaacaaaggaaggaacaaataaaagcaaccatttttaagaaataaattagatatgtgatattttcccctattaggaatctatgaaaccattgttacttttgtggttgtaaattcaaatagcaatagtcattattaaattatacttaccttaaaatgagagtatgaattgttgttgttgttgttttttt

SEQ ID NO: 62979 - DNA, 1349 bp, Cannabis sativa
attgcaatcaataacaatttttataaattaattagaattttttagtgttttgtaaaaatatataactgtatgataatatttaaaaatattaattataaactacattttttttataggggcccaattttaaaattagagcatggcctccaaaatatttaagacggtcctgatataaaccactacaaaactattttttttgtgacaaatatagcacaatttttacagatgttcttatacaccacatttatagcattctattagagatgttttaaaaaaaattatttggcataacttttaacattgtgttaaattgaatccacaataaatactaattttttatttacaacattaggattaattattataattcattcttttattaaactttccattctttatatactatattactatcatttaaataataaaaattaaaaataataatttgtatgtattctcaataaaatatcaaataactaagatctctggggaaactgctaaaaaaagcatctcttcaatacggatacagtaacgtttatattagaatacaattataaataataagttaaatataacacaaactctttttttcttgtctaaacaattttccccgaatcattaaagttttcttttaaaattatacaacacaaacagatgaatttttaattgcttcagctactctactgctgctactaataataactgatgtattaaatttgaagccaagctacgtgtaatgttggtagacaatcacaccttaccaaatcaaatggtaaataaagtaactaccgacaacaatacagaaagataaatttgatttgtattttcgtatcttcaaaaagcaacctagtaatccaatacaaaccactaccacacattattcttcgttactttcacgtaccaaaataactttttggacatttaaaaaataattaataataataataataaaacaatcttttggatttattatcaaatcaacaacaatttaggaatcaaattggccgtgtccatgatcaccagcagcagcattaagcatttttgtccatttaacgtaaattaatgttaacggcacgttacggcagtcattttctttttaattttactgagagacgagactgaaacaatatattatatattttaaaatttgcaaaaaaaaatatatatatcttaaaattttttgtttctcttgagagaaggaagagaaagagaaacataaaaataaaataataacaatttcgtcgacgtctgtacaggctaacagaatgttatgtccttagccgtctttttacactctccataactcttcttcgctttagtccgattcagtttcaacgaaacgacgtcgt

SEQ ID NO: 62980 - DNA, 1144 bp, Cannabis sativa
agatttaattattatttaaaaatggatattgtggaaaatttatttaagttaatatatgtttattatgctatatgtaattccttgtattatgtgattgtgttcggaagttgtggaaagcgacgttgggcctttagagagtcgcattttatatgtttagaatattattatcggggtaatattgttgggtattggaggtgttgtgaatttttcgagatttgtaaaatgactaaactacccttgggtgattttgaatatttgagttatattgaggggtaaaagggtcataatattgggaatcccttcttttgtcttatatgggtattataggttggttttaattagttttatttaaatagagtaatttttagttaatgttagtgaggataagagcaaacctagaaaagcttatcactctccatacccctttctttctttctctcgattcttcaagaaccagcaagaaaaggagtttaacttgctgcaattacagtgagaattaggaatcttgatcaagtataactctctagccttctcccctttgatgaataacttgctagcttttgaattctcaagttaggatagaattatttaagttatttagaactgttttggtggatagttgaggtgtatggatgagattggagttttggagctcaagctttgggctccaatggtggtttgatattctgagtttgttgttgagttgtattgcttggttttagttcattatggtatatataggtattctggaaggttttggaaagtttgggattgaattgaggtgtgggggtcggtttttgggttcccaacacagaaccggtcgaccggttttgcgggacctgtagcaaccggtcgactggttggtacctaggaaccgggcttctgcttgggaaccggtctgtcggttggggctttttcccgaacactagttttctcgtttttaagctgtttgggatattagcatcccattcatcgatagggttatccttagtttcaattttaaatccccgataaatgttttagagtgtctctctccgagttttgaatattgtggtttagggccttgtaaagcgtcgagctgcacttccactcaggctgaccggcacacctgagcacggagcgaggtaagatagcatgaatatta

SEQ ID NO: 62981 - DNA, 641 bp, Cannabis sativa
aaaaaatagaatgggttttaaggtattcggttgaaacattttatatgaaaaattacactatatttttagtgtatcagatggcctaatacatatgaggattttccaaaatatttattttatttatttttgcagtaagatattgagtatctgattctgagtccatccctagatctattcagtgttttgtctttactctttagtgtgaaaaaaaaaaggtaggaaaagggtaaagggcatacttccaatactaaattttagtaaaccaatctactgaagtgaagacaaaaagaaaacagaggaaaatatgatgcgtgaaaaagaaaagttaaatacttcattttcaaggttttcgagctagttagcaattaccaaatattggattagacagattaatttgtcaaatttagtgtttgagcatgtcagaagtctggataactaatccagctaatttcatatgtctgagattatttatcccatccagcacggtgggataaataatctcatacagatgagattttctttttatcgtttttttatattaattttgattttattaatatattttaaattttataagaatttaaatgaaagaattatcacacatttatttatttttaattaaaaacttattcattaaaatt

SEQ ID NO: 62982 - DNA, 1344 bp, Cannabis sativa
  modified_base (647)..(647): a, c, t, g, unknown or other
cattaggacttagacgattagtcaagaaattagcttcaatgaggtattgaggaggagttagagttggatcgataaatctttgtaatcacacacctttgattgcagcaaaaacttagtgctttccatggtgataattgtgttcatcgagtctaatagagaaggaatgagaaaacgtagtagttggagtttttggaagagtgaggttgtttttggcgacggcttgagatgaacctccctggtcgtcggagaacgaggttgccattgctgaaagaattcaactctgatgccatgttgagtttttagagagaaagaactggagaatgtattaattgggaaaaacaattacataggctttatatagtacaataatcaaaaattggaagagtcatctaagttagctgccttagagttagttagacgattagaagttataacaactaactaattaactaacattttaactaactacttataacagaaaactaagcaaagtaaacaagcctaggttaggattttctaacagtcatgcgcgtaacacactgtttgaatatttttgaggtgttaaatttttttcgaattttttaaaattttacagaatgtcttaaataagtataacgtacaggactatgagaaaaaatttgactaanaaattatttcagatactaaaataggtaaggatacattaataaatatgcattgtgtagaattttttttttttttttttgggtaaagatatatattgactatttttttcttgaatggatatatattgactatttgtttaaagaaaaacgtgaaagtcactctttaaagagggaccgagtatttgttggagatttataaattgttattattatgattataatgatttagagttattgttggagattcttattgacccacatgcatggaccaatattgcttgcacttgaaaccatcaacaaaacactataaattttcttcgaccaaaataggtttgtagaacatcaaacacacacacacacacacatatatttatatagttaattaattacatatgctttaaagaagagaccccacttttcaattcgagcaataatatgtatttatgcagccttaaaattatatactgtttttatattatactatataatatttgtatcgtttattatcaaccatacattaattttttgagaaattataagtaatgaatagttctgtgtaaattaggagctatcattacgtactcatttatgcacattgaagagtatttaatatttaatgttgtaattatatttttttaaaaaaatgatattgctgtcatgatttattaaatcaaaacaacattaaataataataataata

SEQ ID NO: 62983 - DNA, 714 bp, Cannabis sativa
ttatattatatgataattattatacacaatttttttatcaagttaatacatgttgatatattatataaatatatatatataaattgtttacacattttgatacaattaatgacattgtgtaattttttttatgcatgtcctaatgttttaactttaattattttaagtatagtttgatttaatgtataagtaagatatatcaatataattaatagttgatcaatcaaatcaattattgatccattaacgttatgatgaatggtatacatatccctctaatacaattatatattatttaagtgattattaagttgcaactccatttttcaattttattttgtatgataatgtataatgatagttataaggtaacatatataaaatttaagaaaattttcaataaataatttatataatactaaaattaagattcacatactaaactatataacatattgtcatataaaaaatattaaatttaaatttattctcttttcaaaaaaaaaaaaaaaaaaagaaaaactaaaagtgacaataaataatttattaaaaataataaaagtggcatattgaagaaaaatattttaattaataataatacctaagggtaacttcaattgaggtacctattctactttagtgcttatttgtgacagtcagtagtcccgtgatccgtaaggggaaacaccaagtaagttgtgcaatcccacaccg

SEQ ID NO: 62984 - DNA, 725 bp, Cannabis sativa
gtccttgcactaataatttatacagaatatataacggttagtatgaatatcaaataagttcaaatattaatttagttatgatgtgtttaccgtggtgtgggaagacctcttttccgcattttggattctcacaatttgtttcttcattgtcgttgtagaacataagtttcttattacataaatcacacgacatgtaataaaaatcttggttgatattttttaatatgatttcagcttcaatccaatagtatgctttctgcaaaaaaaaacaaaaactatatatgttaaaaaatttaatattatattaattatagaaaatcaatgatattaaattaagaagcaaaatatcaacatattgcaaagagaaggaagattactacttctactgctacaacagaaaaagaagcagagaattactacaattgacattgttggattaatgtgatgaaacaaataacaaatacaacaaggatgaagcatatagtccaagccttcctctatcacaaccacaacaacaacaacaagtgtcgcaaactaatgataatgcatatagtagtgaaattaaatcagtagaagaacagaaaaaagtattggtattactctagatgatgatgataaaaatccaactacactaactgaacaagactatctatgcacgtattcctagtagtggtggcgtagcttgctatataccaagccttcctctatcacaactacaacaacaa

SEQ ID NO: 62985 - DNA, 823 bp, Cannabis sativa
agcatgattacataggcttatcagagtcagttccttcaatggaaagctctggcaagtcttctgagaaaaaaagtggttctggtttgaaccttaaggccactgagctgagactgggtttgcccgggtccgagtccccagaaagagaggagggtcttgcggggctgggcttagtcactggagctaagagaggtttctctgacgccattgatggagtttctggcaagtgggttttctctggaaaaggtggatctgaggctgatttggctaaaggtggtaacttgttttctcctcgaggtgttaataatggtgggtcggagtctaacaaccatacaacgggtttgactgtctcgtcaactgtcaaagatggtgttcctcagtccccaaagccattgcagcagaagaagcctcagccctttgctccgactgcaaagtaataagattttctttcattttctctttcgtttctttactaactagaataaagaaagagtatagtattattatctgttttcatgacatgttcataaatttcatctattggcccttttataattatttttcatatatttgctgagaaagtgtttgatgataaagtgaatattctatttgtctcgttttgttttcttctctcatgggtggaaagggaagaaaccctcaattgactagagacagatttattggtttgaattagccataactgatgaaaatctatgctttctcttttgtgtgtttctatattgtatttaatatgttttctattttaaataatatttatgtaagtatttaaacaagtcttgatgatgatatcaaccactcaagcttt

SEQ ID NO: 62986 - DNA, 1315 bp, Cannabis sativa
ccatgaaacaggccatgtggaacacatgccagatattacacaccgtctatgctcttggcatctcaatacaaatgcttccaaaaaggttaaagatccgatcttctttaaaacatttatagatctgatgtacaacttctacggggattaagaatttgaagctaaatgattagatgtcatcgaaaggctacaactaacagataatgaatggtgccaaacaacatttgatacaagaaaacggtgggcagaaacttatttaaggggttcattggttgcaggaatgagaactacacaacgttgcgaatcgatcagctccgctctaaaaaaaatttagagaagaattattgcttgtgtgaatttgtaacaaccatagatatgacagtctcaaagctcaaacacaatgagactacaaatgacttcaaaagcaaatgcactcgacctcacccacctaatcctacatgcttgaccacgtactataaccaatgtgttgaattctgcacaagaaatatgtacctcaaaggttgctgagcagcttgatttagagaataattattttgtcctacgtcaggaggacgaaggagagtggtaaatattcaccattggaaagtttcaacatctgaaagtccattaccaagttcattactgtgaaggccagcgagcactacactgtagctgcatgctatatgaaagtcaggggtacccttgtagacatttatgggctacaatgaaaacattaagcatgagaagaatacctaataatcttctcatgaagtgatggagcaaatcgcgaagataaatctccacctacattttaaccagctatcacaataacaacatcacatttatgagatggctaggtttggatccctcagttcactaacttataacttgactttctatgcatcaaaatcagaggattcgtataaccgtgaaaaggaagagattgaatggctaacactaatgtccaaggaagaattcgagttgagttccaatccggaaggagagacgccacaacctggaagatatcgtaacaaccctaatattattaaagaccccaaagttgtgagaacaaagggtacaggaaatctaagggaaggaccaaatggagagcagatcccaagaaactctagacattgtcgcatttgtcactcatcagaccatgattatcttcggttcccaaaccgtcaatagaataatggatctcatgggcaacaatttgcaaacaatcaagcaagatctgactcattcaatgaccactccaacacatatatctcggacccgcctgcctccacataagagttatactatagtgattcat

SEQ ID NO: 62987 - DNA, 721 bp, Cannabis sativa
  modified_base (240)..(240): a, c, t, g, unknown or other
tagcaatttaatattttcgtctatattaagaactgtttatgtgtgcatctacgtggacacagtgtacacatggtaattttatttgtccacgtaaaaaattatttaaaaaaattaaaaataaaaaaaaaattaatttgcaattaaaataaattaaataaaaaaataatttttctttttttttttcctttctttctttttctttttctttctggtctgttcatctcctctctctctctctcnctctctctctctctctcttttagatccgatttagggttttcaaaacccttgggcagccaccacagcacctcggcagttctccgaccacccccaagctctcatgatctcctctctctctctctctctctctctctctctctcaaacctgatctagagttttcaaaaacattgggcagccaccatcgaaggttcttcgaaaacccccaagcacgtcgagggttctctccccctcggtgctctcgtaagtcctctcgtctcctcatttctcttatcatatattgcggcaaaatgtttcttttttccagatcaaggtggagagggaggcaatttacagattttcaccatcctattttggtttaagaaactgtatttttgtgttatgtgattttcattttttttctgtttcaggtgagctttgattgggtttatcgtggtggtggatttggtgaggtgttgttggttttggttaggtgatggtggt

SEQ ID NO: 62988 - DNA, 796 bp, Cannabis sativa
ttaagatctatttgagaaatagataagtaactagtaaaattaaattataaataatatatatatgtacatatataaagagacataattttaataaataatttaaattaaaggtttaatttatacttatgacacaagtaaattatgtgttaagaacacataaagattgagaatacttaattgcatttaattatgtcaaaattaaatgtttaatagtcataaatcaaatacaataaaagaataagatttatttttagagaaaaataaagtcttattaattattttcgtggaagtatactactcactaaaatagtattggatttacaaattattattattatagaaattaaatttttctaaacaaagacaattaatatttttcataataattataatttcaaagaactataccaatctcaataaattttttttattgaaatacatgatataccttgtttgatttgaatatccagctaaattaaattattgattattttgtaatttggaaaattaaattataatgaaaaacaaattaatgggaaagttaagtttttttaattttaatcactagtcgaaatattactattctataaccattcattaacagtctcattgaacatattcgatggacaatgatgatgttggatatgaaattttaataagtgagaaacttaaccttattaaaataagaattaataatattaattccatttttggcatatttaattgataaaaatattttattatttattattaatttcggctagagtaattaaaatggtttccttattttgtgtat

SEQ ID NO: 62989 - DNA, 1161 bp, Cannabis sativa
  modified_base (767)..(771): a, c, t, g, unknown or other
  modified_base (953)..(953): a, c, t, g, unknown or other
ttcggagtgagaatgaacttatcattaaaaaatcaattttttacatcaaataattcatactaatgagtaattcatgaataatgtgaagacatcgatgacagtgaaattgtcgatttaaaaaaaaaaaagtatgtatgtcttaaaattatggagaaatattgaaaaccaaggtcttgatgctatttattgatgttattgtcaaggtgttatgcatacataaaaaattaatagttacttaaacttaaaggaaataaaagaaaaaggagaaaaaaaaaataaataggattaaagatggatggagaattttcatcaaaaaataaaagaaaaaagaagaagaagaagaagaaattgtgtaagagaaagatgtatataaaacaacatttattaaaaaacaaaaaaaacaaaaaacaaaaaaaagaagagaaacgtgaaatatatagaataatatataaaaatatataattcatatttataggtttaggttatatgtgtttcaaaaaaaaaaaaattaaagttagatagttaaatttttaattggtttattaaaataatagtaaaatataatttatagatttatgctataataaaatattaaaaatgagagaattaaggagagtagaaaaataaagtgatttgaaagtgtcacgtcaccacctcatactttttctttataaatatataaattagctgataaaaattataaaaatacacttatcacatattttgaaaaaatatatataataataaaattaagttatataattttnnnnntattgcatattattatattgtaataaaaataaataaatatattagatcattaaatatatacagcagtattcgatatattgtattactaaaagctaatttaccgtagtaataaaattatataccacaaaaaaactataataatactaaattaatactcgaaaaatatatatatcatgctaacnaaattatatataccactattaaattatgaatacataccaaaaaatttatatataataaaatataaactaaatatcatcttaaataaatgatatagacaacaaaaattatatgccatgcaagaaaacgtatatacttacaataaaaaataaaataatataatataatattattttaaaaaaattgtatatatcatattaacaaaattat

SEQ ID NO: 62990 - DNA, 1842 bp, Cannabis sativa
tctttatcgtcggttttaaaacgccacacaaagcttgagtgaggcttttaaaacgacgctaataatgaacgaatttttttaatttcttgccttttaccaacggttgggtaattagtgacaaacatagaacctacgcaatttgtttattttttgtgccattttaaaaatgacgaatatattgaatattgtactattcacgtcggtcaacgcgatgaacagtcgcgttgaccgacgtgaatagtggattttgtagtagtgttttgctggcgacttcagtagatgcgacggcaaaagtgtttacaccggcgaatgaatttgtcagtataagttcatcgccgctaatttggtgtcagctaagatgtcctgtcgatgttttgctagcgagttaaagcgctggcaaaaaaacatttaatattaaaaaattatttatttttgccggcaagttaatgtgcgccagcaaatatatttttttaaaatatataaatatttataatctacaattaaaattaaaattaaaatagaaataataataaataaatataatatcaaatatattataaaactaaaatttatattgtaattgtaaaactacataaaacgtagtaacctaaataaaagtagttttagttcgtaaacaataatattatgtaaaaaaaaaatacagatccatagcagtatcatcgtcatcgttgtcactgagatgggcagtgtgtgaggaggacccagcagcatggccaggaggttgaaatggtggaatcggtagaattgaaggcatggcaagcatgttaaagcctagaacggtgctagccaattggatcatttgttgctgaaacacactcatgatttgattatgagtctacatcatttgttgttgccactcgttctgtgcttcctactcttccacccttcacttcagtgcctcatattcctcttgagtgacagtgggctgcttggagggacctgccctgggagttgctcttttgtccctgtcttaagtctcagcaactggcccagtcctctcaagtgacgcgactgctcacctagcacttgtgtcataacaggcatatttgggggaaattgggtggggttgacattgtactggcacacgacattagttggcgttggttgagtttcacgaatctcaaccattttggcgtacaaaaaatttcatcaaactgttagagttaaatagaaattagaatatacaactagttcattaaaaatataaaattacttatatgcagttgttgtgtgtgctcatcgcaccatttgttgtctttacagtggaactttacaaaagtatccacagcaataggaagttcccccgtctggggataaacctatttttataaaatataaaaaattagaaaaatattattaaaaaatataaatttttagacaaattactatgttgaaaatatcataccccgctcacaatgtggccaactatggtcttagatccccatcctccttgaatatctctaaaataatgaaattaaatacataagaatttaaaaaaccttacattgattgcagcggaataatatgactcctttcgctcagatctctaacccttgttcctttctatagcagggtataatcatgatctgagtctggatctccttctctccttcgagttggttaccaccgtcttacccactatgattgagtacttgacttgctatgtgtgagcaaggcactctatcattataggccgaataggtgaagaacaaaaaaggaggcaaaattactatagaaggaactctctcatttactagttgtcagagaattaaaactaggtttgatttggttgaaggtaatagttggatgagatgagagcat

SEQ ID NO: 62991 - DNA, 541 bp, Cannabis sativa
tagttgaaagaatattattatttttctccaataattaatggaattattattattattgttgtcctgaatttttgttgatacacgtggcttcctagcgaacaactagttgtccagtggggtccagtcgagaggtaactagtgactaattatgttggtgctcaagaacatatagctctgggaggaggatatcctctcgtaatgtcgtaccggtcctatgaatcatttggatataatttgaatatgattgaatctccgggaagggtcgaaacctcccagatccccttatcgcatttggtcctaacttgtgcagcgcattcctcggagtagtactgttgattgtcccatccgtacaagtgaaaaaataagtctacaaccaaaattaaatatttttgggtatttcccccactccttttctgacacgcacctttccaagacatagacagacaactcacaccctcaactgtcccatcccttatagacaggtagggtcttgtctcaccaaactgttaactcaaacttttagatctccttgttttgatga

SEQ ID NO: 62992 - DNA, 607 bp, Cannabis sativa
aaatttatggtttgggttgctccggtgatttctctagtagtttttatataggttgctaggtgaattttagttgcgatttatgttgctctgttagttgctatagaagtttccgtgtggaattccgtagaaatgcaaaaaaattgttttgaagtataaaaaatgaatttttttttttattaattttgattatataattattttttaaaattaatttttctaataaaataatgaaattttgtattgatcataattcagaaaaaaaaaattattaatgtgtatttttaaaagaaacataactcaacaaaaaatgacgttatattttaagaaattttttaataaattatatattttagaggacataattagagtgttttgtaagaatagcttttatgaaaatttttattagcaaaataattttttatggtcgtaaaaacgattatcaattacactgtgcaatcataagcgactattatgattgcataaagtaaattaagtgtagttattttgtaaattttagtatttcaattttccacagaattaggtagtgctaattattgaaatatttaatcactttttctatttctcctcttccctcaacagctatggt

SEQ ID NO: 62993 - DNA, 640 bp, Cannabis sativa
ctaagatggcagttttccatttcgacgataggtatgtatctcatagggtcgtaagcaccctcatccatgggctgagcacccataagattgggtccttcatctctcattctaggattctggccatttccatgttgaaccctgctcgaacgtgtcgttcgtgtgctgggaccaacctctggttgggtcaaccttgaacgagtggttggagtgctggggccaccctcaggttgggtcctccggagcgagtggtctgagtgctagggccaccctcaggttaagtcttcctagagcgagtggtccgtttagactgtgagttggaagaccttcatgagcccattggctcttttccatgtcggtgatgagtttcttcatgtgacgtgtcaacgttctttgtgttgtcagccatgaagaagattattctttgtatgtaagcagggttttttctgagctcttacaagaaggctctcgatgaaagcaccaaaatgttaacgcagatttttgttaaccagatttgagcctaaatggtgataaacttgaacagaaaaataaaaacactaaagaaaaaagtatgatcacaaatgttttttacgtggttttgaaattataattctgcatagtccacgagtcaatcttattaaga

SEQ ID NO: 62994 - DNA, 1501 bp, Cannabis sativa
taataatgatcgaaaatccaattctattagatcggtttggattagatcggtcagttgtaattggattggatgactttctgcacacccttaggccgcgcccctactcttgtcaacaagccagtaaaaacaaaccacccatcctctcaatctctccccctcactgagatctcaccatctcgatctatgatctttcaccctctctatctcactcctgtcgttatcctttggatctaacgaatcgcaccaaagttttcaccatgacaacaaggtctttgttcttccctggctctgacgaccacgacagcaagttctacattcgttgccaactccaacgagtttttgactattgattcctctatttgaaggccaaggcagcaccaccgactttctcagtcgaaccccacatttgcatttgaatcttgagtaatgggtttgggttttagattttaggttttagattttccgttatttgttgttgtgattatcattgattgaataagggattttgactattgattgtgtttagggattttcgattatgagatctttgttactgttttttttattctcaaggtggtagtcttgccaggattggagtctcgtcagggtttgggtttttgtcggtggaggtggtgttgggttttggagtgggggttagtagatggtggtttttaggggggtggtttctaggcatcatgaagaagaagaaagaaaatagaaaaaataaataatttatttagttttttttttaattttgaattattttcaattaaaattatgattatgaccaattatatgttaacacgtgtcattttaaattagtaaacatatctgttagaaaaaaatactaacataattacaaatatggttaccttggagactattattgctaattttggaagttaaggacttatccacattaaattgatatttttaagtacttatactgcaatttttccaaataattaatagagatttaagaaaagaaaacataacactaatttatatatatatatatgattaagttttaagaaatccccaataaaaaaagtttttagaaaaaaaataaaaaatattaaccttttgcttttgaataggtgggatatctatgccagaaatctaaatttatccacattgtaattttatttggataggtgattgaagttcacaccactcatccatgaaaatgtacttgaagaggttgttaagttgaattagatctaattacctcaaaattttagacccgtataaattgagggtttctagaagtgtctaactacaaaatatacatagaggcatgttgacgatgagaactcgtcaacaaaatattaaaaaccaaatgtagtattcaaagattttaatggaagaacaatcaaagaaaaatcttagatttttaaactctttttagaaaactacttgtttcattgatcttttttccaaaaaagttccctttacaattacctcaaagacctttttcatattgagttccctacaattttga

SEQ ID NO: 62995 - DNA, 736 bp, Cannabis sativa
agggttaaaaagtaaaaacatacctgacactatcctgagactcatctaatgtaccacggaatacatttcgtgtgaaagtacatcacaagacaaaattatatccctatattagttatcctaattcattaaaaaaaactttcaaataaaatgctgaattaagtaaaatatctatatgcaaggtgtcgtgtctttggtcccagtataagaacataagaatagatttataactatatagtatcgaaaatacaaaaaagtgcattgataatttcatttctacatagactaccaaaaaattaggaccatgaaaggttgtaggtgaaaaatttctctgtaatatttgaatgggatgttttcactcgtgtagtgcaaacttaggatatgtagtattagccttaggcttgagttagtagtataagaaaaaaaaaacaataaagcaatggccatattgtgtgtgttttttaaaataaaaaaaaaattattacagactggaaacgaatgaagcccaatgccactgggttaggattgtttgcgtatgctaagcccgtattatttcgggcctgagcttgggctttgtctttgtctccaagcactaggccatcaaaagcagcgtaccctatcatgagcccacgatgtattttttcataagaaaagttgaagtatacctcttttttatatatattaattaaaaagattaaggttaattagtaatttttccctccgaactttaacatgtact

SEQ ID NO: 62996 - DNA, 746 bp, Cannabis sativa
  modified_base (254)..(271): a, c, t, g, unknown or other
tcaaaaaaaaaaaaaaaagtatcgggtaccatataatttaatataataacttttagggagtatcgctagttaattacaacgcaacatgtaaagaaggtactaaacaccacaccactagtacataatagcaatgctcgtgccttaattaccattgatattttttttttaatgatttgatggatgatatgcgaatgtagattctagataatatattgggaggtaatttatagatggaatattattattattattannnnnnnnnnnnnnnnnnttattattattattatttcacaaaagaatatattgataattactattgtaaattttatgtgctaaatttatatgcacaataatttttatgatcttgtatgatttttttggtgtatttctttgatggaaatatagttaaccttaaaaaaacaaaaattaataattatgtgatcgaaagaaattttctgcagctagtgatgtattggacaataattaatatattaatattaattaatgatcaaatctcatcccaatctcacctcctccactactcacaacgttcaacttatctctatagatctatacataaatattattatcgacttatctcaaaaaaaaaaaaaaaggttatatattattatcgactcactaaaaaaaaagtcacttttagtaataactagttcttatttaagtttacagtactaaaagtattttgttttaaacaatgagatctcatgcttggatatttttcaata

SEQ ID NO: 62997 - DNA, 1274 bp, Cannabis sativa
gttaaagcaagtttggtttagagattcgatttgatttggcctggcaaagcatggtttcatgcattataatgtcactctaaaaaaaactcaaaaatgggaggaaaaattgtacagattgtataatcgatttagttaggcccttttgatagggtactaatagtttgtaaagaattggtcggagcaatataattttcttatttatatgtaaaaaaataatatatataagatatgcatgtctatggtaatggtaaacacctcagttttgtttctattagtaggcatatttttatagccatagatatttaatataatgataataaattgataagtgtatataaatggttaatatgtggaatgtactaggttattcataaaattattttttttttaataattttcttaaattaaataataattattcaaaaaaattactaatttattcttacctcttccaattaattttttttttctttttctctctttcattcagaaactcaaaccttcaaaaataccatatttctttcctattcttttgcttgggaaccatgtttattcatttacatttttacattttttttttttgtctacagatatttcattaattaattaagatgtaattggtgaggtttgatgaaaaatattaataatataagtcaaaatttattatttgtaaaaagttatggtatcttagtctcacttctatcattctctttttttttttattttcttattttaggataagatgagttttcactaattaattatttcaataaaataaataattattgtcttaattgttttggtcaaagaaaataatttaaaaaggagaaatatatgcttaaaagaagatttgtaataaaatctcaaaaaacaaaaattgaaaaatttacacgaaataatatatatacttttaaacatgtgggaaagttattatttggtcaaaaaaaataatttaatgttaattttaattgattgttaattttttttttaattttgtgttattttttttaaaaaataaaaaatttaataagctacaaacaagtacatgtcacacaatgttaatttttaaaaatcatatagataaatgattaaaaagttaatatataatataggaacaaaagcatagtcactaccataaaattattctatatatttgtgatttgttaatccatattgatgttgtacaaaatgattgtattgaattgatgatataccttttagatatataatttgttagtaatttttttaataaaaaaataataataaatgtgttc

SEQ ID NO: 62998 - DNA, 1757 bp, Cannabis sativa
taattaaaattgacacagaaaatagcatagaaaaattaaagagagaagaaagaattggttggagagatcgatctgaatcgccacaagctgttcttgaagtctcctcatttgtttctagggctcaatttctgaataataatcacttttcacgaactcccatctaattaaaccaagccttctctttaaaattcgtgaaattacgaaattgcccgaaaatcccgttaactgatccagaattagtgacgatcagggaagaggtttgagctggtcaagccagagattttaaactgtcagatagtgggatgctgttgtttaagacgagggtttgtgttcaaagtagtgcggaacttagaaacgagattcttgaagaggctcataccactccatactccttgcatcgtggcacaaccaaaatgtaccaagatcttaaaccctacttctcgtggagcgcgatgaagaagaatgtggtagaatttgtatcccgaagcttaatgtgtcaatagatcaaggctgaaatcagagaccggcaggtttgttgcagcctttgacacttcctgagtggaagtgagaggatatcaccatggactttgtagttggattacctagaaccacgggtttgtacgattaaatttgggttgtgatggatcgattcacgaaatctacacattttctaccagtaaaaacaatctttacagtggattaatatgcaaaattatatgtcaaggagatagaaagattacatgtgcaccaaagtctatagttttggatagagatccaaagtttacttctaaattctagcaaagtctactgcgggttatgggtaccaaactgaaattcattacagctttccatcctcagactaatggacagtccgaaaggacaatttagatactggaagatatgttacgagcttgtgtaatggatttcgagggctcctggaataagtatctagcactgatagagttctcatacaataacagttattagagtccaatagggatggctccttatgaactgttatatggctgaacgtgtagatctcccattcactgggatgaaacgagagagaagaaatatctcgatccaaaatcagtacaatgaactaatgaagcaatagaaaagattaaggccaaatgcttgcctcccagagtaggcaaaagagttatacagatctgaaacacagaaaatgtagagtttcgggtaggagatcatgtgttcctacgagtgtctccgatgaagggatcaaacgtttcaggaatagaggcaaattatgccctaggtttacagtaccttttgagattctcgaaaaggttagacaagtggcatactgtttagctttgcctccagctctttcagttgttcacaacgtattttatgtttccatgcttcgaaagtatgtttcagatcctactcatgtgttgagttatgaaaatctttagctgcaaccatacttatcatacgaagaacaaccagttcagatcctagacataaaggataaggttcttcaaaacaagaccatagcttttgtcaaggtattctagagaaatagcagggtggaggaagccacctaggagttagaatctgacatgagggcttagtattcagagttgttcaggttagatttcagggacgaaatccttttaaggggggataaataaagtttaatgatgaaacttgcatattagttatgaattatcaatttacagagatttatttgaattcaaaatgcattttgtatgtcatatatggaatttcat

SEQ ID NO: 62999 - DNA, 1013 bp, Cannabis sativa
cccaagttaactttacacttgtgtatggttgacttgatgacgtgaactgagcccgttttgcttgaaactaccagataagcattaattttgacattcttaggcacttatatatgttctttaagtattctcaattgaattagcactttgagcacttttgcttagtccttgagaattttaaaaattaactaacaaagaaaaaaaaaggaaaatcttatctttttattttcattcatcttttttctctttctttgaaaatttgaatttttcttattttttattatggtattagaattaactggattggaattctaatcctatttggagatgccatccaaaattagaaacagaaaggaagaagagaaaagactttttgccttttgattatggggcatcattatctactatgtatgatgagtgagtttcatgttatggggcatctttgcgagctttgtggttaggaatttgatttcagatatacaagttgttgattctattttctctcctatactaatctattgtgataataatattgttattttcttttcaatgaataatgagattagtagtgcttctaaacatatggaaataatgtatctaattgttagagatttggtcaagaaaagagacattgtgatagaatattacaagaccaagtcaatgttagtagatcctctaaccaaaaatttaagtgtcctattgttaaataaatatatttttgatacgagcattttataatcttttgttcttttggattagctggagtttcttgttgtattatttgagattacatttatatgtgattttcttattgatgttatgaactacttggtttattttgtgggccaataattttttattattggatgtttatgctttaaattatgttttttttttctattctcgagaagactgaattgaaagcatgtagttcatatcttgttgtgatcattgtattttaagtatatttactaaaagacaatgatattttgttggcttaatgttttaagcaagtt

SEQ ID NO: 63000 - DNA, 870 bp, Cannabis sativa
  modified_base (443)..(444): a, c, t, g, unknown or other
aatgcccgaggaattgaagccaattcagaaaaaattcaagccctcctagatatgaactcgccaacaaaaaccaaagaagtgcaaagcttaactggtcgaatcgttgcactcagctgattcgtgtcaaaatcaacggacaactgtgttccattcttcaacatcctgcgagtaaacaaacagttcaagtggacagaagaatgtgaaagagcttttcaagatctaaaggcacagcttgcgaaacctcccgtactttctaaacctctggacggtgaggagctgggattatacctagatatcacgaaacatgccgtaagttccgtgctgatcagagaagagaacaacatacaacacctagtctattacattagtaagagactcatcgaagccgagggccgatatccgttgattgaaaaacttgcctactgcctcattctagcaacaannaagttgaggccttatttccaagctcatcctgttcgggtatatactgaccagccgttacgacaaatactccgaaagccagatgcttctggacggttactcaagtgggcggtagaattgggtcagtatgaaatcaacttctaaccccgaacaacaatcaaaggccaggccttggccgactttatggtagaatgcacaggcaaagaagaaagcataccagaaagcaaccccaagccagcacctcagccgagtaacaatgaagataaaccgacctggaaactacatgtggatgggtcggccacagatcaactatctggcccaggaatttccctcgtcacgcctggggggcaacacctgcatgctgcggtcaagtttggattcaaggcatctaacaacgaagccgaatacaaagctctaatcgctggacta

SEQ ID NO: 63001 - DNA, 996 bp, Cannabis sativa
attgaatttcttttatgaggtcttcaaataatgagatgtgtcttttctctctcctcaatgattttttctctttctagctagttttttaggtgaacaaaataatgagatatgtataattttactactataaaattaaactttagaagcggtttttaagacctttcagcgtcgattttgaaaaaattcattactaatattgttccaggtgacactgtaggagttaaaaacaaccgacaccataaaactttatgaaattgattattaagaaaatactgacactaaatggtatgtgattttcataaaaaatcaattcaatttttcagttttaaaacctaatataataatacaaatttaatttatttaaaataaatattaataaatttaaattaaatattatttaaattaattttacacaactaaaaaattaaattaacaatatacttaaatgtatttattctaactaaatatattatacaaatatgttaaaattggtccaagtattaacaagttaatatatctaattaaacatagaaaaataatagatataaaaattataagttaacataaaaaaaataagagaagaaaaattcttatacaattcagcatcaatctaagccttcggtaattaccgccaacaattgttttatccattttcgctgtaacactaacaattcattttttgcatcgtacgccttcttttccctaaactgtgaaaagaagtaaatatttatattagtatatatattggtttgtttgttaatataataaataagataattaataattaaaacttatagctttttgatcggttaaataacgattaggatttgcacgtgcgacaatgctactcatgtatttcaatacataaaaactacattcttgatttttagattattttagataatttgcaagtgatatttctggatagaccccaataaacccatttaattcccttaaattcttatatgcatggttttaaaaattatattaatattt

SEQ ID NO: 63002 - DNA, 662 bp, Cannabis sativa
gaaaagaattatattgtggaaacaaacgacatggaagaagaacgcgtcaagaacatacgatataagctaagtgacgacagtatggaggacataactaaatttgtgaactttacaaatgaaaaagatttggaagaatcagaaatgctagactatttggaagtgagagcagaaatgttggaagttgaactaaaaagcccacctcaaatagaagcagaggaaataatagaagtagtagagattttttcagacgaagaatctaaagatgaggaaatgccagaaggttccaatgatccagattactcttcagtactgaagagcgaggacttagatccattcacattaaccaacatcgatgaactagaagatgacatacctgattataattttgaagtagaaattgatgagtcaaactctaaatttgaggacatgccaacaccaattccagcagatgtagaaatggaaataaactttgaggaacacttagaagaagaagaatttgaagccgagtcatgcgtggaggacgaataatagtcttttttaacttgtcaaattttatccaaagaaaatatttttgttcctattttaataatctagtgactatgtaactagagatttagtacgcttttaactaaataaaaatttatttttcttcaatcaaattc

SEQ ID NO: 63003 - DNA, 840 bp, Cannabis sativa
tctgaaatggtttggtttcttcgggttctgcattttaggaatgagaacaacattcgtcgaattaacccccctgtgcattcgaccattgacaaaaaaatcttcaacaacattgcaaaagtcatctccaacaaactcccagtagtgtttgaagaaaagcactgacattccatcagggccaggagccttgtggttactcatggcaaacaaggttcttctaatctcttcacgggaaggacaacaaacaacatcagcttgattctcaatagaaatcttctctcgaaatagatgaccacagtccatcagtcgattactatcagaactagaaaaaatgccattgaaaaagtccaggaattcgtgtcctattagcgttcggtcattaatccactcattgtttttattcagaatgcaatcaatggcatttcttcttcctcttatagcagcagaaaggaagaaaaatttagagcatttatcaccatccttgagccacgaaatcctagccctttgcttccaataagttgcttttttggctcgggcttcattcaatcttcgtctaacttcaatctttgaattccagtctctggaaccagctggtagttgttgcatttggtccagattttgttctagctctcgaatgaccccgtcgattttaccaaattgggttctattccattgaaggagggctacccgagtagcgccaatctttttaaaaactcgagcaggggcccaaggatgggctaccgaatcccaggcattggcaacaataaggttgcttctgcaatcccgcgtccaactttcctcaaacttgaaacatctagagaatttaggaccaattccccccgt

SEQ ID NO: 63004 - DNA, 1414 bp, Cannabis sativa
catttgttggaggatatgttgcaatatatatatatttttttagagtaaataatacaaaaacaataaaaaaactatataaaaataacaagaaaataacataaaaataataaaaatcaataacaaaataactagagtacaatataaaaataacactaaaatattagaagatcgtaattaaataaaatttaaaaaatcgtgaaatatttaaaattctgtacaactgtatttttataacatttttattatttttgtgtatttataaaataattctccccggttctcagttttaatctgaaaacatttattatatttatgatatatttactaacagatattattccacttctgcgtacatggttatattctacttttgcatatatgtttaatagatagaatattattattagacatcaatcaaacttagcactactataacactctataaataacaatataatcataattattaaattacctaaaactcaatacttattattataattctacaatacaatacattgaattatatattgcacaagtaataaagtttaatatttatcacatacatatcaaacacattttaatgggtattacttttactaaacaaatttaactataaatattaattttaaaaatatcgaattttaatctaataacgaataatgaaatcacaaatttaaattctatatttaatttaactacttaattaaaaaatatattaaaaaaatatctctttttacactatatcaaaaatatctctttttatatatatttccatcactaaatttggatttcgactattgatttattaatatatatttggcctttgaatttctaggtgtacacatttcaacaaaacctttctttgattattttctttagggaaaattattattattagtatattataatgaaaactatccaatatataggctgaatcagcagccgtagagcatagaaaagtgaatctttcttttccccacttggatatgtcgtgccaaatagtacctaatccagtgactatatgcgtatttttttatcccacttgcacctatgcacaaatagttttatatgttaaaataggagtattcttattaggtatttaatattataccgatatgatactgaatggttagcaaaattaagatgtataagattcgatattaattaatttatactaataataatatgtcacctcttatagtacttaaaatatctattaatatttttcgttaaaataaattatatatagtgtctttatattttaaattattaatatgatttattaatctaaataggatataaatagtaggggtgtttacagattggtttagcctaaattttcatattttttgaaccaaaccagtataacgattttttgaatattagaaatcaaactagaccaataaatttc

SEQ ID NO: 63005 - DNA, 1224 bp, Cannabis sativa
ttatttgggtttgggttcaggtcttggtccttgtcctggtcctggtcctaaacctagtccggttccagttgcagttgtgattccaagttcgagtttggggtagggttcaagtcatggtccgagtttgggtttgggttcggatctcggtctaggtctagatcgtgctctgggtgtgggttagggtcctgggtctgggtcaaggttcggatctgagtcccaggcttcgatctcgatctgagtctgggtttagtttctggtgtaagtcttgggttctgatcccagtctaatttcgaggttgggtccgggtgcaggtctaggtttgggtttgattccgggtctgggtctgagtttgagtctcgggcttgggtccaatttcgagtttgggtctgggtttgggttttttcctattatgggttcgtgtccgggttcttatcctattttgggtccagggtcgtgttcgggtcccgagtcttggttttagtccagttcctagtctgggttcgggtccaggtctcggtcccagtctttgtccggggtcaagtttgggtccttataagggtcttgatcctggtctcggtcgctggtctcaggtctcggcgaggtttaggattaggtcaagtctaggtcccggtttaggtttgggtcccaagtctcacgtcccaatcgtagtcaagatctcagtccaggttctcgtcttagtgggatatggtttgggttcggttctcgtctcaagtctgggtcctagtcatagttcgaattccaattcggggtccaggttttgttctcggtccaggttggggtcggggttcgagtcttagtccgagtcttggtacgggtgttttggaacctggtctgggtccaggtctaagtctgggtccagataccatgtttagcttctggtttgagtctgggtcggtattcaggtctgggtctgggttcgtgtccttgtctaggtccgaatccttgtttaggttaggggcttggtctgagtttaggatcgagttccgagttcgggttggggttcaagttcgagtctcagtcctagtgtgggtccaggatctagttttggactgggttcgagcctgagttccggggctgggttttggtcgagttccgggtcccggtccaggtctaggtccctgtcacggtcctggtcctgttctagggtcctggtcacgttctggttcaagtttcggttttgagtcccaggtcttggtctgggtc

SEQ ID NO: 63006 - DNA, 849 bp, Cannabis sativa
ataattaaaataggtaaaataatattttttttaatcactataggatacaaattttattgtgattatttatttatttatttatttgatgatcatcatccaataattaattttcaaatctctccaccaatctaaattcgttatatagttcaacactatataattgtgaaatactaaaaaatactagtggtatttagtattcttctatgtgtgattatcactattagtcaaattaagtaccaggtctcatataatttaatgtaataatttttaaggagtatcgttaatcaatcacaaacgacatgttcaaaagtactaagtactattggtactcaataacaatgctcataactattgcccgtgtacccatctaaatccatattatctatttctgtctctttagtctagttcgaacgaaaaaagaaaaaattgcatgtaatcattctccatggtttgttataattaacacatctcatcacaattattttattttacatttttttaatcacaactcactagctagtcaccaaaaattagttaaacaataaattgaattgaatattaattacttcaattattttcaactttttccatatgtatatatgcacttttagagctcaataataaaggtgctttgctcatgagtctgcaatgaaaaacataaatattggccaaaaataatgccggtcatattcaataattgtatatgtgtataaattatagaaaaaataatttataccttgctaacttttttctcattatttcaattaaaatgcattgattaaaaagttgtctataaaagttccaagtatataatatataaatatttatacaccatatcagtatccactt

SEQ ID NO: 63007 - DNA, 882 bp, Cannabis sativa
ctacaattgaacttacctccagtttcagttaagggagtttgaagcttctaaagtcatgtcgggttttataggagatttatcaaagatttctctaaagttgtcaaattgttatctaatcttctcgctaatggagtatcttttgaatttgggaaggattgtcttgaagcctttccgtcatcatacagtaacacctacatattgctagctgtggattatgtctccaaatgggtagaagcagcagcaacatatctgaatgacggtaaaacagtactaaacttccttcagaaaaatattttcacccggtttggaactcctagagcaattataagcgatgaaagaagtcatttttgcaacaagcaatttgaagctctacttgcaagatacgaagttcgccatagaactgcactcccttatcatcctcagagtaatgggcaagcagaaatttccaacagggagattaaactgattctggagaagacgattcagcgttcaagaaaagattgggctaagaagttcgatgatgcactatgggcttacaggacagcgttcaagacaccaataggaatgtctcctataggttggtatatggaaaagcttgtcatcttctggtcgaattagagcacaaggcattctgggctatgaaaacattgaatatgaacttggcggcagcaggagaaaagaggttgttacaactaaatgagatggatgagtttcgcaacgaggcttatgaaaatgcctagatctataaagagagaacgaagaagtggcatgactgaggtcttgtaagaaaagaatttcaacccgggcagcaattcctactttttaattctaacttgaaactatttcttggtaagctgaagtcaagatggtcaggaccattca

SEQ ID NO: 63008 - DNA, 968 bp, Cannabis sativa
tgtttcttacttgtcgagaaattaataattttataaggattggggcaccaatattgtctagcacctttagatatgtcgtcttgcgattggcaaacgatactcactaaagcttattatattaaactatatgggacttgatacttaattgaaccaataacgataattaaacaaagaaaagaatgtagaattatattatgtgctagttttttcttttgttataactttttttagtataatagtaaaaaatattattcatcaatataatgaatagtaatttaaaaaattattctgatatgaaaattaaattatctaattattttaatgataatattttcgatatgaataaaaattattatttatttattaagaagattatgattaatgtgtatgttgattttgaaaattgatcaaccgacagcgaagttgtgtagatttaatgtttaccacgtgtgtacacaaaaaagaataaaaaacaataaacaacaggatttgttatagaggttcggccccttatgataacgggcaataacttactcatcttttagttgtattacaccgagagaattactatccatatcgctataggtgagatctgttatagtaccctttaggattacaatgtatgaactggtgtttgacagaactcaagtgttggacaagaaagagagagagtttgagatttctagcttagaggaggcttaggcaacttagattttcagctagaggttaaggcctttatataggaggcctaaatcctagggttacaactcaaatcccttaaaaatacgatagttagctagatatttacaaaagaccaaaaagcctttagattatagatacttctcagctagtctgttgggtttttggggcccaattcgcagcccactcttgttgtgcacgtgtaggagagtcttgtgggacctacaacacaatccttggctggccatggccttctgttggacgaccat

SEQ ID NO: 63009 - DNA, 1237 bp, Cannabis sativa
attcaagttcaatttattttctattaatggttatcatgaacattgtcctaataaactcacatttacttctaatcaatgtttgattcaggatccctccttgacattaacgattgggacaactaagaaagacaactgcttttttaataggagtggcattttctcacatctaatgtttctatttttccaaacacctcttatgctttaaagaacccttggcgtcttccccttgtcatccttccatgaacattactattatattaaataaatatttctaattttgtgagaaacttctggattatatatgctctatatgttagtttgctaaacaaaagcggcctctttttgtttctaacaataatttttctattgctccttttgatttactacactttgatacatggggaccttttcatattattaatgttgaaggttatcgatactttttaactattgttaaaaaaatttctcgctatacttggctttatatgctaacctctaaatttgatgtctcttttattattctttaattttttttttacttattgcaacttaattttccatttccataaaagatgtgtgttgtgacaatgctaaagaatgaaatgtgacgactttttacaatacaaaaggaatcacaaagcacaattctcgcattggtcatcctcaaaaaaattctgttgttgagcgcaagcattaacacatcttaaatgtcggtagagccttattatttcaatctcatttatctttaccttattaaagataagtcataaatattgttgtttatcttataaatcacactccatctatgttacttaacaaaaagagttcctttgaagtcctccatgagaaagctcctacttatgaccaccataaaaattttggttgtcttgcttttgctaccacactttggaaaccaaatgacattaactttccccaagatctcgtccttatgtctttatttgttatcccctggtatgaaagcttacactctcttgaacattgaaacttaagagattattcactctggagatgtttattttcaagaagatatttttttgttttcagatactaactctcctacttcaataaatgaattatccttacattctttactcccctatacaggaccacctctgaggaaaatgcatcaactcccgaccatgatgcaacttcatctcatcaaaaggccattcctcgaagtgtgattgacaaaaacacacatgccccacttcctgat

SEQ ID NO: 63010 - DNA, 785 bp, Cannabis sativa
aacgccgagataattacataaatctttaacataatctttgaggggaagaactgctccaacccttatgtgttgaggctccaagcacctattttgaaaggctcgctggtgctgcaaccttcatctcgaactagaagttcagggggataacaactgaattccccctaggcaatagacctaatgcgacatccttgttcattcctgatgccgcattaccttaaaatgtctccaacataaggtccaatggacttgactttagattctatcaactcagcttcaaaggtgacagtgggatcctaaggggtcttagatttacgagctttctgagtcattatctcaaagtctaagtcacctggtgaaaaagcaacagtgacaggaggtaaaaacatagacctcgctaaggggatatcaactaaatcggagggttcaacccaagctacttctcgcaaataatgatgcctaccctcaataacctcttgtaagaatcgcttataacaactagaggtttcttactgaccagatttaacgaggtgggtcctaatttttgcatcatttatttcaagtatggtctgaggtcttcaaggtttgggcttaaattctatggcagaaaattgaggataaactgaatctaagggttctgagataaattgggacatgattataaataataataccccaattcttggaaaaatagagcacaaataaaacccaaaaatatgcgaatcgtataaccttaaattttctagccctagaattattcaaacattcaaaaataaattacccaagca

SEQ ID NO: 63011 - DNA, 836 bp, Cannabis sativa
agatttttgaatgaaagtgtaatgagcaaaacaaagcatgaattcaataggttttaccgtgaaaattttgatttttattgttaagtattaaaaaatatgaagttcgggtggttctcacttctactgttaatattcctttaattttaaattaattttttttcttattaatataaatttcatctgggtattctatatacaattaggcggacaaagcaagttcttgtttgaagttaaaacgattaaaagaatgaagcttttggtgctatcaactcttaaactgaagatgaatcgtgtttcccaattcatttctaatgctaatcagacatctaagaagcaagataggggtccgaaatctaaattgctttgtagtcttgtagatatggagaagaggtgtgcttatacagctcacacaacacacttccttgatcttcatcatcatcgtctagggattgaaatccatgggcttggtcttctattaatcaattcaaatacaagtcgagcaatttcaagccatcatcattatcgtgcaaccttacgagctcaaactctgtcttccctcaattcctttccaagaattaatttatagtagaagaaaaaaatgaaacaaatgtttcccgtggatttcaaatttggcgacttctaccaatggagctataataagaattttcttacctcgaaagtctagctccgccatggagcaccttgatttagaggagaggcatttgtttatctttttgcaagtatactagacaatatggaagaaaaagaatcaatttgttgtgtttttagaaattagtatacttgctttattaaatttcacttatttaatgagaagg

SEQ ID NO: 63012 - DNA, 1572 bp, Cannabis sativa
ctaacagaacggatgtactctttgcatcttccatgttaaaatgtttgaataacattctttatgtacacagactactttaagtggattgtcctttccagcgtattccttggaacttcaataccaagtatcttttgaactggtccaaaatcattcatctctaactctatcttgagcttggctttgatacttttgatcactgattggtcttttctcattatgagcatgtcatcaacatagatcaataagaacacaattgtagattgctccagattcttgaaatataagcagtgatcatatgcagatgtttgaacctgattcattgcatataagtatcaaatcttttattccatcgtcttggagtttgtttaaaaccatatagagacctgttgagcttgaaaagtaacttaaatcccttctcttccacctgaaacccaggtggttgcttcttatagatctcttcattgaagaatccattcagaaaggcagtcttaacatcaagttatttaacttcaaactctatttgagctgccaagggcagcatcaatcttatcgtcttttgttttaccgcaactgagaagatttcagtgtagtctattccttctacctgattaaaacccttagtcactaacctggctttggactgcactggttcattctcattaattccctctttcaccttgagaatccatttgcactccacaatctttttgttctctaacttcaatacaacaacccaagtcttatgcttctagagtgaatccatctcctcattcatggcctagagccattttgacttgtttccacctgaaattgcctctttgtagcttctaggttcttcaatttcagtttgttgtacttatgccagtgcaaattctattaagtcagcttccacaaacctttttggagggtgaatctggctcctggttctatcatgcgccaattgataaccttccagatgagcttatccgaatccttttaaaacctttatttggtcttcgttatcttttggctcagcatcaacttttgcctgcacactttgatctagttccataatcccttcctactgcgaactctcttctagatgtttcgttccttattccatttccatgtgtgtagtttcttgtttcctgtttttcctgcatcacacggagatacactacctttcatggatgtcaagtgaggatattcaacctcgtcgaacatgcaaattctatacccattggtacctaaggcataacctaaggaagtttccttaactaatttaggttccaactaatcaatagattgttgtacttaagctatacacctaaaggttcttagatgcattaggttcgagcttctgtcataccacatttcataaggggtttttacgcctgtaacacggtttgagcttctatttataagttaggttgcagtagctaaagtttccctcaaaatggtttctctaatcaagaactgaataacagacatctaactttattcaaaagggttcggttgatcctttcaacaacaccatttttcttcgggttcttcattacagttctatgtctagtgatcccatactcttggcac

SEQ ID NO: 63013 - DNA, 950 bp, Cannabis sativa
gtaaacaagaccctcaaggaaactttgaaaaagcgtctaaaagaggcaaaaggaaattggcctaaattactcgcagaggtactctagtcacatagaaccaccaagaagacggccaccaagtaaacaccatttgcagtagcctatggctatgaagcaatgttgccaataaaataggaaccaccatcttataggaggataacctatgaacaagaaataaacaagaccttgttggcagaatccctcgacgaaatagaagaaagaaaagaccaagccaatctcaaattgcatgcctactagcagaaggttatcaggtacttcaaaaaataattcaaggagaggaaattcttcataggagaccaagtactctgaagagttttcttgaataccaaagatcccgtagcaggagtgttcggaccaaactgagaaggcccttatcaagttacaaaaataataagtaagggctcctataagcttgaaagtacaatgacaacatgcaattagttctcctaccaaggtattggaatggagaacatctctgaaagtactatcaataaaaaatttctaagaacgctactcttcaatagtagttttgtcaactcaattataagagttaatttaaaaatagctaagtatccatcactatttatggctcatgcctggcatgtcaggcaggggtagccgtatgagttctagaagtggactttttattttgaaagcttttagaatcaataaatgtaagttgcacagcaacaacacataattaagactaattgatgaataaaaattttgttttagttcaatattgtgttaaacaacttgctaacgagataacttcttaaatttattctttatttttagttccaatttgtaaaatagggccctcccaagaaaatacacaggaaaggtctataagacttggtgaattgtaagagacaagagactataactct

SEQ ID NO: 63014 - DNA, 911 bp, Cannabis sativa
tccaaacaaaacttggattattccctaaagaagccgagagataattgccattggggaaatatctagctttgaaaatttttgccaccaaagagtgagggcgtgaataatagtttaaaataggaaaatgacacgtgaataatgacgtgacattaaagaaccatgtacccatagagttttaaaattataagttaagtattattaccgttaaaaattaaacgtaagtttttatttgcaattaaaaatttaacttaagtatttatgctgcaaatttttttttttattaaagcgcttataaggttttaattttacagtaagatgtgttttttttttttttatttctttcaagaaataatgtcgtttttcagtaggcttgtagttgtttcagatgtttgtccatttttcagaaggatgtcgttttctcagaattttgtcgttttattcttaatatgtcgttttatgaaaatttgtgcttctttctttttccctcctaatgtgatgtcgtttttttatatttatatttgtaaaaataaattactaccaatatattctctctttctctctctctttagttgataataattagtaaaaaaaaaattaaaaaaaaaagtaaaatagtaaaattaaaaaaaataactaaaaataaaaaaggtgaaaaatacaacatgataacgatataaatcagataaaagcaatgagctctaaaaaaagaaaaatttacatcaactattattttttgtaaatattttactttttacctttaaattttttatatattttatagtattttatattttatatattttattgcagttacaccttactaatgttgagacagatgcattgcgtgtttcatcagctctaaattgtccatctaggaatttatctgttcatggtttagctaagtatgctct

SEQ ID NO: 63015 - DNA, 1561 bp, Cannabis sativa
tctagctcgggacactcgaggtcttgaggacacaataaattaggtaggcaaacgcgagaaggaagtagacctcggcgttatgccgatcaagaaagcatgagcaatatgcaaagctaccatctgagagttactcagagacgaggtctgtgagcaattatgagcgaagacaacttgatctctgtaaacatttgaatcgaagacaacccgatctttgcgagcgactgaatcaaaatgcacctaacttacaccatcaactaaatgtaaatcaatagcaagtggatcccatccagttgcgaaccattgagttggaggataagtttagaaaatatcaggatggggaacatgggaaattacctggttatgacttggatgaggacaccgagccatttcatcctgatattatgaattctgaattccctcagggattcaaaaatccacacgtctcgcagtatgatgggaccacgaatccagtcgctcactcgaataactttaataccataatgtgagccaacaacgtctcgaataatttgtgatgcattttattcctgacttctttaactagggcagcaagtagctagttcaataagttaactcaccattcaataacgtcttgggaacagttgtccaaggactttaagaaatagtttcaagctgccagagatagacgacctgaagcatcatccctaactaacataaagcagcaactaggtgagtcactaaaggcttacctgagtcgtttcagcacagccgctacaaaagttagaaatttgaatgacagtattcagcttactgcctttcaagcagggatcacaattgatatttcaacagctgggggtgaattgtgggatgacttataggatcgcctagtaaggaacattaatgaattcaacgaaagagtgcgagtgtttgtgcgcaaagaagaagtaaggaacgagatgaagttgttgaagactagctagggaaacaaatccagcacaagtactaccacaacaagtaccgtctccattaaagtagataatccaagtgtctcaaacaccaaaagaaaatatgactcgagagaatcaactaaaaataagaagaaacagaaaaagcacgacaaatatgttctgatttacataatgtacaccgagttgaatgaaactcgtgaaaacatctttctcgcaaatgaaaacatttcgcaaccctgaaccaatgagacatgcgagatataaacgagattcaacaaaaaaattttgatttcataagacataggacatactaccaaagagtgtcggcaactgaaagatgagatagagagtctaatctcgcgtagatatttcagacagtatgtgaagcgtcaagggaacgaaccaaaccagcccaatcaccccaataacccagatagccaaagcttgcaacctccccctgttgagggcaatgatatattggttatctcgagagggccacacctcgctggagatagtaataatgcgcaaaagagatatgtcaatgaaataaaaagcggacaatcggtgtttgctcaagaaccactaaaaaaaagcaaaaatagaagaacctctga

SEQ ID NO: 63016 - DNA, 2193 bp, Cannabis sativa
  modified_base (491)..(496): a, c, t, g, unknown or other
ttattctacaagttttctcctggcccaataattttgaatttaactcctacacatttctgatttagagcatgtatctaccaaactcaaatagattttacaattttaattcggtactttatctgcagaaaaacaatcatgtttcaaatccaaaacttatatgccccaaatatatatttagaccattaatttctagataatgtaaatttcgtgctaactttaataaaaaagaataagttattgttatatttaatgcaaattttataattgtatttcaatacattaaaggtaaaatattttgtttaatcaaaattaggggttttttcatttttataattttaaatagtttttttttttttttgcatttctacggaattctacattgaaatcttattgcaactagcggagcaacccaaatcgcaacaaaaaatcgtatagcaacctacataaaaactactgcagaaacaattttagaaacccaaatcgtaaatttnnnnnnaaaaaaaaaaaaagttaaaaagatagtgtaagaggtaatttctcctaataaaagtatattaaaaaatataaaagtcaccaaaaatattaaaattttattgaaagaatataaagaaatatattaaatatgtacataaaaatataaaagctatcaattacattaataagtggtaataaaataaataaaaaagtaatatttattgtggtttaaaatttaactatttgcagcataaataactaaatttaattaccaactgcaaataaatacgtaagtttaatttttgacagtaataatacatatggaacttttgtaggtacctacatgttaaatattaagtaaattgccacgtgtcaatttctaattggtggaagtcatcaaatttttatttttttaaaaaaaaataatttaaatataccaataagaaaatgacatgtgataattcctacagagttcaaaaaatataacttacgtattattacagccaaatattaaagttagctatttatttgcaactcggagttaaacttaaatatttatactgcaaattactcatttaactcaaattatattttgtattttgtgtgaaatttgccataatttttaacattagcaaaatttttgaaccacattatacacaatcatcccattagagttcaattttataaatatttctaaaaaaatgtcatatatgcacaacaagtacatcgattacttttggaaactgccctgtacatttttaaagttcatatataatcaaaagattaacaaaatgtacgagttgcacattatattatataacttttgctgggtttttgtattttaattgaggtactctccatttggtgaagcttataaatagtgtatatatatatatattaattactctctctcttactgaaaagattatcaccaaatatgagtgattttttcttccaactgatttcctctacacctaaaattaattatgtgttgtgttatttgcaacattcttcaacaatataactaaatattttcctctttctgatttaattccatggttaatgtattctgtataatttgaagctttccaaaatattattatacaaaaagtggatgatcaattaatcaaaagttttcgtcatatatgactagtattactacacaccattactttttttttttcgttttcaaaattttcatttttaggaggaataaaacatacattaatttcttaaaaaaaattatggtgaaattcaaattagatttattagtccatcaatatattttagtttacatagttacattaattcccattaataacagattttatcattttgtttatgtttagtcttgttagatcgattaagaaataaaaggcttaatataatagagagattaattcgtagatacgaaaaccagagaaagataccggttgcctaggagtgcatggagtttgatgatgagatcttcttcatcttcagcaaagttgcctcttttaaggtctggacgcaaatagttaatccatctcaatcggcagctttttccacatcgaagcaaacctgaatgaatcaatggataaaaattataaggaaaattaattacacgttaaatataaaaaaggataacatggatttaattactaatgcatttatatatatatatatatatatatgtgtggttaataattgagatatatataattacttacctgcagcctt

SEQ ID NO: 63017 - DNA, 2185 bp, Cannabis sativa
ttcaaacgtattttcgatactgtaaagtaattaaaaaatttcaaaaatttatagagatgatgttgtaagtataacggacactgtcatgaatttttttttttttttaagaaaaatatttgaacatatgttttcggacacaaaagtaataaaaggttgacggtagcactcctcattttattttatataattaattattatattatattttattggaaaaaaaatgtaggcagacacaaggtgtggtgaccattgcatttgcactgggtgcatcaatccatatggaagaaggccatttgaccttaatgaacaacttgaatgaatatttttttcttttttgttttctttggacaaagaaataattgttttagctgttatattatttgtaatatattatgcttacaatagtgtaatatataaattaaaatattaataatatgatagataaatataatatatagtttattgtggcaaataatgtaatatataggtgttaggttttatgccttaaataaattttaattttaatttaatattattttaatcaataaaattcaaaaatcaatttattaattgtttggttcacatatttatttacatgattatatgtttaattaaagattctattaaagaatgtcatttttggatgaaatggcccaaagatatttggctatgatagcttgattccacgtagtccccctttgaattccagccctccataatattttggaaggcataccttctctcaactgaccacatggagcttacttctattcccattccatcctcaaaggaaccctctacataacttttcaatttccttggtgatgctttcaggcaagacaaaaatgctcatccggtaattccgaagcccaaataaaatcgagtggattaactgagctcttcctgcaaaagagagatgtttgcttgcctaacagagaagtctttgtttaatcttcttgataatcacaccacaatcttcagctttctattttgtcggtctcaaaggaactcccagatactttaggggaaaggtgccctcagtgagagttaattttctcaatatagcctgttttgcctcttctccaacccctacatatgagatttacctgtattgataataagacccgaggtgtctttgaactcctccaaacacttcttgagaacctggattgactaaatattccctttacaaaataatatcagatcatcagcaaagcataagtttatgattttgatgctcttacacatggggtggtatctatattttgaattgtcagctgccagttgcaatctccttgttagatactccattatcagaacaaacagaagaggagataagggatccccttgtctcaaacctttctttcctttgaagctacattgaactcttccattcgtaagaatagagtaggaagtggctgtcacacatgtcattatcttgttgatgagccttgctggcagcttatacgaattaagaagctcctccaaaaactctcaattcaccgcatcatatgctttgctgatgtcaactttgatagtacatctcggagacacattctttctattgtaattcttcaagatgtcttggagaatcatgatattatgagcaattgagctcccctgaataaagactccttgattacggctgacaagaatgggtaacacctgagcaagtctggaacacaacaatttagagatgcatttatatatcgtggaacaacaagcaatcgagctgtaatccaccgcttttgtaggactctcagttttggggataagagttatcatagtagcatgaagctcccttggcatgacaccattgttgaagaagctttctatggccttaatgaattcggctcccaaatcagcccacaatttcttgaaaaatcaagctccatacccatcaggccccagggattttgaatcaggaatgctaaagaaagctctcctattctctgtggcagtaaacattgatcatgttcaattgctgctcaacattcaaccttttcccttgttccatgcaatccttccttaaaccatgagaagttatgcaactagtcgccatgtatccctcaaaatggtttataaagtgtttcaccacttcagaaaatttctctatgacttctccatgatcattagtgtaagaaattatactattctccatccttctttttttcaaaaaggcatg

SEQ ID NO: 63018 - DNA, 2144 bp, Cannabis sativa
tgggttttctggtcccactcgccgtggccagacttttggtcactacgaccaagtctggcagagagcaatcccaattttcttgattttgttttggccataacttttgactcgagactccgttttggaggttctttatatcgttggaaagctcgttttgagctctatgtgttaatatataaatcaaaataaaattatgtgtatatgtgaaagtgaatttgggattaaccctatttgtgtaaaattctaagaacgtgtgattaggattatcggcgcttgctcaggaacacccagagatttggaatatccacatacttagattaccaggtaacatagtaagttagcacatagagtttagcgcagtggcgctcatgtatgtaattttgtatacgttctgtgagaaactgagattagggttattatcctaaatttagcgattatgtgatttagagttattactctagtatttaagtgaatatgaatgcaatgttatactttatatgttgaaatggaaagaattatgcgcataaggtataattaggttagactcggttattagaatcgagatgaaccattctaaggccttattataaatagaagtttgagcgtaacacgtcggtttatgtcaaatagacaatagatgcagtgacattaatatttatatcattttttttattaaattgcatattgttatttatattgtcttcctagaccttggcaggtgctctattgtgcaggaaagggtaaatctgttgttgatcagccatgagatggagggctttacgatgtattgtacatgtttaggccaagctagaccacgagggttgggtctaccaggagaaaatatcgtaatctttgcttttgccgcttaggtcagcgtgtattgataacttttaatattttgcaaagtttttacgggatctcgaaataaaaatgttattttttttttggggatgtttgttataaagtttaaaaattacaagttataattttattctgtatatgtgttacagtttaatttccgatcttagctcttgtaatcccaatttagttggattagcgttgtttagtcgttgtttgtgacatgcccattgttagggtgttacatctttagacttgcatcttaggtttcttatctttttttccacaaaaaaatgaaaataaatgtgttaattgtagtagtgctcccataagagcatcttcaactatactctctaaacatactcattagctaaaataaggagtgagatctaagaaaataagcttctactatacaaaaaatgagagctctctaaatgtaactattttttgctaatattttttaatattattttaatcaaaaaaattattatttatattagggtgtttaggtttttcaaatattcttcttgctacagccgcacctctcttctacgattacggttctaatgggtttttaacttcttctcttcttctttttcagatcacaggtagggttatgttctaatgtgttcaagcttttaatctttctactcggcttcagatcacggttgggattagagatattagattctagttttaaaaattcagtcataaagtctgaacatttcttccccaactaaaaaactcaccacatgtgattaaatgacctaaagtataaattgtaagtcatggtgtcttgtcttttgacatgcaaagttcgtattggttttgagtgctctattttttttttcttctagcttttggttctttggcagtggtaccatggaatcagacatggctgaagctttagccattaaagaggcgttaagttagatcaaggatcatgaatggcataatattgaactcgagttcgattgtttctcaattgtccaagctattcgaagtaacatcaccatggtttcgccccttgggggagtagtgatggactgtcgaaagcttctatctattttaaatgtttctttgttttttaataaacgatctgctaataagactgggcatagccttgctagagggtcatatttttttttctagatcgagttttcagtgggaagaatgttcctactgaattataatcttgtcttttggctgatttagcaaaggctaattagtaatttttacccccaaactttgacatgtactaaattatgccccctaaacttttttgg

SEQ ID NO: 63019 - DNA, 583 bp, Cannabis sativa
tggaagataaattgatttagatgaatgttttctcatttttcttctataataataatgtattaggctcaaattattttaaataaacgttcattggtaaatgaaaaatattatgatttttgtaaaatttcaatatatataattcaaataatgtaggtttgaatggttcaaacaatttgattctttccttttacttttcttctctaggaactagacacagtaaatatatgcaacttgcatggaccatcataataacaaaaactagctacgtggatatatatatatatatgatatcatatatcatatatatatgaatattataagacaagaaatgggaatatatatgatatcatatatgaatattatagcacacacgcgtgccacaagatttgtaacacagtatatatatacatacacacatacacatatttacaattaagtcaatataatgtgaatatatacaaaagcttaaaggatatctataagtcacaagtttcatggagcactttgtgctagaagtggctagaatatttgccacacaatattgcatactatcactatagattatatatatttatatatatat

SEQ ID NO: 63020 - DNA, 857 bp, Cannabis sativa
  modified_base (161)..(168): a, c, t, g, unknown or other
  modified_base (352)..(368): a, c, t, g, unknown or other
agctagtaaataattagttaaaactacttaacatgttactaatttttattcctaatcctatttttattaggctaattaggatttttatctcttaaactttaacatgtaccaaatcatacccctgaacttttctgagcattaaaaattttccctgaactatnnnnnnnnttagatttaaggacttttatttaatttcatttaattttactatttaagttaattttttatgtactaaaccatgctccccagactttgatatctaccaaattatacccctcgaactttgacatatactaaattatgctccctgaactttcatccatcttagattttttttttactaaaattagannnnnnnnnnnnnnnnnaacaatctcaatagttcaggggacattttgaacgaccttaaaaatttagggggcatgatttagtacatgtcaaagttcgggggtaaaaatcctaattagcatttttattactgttatccaagttatcattaataggacacgtagcatgatcagagaaaaggatatacctacaacaagaattattcgaggtaaccaagaaagggaatgtctcgtggacttggaaggtaatgaaaggcgatggcctctggtagtatcttctctttattaagaacccgaaaggcgataaaggttttaaagacgtcggccacgtaagcaccttacaaatatcactccatagacgattacacctttttctgacataggatcaaattctgtcccccacgccagatcatggtaatgcgaaatcgcaccctcaaatatactttttgcccaatggcctagttagagtgtattttgcaaaggagagacctttgcgcaacacgtgtccaa

SEQ ID NO: 63021 - DNA, 3798 bp, Cannabis sativa
tttgaattttttaactagcagtaattctacccgctacctaaactctaaagtgtactgttgaatgtcattttgcgaaaaattattaaaattaggctaaaataatgaaaacaacttaaaaaggaaatgggttttctcattaaaaaactttaagatgtgttttctcattttttttttgcttcctgcttattacttaattgttatttttacttattactgcttaatgaataaataaaataattaccattcaacaaaagaaatctatgtatatactttagttgtaactaaacagtggcagaggctgctatacaatcaaacttttacaaaggaaaaccgaaaacaaataattaagaagcattggaaaactaaatctcaaatgcatcacgactctttggaataacactatctcaactttagaattaggaagatgccaaagaagtcacagtgataaatagtatttatttatttgtttgtttcagtcattaaaagaagaaagaataaagtattatattagaaatatctaaataataaaaaaggaaaaaaaaaatgtaataattttcttgggagaaaataagccaacaatgacacataacggaggcgatagaagttgtatggaagaccgttcgtttacgatttgtactggtttccacacaaaatattgttcaattttatatggacaaaacataattggctcatcttttttttctcttatttcagtccaaaaatccaacccactaggtcttcgcagattgattttattgaccacccaaactaaatcaaatgattctcttttctttatttttttaactttttatttggcaagtggattagaataagaggctgtgataaaatttgcttcgctttcttctatttctcactctttaattaggacacacacatgagacaccttttactcttttcttttcttttcttttcttctttagtccgatgaaaaacaaagactgaaagtggtagtggtagtagagattattaaatgtgatagacctgaaagtggggtcagcttattttcgaaataaaatattccaagttttcaaattacttgtcatccaagaaacaatagctgccactcaaatggtcatgatactgtaagttgataagttaatgaacacaaaatgtttactcgctcttgttctacatcatggccattacacactagagaaagtatatggtatgtaggaagtatattatttgaactgtgaaaatcaatctagtcaacgctatatatccttatgtactaatacagaattggccctgaacaaaaaattgaaaactctacaaaaacattgttaatttttagtttgtgtatacgctttgcgcttcatatcttctatgtcatcaatggtttgtctttttttcctaatcaaattcttcattagattaatatccgcagcctggagagaacaagggggcgttgaagaaggaaatgctgttgattttcggaggaggtatctctgtttagcatcagccagacatagcagggattcactgcacacttccagtgcagaaggtggtcgaatcggtttgaacttttgtagctttgagtactctttgatgagatgaaacatgtaatcatagactctgtccacgctaaggctctccatcaaatcttgccctcctttccctatctctctagcctagttaacaagtagaaagttttaaccaaaatcaagtcatggactttatgaatagtaaaagaaaagtatataatatattcactagaaagaaaaaaaaatatgcagacttttctcattctatgtttgcctaatgatatttgcaaactaagtggatgtggtaaacgttctagtggtcagtatagttccaacatacgtgtcattgtggtatccattccccccctttcctttttatcttttttaatggtaatggagaatttgtataacatcaccaacaagtgtgctactacactttgttcacaaaagtcaataatctaacaagttggaatctcaactgcagctaaatataataacatcttatgtttggaataaccccaaaagttcaactaaaagttaaaaacagaatcagtaagaatccataagttgacaaagcattatacatgtcaacagaaaatcaaattaagaagcaaaaaagaaaaaacatacctcagatggatgggcattgccccagtcaacagcaaattttaaggatggacataaatcagtagaagagatcggccaataatttttcttaggaacaagaccgcggctgaaaaaatcttcatattgtggggatattattagtgctagagaaccacaagaaagaatatatttcaggctcacagaccaagcatacccttcagcatagattttatacctacaatggaatcaaggggggaaaaaacagaatcatttacctactttcagcacagtagtttgaatgaacatgaccatttgtagacatggtttccaaacactgcatcaagttaattagaaagtgtactcaccgatagtcacactgattagaaagtttagacttttcgtaaccctcttgtgcttcttttgaccaatcctgcttgtaataagtggaacacatcagagaattgttttttatttgttgttgaggcattaattgtacctctaaccacggttcaagttataaagtatctgttaattcaacctgacgcaaaatatgtgctccccacttccgtgagtgattacagtttagtaactctgtacgtatagtggaaccaacgtcaggattccctttccagaatgcacggggccacttctttgtccaattccttttttgagaaccatgtttgatatctctgaactcttcatcccatggattaagatttgtctctggcctggacaagaaaatgtaaagtaaacaccatagaaactcagaaagtattactgatctagttatatgtagacaagagtaggcaccattaccaataaccaagagaagaaacattttcaagtttctagcctataaaataacgaggcaatgatgatgactggtttgaggggatgacccaattatttcattttgttacattttgatctttgttaccacttaccagtaccactgcccaatgtacatgcattcctcacttaaaagactgaaaaattcgatcacatctcatcactttgcaaaacaaaaataacataacactctcatcaacttctctactctattttggatagatcagaacaaagtgaaatatttgatgaaactcactgtttatttactttacataattttctttgtattttctctcaccaccaataatattattaatattaatgaaatatgtgttgtaaaatatatatatatatatatatatataatacttgtaaggaatattttgtacttctctgtattttaaggatatttttaaaaaaaaaaagaatgaaagttttacatcagcttttaggagtgctcctatatgaaacatagatcctttaattaaaaaaaataataataaaagaaagagagaaaaagaaacttagatccttttaaaaccaattgcctatacattttaactgactgtattacaaatattaactctaccactaccaccattgtagcataactatttctattgcatgaaagaacatatttcagttcactaaatcacttcacatcagctttactttggataaagaaatgaaaactaccttaagaatataattaaatgataatcatacaatttaatgaaagaagagaatttaattcttaccaaccccagaaggaccaatcaggaaaagggatgtcaaaatgagcttgagtggtacagtaccgaaacagaggcaatggcat

SEQ ID NO: 63022 - DNA, 1254 bp, Cannabis sativa
ttaaaataataaataaataaaatactctaccaattggttgaactaaacccttgtttttctaaacaattttgaatggaaatatttcaaaaaaataatctaactaacttcccaaaaatcatggtagaatgcgaatatgcattattcattctcttcctctcttgctattgaattcaactattaaaattatgggcgttctacaatattcttttattctgtgagaaaatatttttttttctatttatgtgatgaagtcaactattttacaggattagtttcatgttttaaaagtaaaatcgtaaattattatacaataagctaaaatgaattgattagtaattttagtttaattgtatttatccaggattccaggtaatggctccaacacagtcaaatatgaacttttttcttaatttgaacaaatgacatgttatgactaagacggaagtagctccaatgccttttgaccgctaatgggtaagtttattgtgttatttcatagtttgcatatgtctagaatattaggttgaggctttgtacacatgaatcttaattttttaattttgtatgataccaaattaccaattttataatgttgaaagaattttttaattggttttttttttctggtgtcaaaaaccaataatagagaggacattttgttcggaatttgattcaaaaagttgttggattagcaccatatgataagaggattactgagcttctgaaagttggataggaaaagcgtgcacttaaagtagcaaagagaaaagctcggaacccacaagaggaagaagaagcgtgaggagtagtccaatgttcttggcaagatgaggtaacttcaaataaccttgattagtagaataatattgatgatttctcaactagtgtttttttttaaaaaaaaattgagtaggttttagccttataatattgaatttgttttcatcacataatcgttatgaaactgataattctataattttctttttttcgctgaatttgtaacagggttcaattatacattatctgtaaaagattaatttattcttgttccaattctcatttttaattttttttttttgatttgcttgcaagatctggtggagctattgaaaagtaaaaatgataattcttttttcaatttgtatttgggtttgcattatagtgtaaatttttttgagatttagattcgagatagacaattttagatatttatttgttaaagtgacattaactttaaaaattatgagatat

SEQ ID NO: 63023 - DNA, 925 bp, Cannabis sativa
ctctcttttatatagttatagataacatgctcttagtaatgtctgctcgcatacatttgtatatattataattaaaaaataatattgatttcgaaaattgaatattacactatgatgactgatgatcggtcgcttacattatctattgaaaataatgtcacattagaagtctgttaaattttttaaacaaggcctatttctattgttttaaatgcttcggaggaaattatgctacaccaaaaagtttgaaagcacaatttatgggagtcaaataaatagttatttgtccaatattggaaagttgctaagaagaatgaattttactgaaaatacctctcccatataacattctgttattgttataatttagtattgggtcatacatattttaatttagaatataatttatgagacctaatacttattgtaaatcaatatcaaaatggtattttctcaaaaaaaaaaaaaaatatcaaaatggtatttgaaatgtactataagatgacgtttagttgaaatgaatgaaaatatagtaataataatgtgttaatgcaaaatgaaacaactaatgacttacgatatagtttacaatactaacaaacacgcaacacaatcaagaaactaaataaacagtgatctcaagaattcaagataataaattaagtagtaaaacaaaaaagaacattaggtttaacgagttcgagccatgggcaatgctctacgtttcggctagaatagcagcaaccattgagatgcaaaataaccttaaatttagaaaccaagttagtaaatgtgtcttttttaaaaaaaaagaaattaaaaaaatagtcaaatataataaagtagctaatcaaaatacatttattatatattaatttttttttaaaaaaaatatataatcattaaattaagttatataattttt

SEQ ID NO: 63024 - DNA, 699 bp, Cannabis sativa
aaccaatccaaagtaaccgatccaatccgtacttttgcagattggattggattgaatttgagctattgtgcagattggattggattcaaaaaaatgaaatccgcatttaatgcggattaaatgttgtttgaccaaaaaaaatactgattagatcggatgaaacgttaggagtttccatccaaactttcacaattaacactgtttctagtcttaattagattcagttataatatatggaaaatgtacggccacttatatgtttttatttagtaaataaactaagcatttagtaatttacaaacaaggtctatcatgtttcaaaaaaaaaaaaagaaaaaaggtctatcaattttaataaagtataaatatattacagattacttgaacatatatacattatatattcatatatatagagagaatcataaaagaaaattaataagtgtttacgaggaaatcttcaaagatttacacacacttattttaaaagtattcaattattttataaattgcaccatggccggcaccaacctaataactagacattttcaataccttgaagtaattaataatatatatgatggagttaatttattagcagagaacatatatactacgtaacattaattaattatttaattaatatgtacaaatatatattatactaattaataatgtgaaaatgagacaaaatccaag

SEQ ID NO: 63025 - DNA, 1079 bp, Cannabis sativa
tgcctcacgctccaattcagcattctgctgattttcctcctgcaggcggtgcctgagatggcggttttctaattcaacgataggcatgtaccttgtaagatcatacgcaccgtcatccatgggtcgagcacctccaagattgggttcttcgtcccttactccaaggttttggccatttccatgctgagtcctccttgaacgtatcgaccgtgtattcgggccaccctcaggttgagtcctccaggagccagtggttcgtgtactagggccaccctcaggttggttcctcctggaacgagtggtccgtttagattgtgagttggaaggcctcctgcaacccattggctcttttctaggatggtgaggggtttcttcatgtggtgtgtcaatattttctcctttgtcagccataaaaaaaattattttttgtatgtaaggagggtttttctgagttatttttcacgaaggcttgcaatgaaaaaaccgaactgttaacgcagatttttgttaactataattaagcctaaatattaatagatttgcacagaaaataaaagtagtaacagtaagatatgaacacaaaggtttttacgtggttttgtagttaaaattctgcatagtccacgagtcaattttgttagatttctgatacaactccaagccctttttttaatgattttttcgtccatttttcagtgtatttagcctctatttataattacatactaaggcagtcaattacatagtcgactgatttcttgcaacaagtatcccctaaaatcgtggggcttgattacataccacgtaaaataaatatggctaatatttgaaaactacacagctgtgataggtccgcttttaccgagtcaaggtaaacgtgtattaaatatgttgtaaaccagaacgttctgggatatctcactgggagaacagtcacaataaccttggtagcgagctgaaacttttttcatgtctttccggggttaatgatgtaagcctcgtcgtttctgcgcttgaagacataatgctctatctaaaaatcgcagttcttggcgacaaggtagacttcagcagtcaac

SEQ ID NO: 63026 - DNA, 594 bp, Cannabis sativa
ggtaggtacaaaagcaagaaatttgaaagagcaaaaatggtaaaaaagacagacggaggatgatcagaagacaaaaagcaggtctttaaatagaaaaaaggaagaaagagatacctgaggaaagtagagtttggaagatgaggaggtgtgtgcaccattcgaactgctggaggtctagatcctcgtctgcccagccatagggcaatgattcgcctccatctgaagaaacagacggttattgaatgcgtgaaaggatgggaaagagaaggagaaccaaagatttcctgagtgttcattaatggtagcctcggtagaggaaaaacgggggctgcatttaagaaacaacaatgatgaagtgcagagtatgatgaggaagcattaattagagaaagagaaagggagaaaacgacggttgggaagtggaagtgaattggaagatagactgggagtgaaactggaaaaaccagaaaggaccctagaacattccagagcagggagacaattacgttgtattttaattgattacacaacttttggttgttagtttgaattttttggttgttgggaagttcgatgtgtgcttttgattttgac

SEQ ID NO: 63027 - DNA, 810 bp, Cannabis sativa
ttgattttctaagtatagaaaatcaaatttccctagtagtatgtatgtatatgtatatttttgtgtatatggatatgtctgtatatgtatgtgtgtatatatataggtatgtgtgtagatatatgtttacagttgcaacaatataaattgaattttttgagttctggttctatcatttctcgtaatgatattcaaatttgtgttgcatctatagaataaaagctttatgttcttagaccagatgaaccatttgcgcttaataacgcactgtttaagatagccaaacctagaaaccacaaaaagtaaaagatcgataatgaagacaaaatatatctacgacacttacgtcttggtcatataggctatgatagacttcacaggttaaccaaaggtagtccattgaaaaatgtcactttaggtgaattaccagtttgccagtcttgcctagaaataaaaatgacaaaatattctttctctacaaagggagagtgtgccaaagaaccactaggaatagtgcattcagatctttgtaaatgtcgtatttgccctaggtagagtttaactaattcacaaatgtatccacgactgaaatcatcggcacgtgtcaacggtcagtattgggaaagatagcaagctcctgcgatttaaagagtctcaaaagcttaagggtaaatgttatccaagttttcatgcataagacatgtggcacgattggagggaaaaatatagcagcggcaaagattagtcaaaattacctatgagtcaaggaatgtctctcagacctggaagcaggcccggccctaggcatag

SEQ ID NO: 63028 - DNA, 726 bp, Cannabis sativa
ccaataccagcagctgttgaacttgcttgcctcacaaaaaagtggtagcaatgtgaacgaacctggtacttcctctggaaattcaagtattatcttatctcatgtatctatgcttcctttacgcaactcttggattattgatactggagcaacaagacatatatgctccaatatcaaattattccaaagcatatgtaaggttcctccaactaaactcattcttccaaacaataattttttgatggtaaatcaaagtggaactatcgatcttggtaataacataattcttgacaatgttttatatgctccaactttcaaatataatatcatatcggttagctaccttaccaagaatgctcctatttcggttcaattcaattctaacagtttgattatgcaggacagtgccagcaagatgatgattggaagagggagtgcaatcaatgacctatacattcttgatgttgcacatgaagcccctcaagtcctctctgttgctgctgaaacctggcactcacggctgggccatctctctcataaacgtttagatttactcaaggatattcttaattgtaacacttctggtttacacaagattgaatcttgttacatatgtcctattgctaaacaaaagaaactccctttcaataataaagcaaagtttgctgataaattttttgaccttatccattgcgatatttagggaccatatcacattgtttcaca

SEQ ID NO: 63029 - DNA, 1838 bp, Cannabis sativa
  modified_base (423)..(432): a, c, t, g, unknown or other
ataactaaagatataaattttatattaaattaaaattattaaaatagagtgcctttagaaaattttggggtgtaaataaaatttccctagattttattgttaaattagcttcgaagttttattttcacatatacacaggtgtacacagtagtcgtccatcagtatttaacggtgatatttaattgacgtatcaaatttacaaaagtaaacttaatgggattttgccaccaaaaaaaagatattggcagtaaattcaaaaaaaaaaaaaaattttgtctagcatcttatattttatattttactcacatactcggatcctagacccgaaaccatacccgaacctagacccggatgggttaatgtcatggtatggtgctaaaataataattttttttcgtaaaaaaaaatctaaaaacagttttnnnnnnnnnntgccaaacaccataaaatttttaaaatgacaaaaaactgttttctattctcacttttaaaaacacaaatttaaaaactgaaaactgaaaacacagccaaacaagctcttaaagttcgtaattttctgctagagaagtttttcctccgacaccatagtctcatcagctgccacgatttgtctgacccgtacggtcgccaccacctcctctgaatctcgcaagatggtcgattatggagaagacctagatgatgataagatcgatatgtggctgaaaatgcaaaacgaggctcgtacagacattgaagaagaactcattgtaacaagcttttattcgagctttattttgtctcaaaactctttgggaagtgctcctgctaatcatctctcgatgaaattgagcaataatcacataggatcgagaaatcatcaaatccgttcaatacgatcttataactattaaagagagagagagacctagcttgtataagttatgttcattattttttgaatttcaaagggattttagcttgtcaagctcatagggttgttcataaatgtgttagcttaattgatttagaacagagtttctgaggtttttgctattgatattcttctctgttctagtcacagaagaagaagaaagaagaagaagaatgtaatgaccgtatgattaaaatatggattagaatgacaattagctttaattacttttattttatgattatatatgttgtgggtcccatttttaaaaaatgggcattagagttattgttgactctattatcctaatttttgcacacatgacgtgacatgtccacgtgggcaaggtttggagtacaacttgtcaggaagaaggccaaatcatcgtacacaacatatcacttgatgaggagtctgaatacttaagtgggacaaagagacaacaaactgaccaccttaaggggtctggccggccttatggccagcaggctagccatcctctaacaaggcataggttggccctcctgcatcctaacatgcacttattgtacagccttgaccctggcaggcacttgttgtgcagcttacatcctggaaaatactataagctatgaattgggttttaacaaaccacaaaaataggggataatgatcagttatttacctatttttggagattaattaacatattaattgtctattattttattatgtaacaaataagatatatttcatatttaaaagggatattaatctattctcttgtaagctctcttatataaagaatatataaagaacattagactaaacctaatttctctaagccttaagttcaaagtctcaagcaccaaaagctcagaactttctaagtcttgaagctctaaaactctaagtctaaaaccctagatctctctctctctctctc

SEQ ID NO: 63030 - DNA, 815 bp, Cannabis sativa
gagtttaatggtgagggaggaagtgagggaataagagaacggaatccaggaaggagctgccggagcagagggagtagcaccaggattggagacagtatctggggacgagttgtcgccagaagaagccattgacaaaggtcagtggctctgataccatgaaaactgagaagcagagagaaacagagacaaggaaacaagagaaacacaaggaatgctttgaactcttacctcagaaaatgaggataagcactttatttatagtagcagactttgtacaaatttacataacagtaattctgttatataacagaaaacagtaacaacagaaagaaagcaagaaacaaacaactaactaactgttacatttaacacagccaaccaagttaactaatcttggttatcatcccccctcaaacgaaacggggtagaaaccactttgagtttggattttagatactggaaccggtcttttggtaggctttttgtaaagatgtcagctacttgatcaattgtaggaacatagcacacttcgagttcttagtttaggagttgatcacgaacaaagtgttggtcaatctctatatgtttgcagtgagcatgaaagatgggatttgcagctagagaagctgctccttgattatcaacccaaatgatgggaatatcagtcaaagcaatttgcatttcagtaaacagagatcgaagccacttaatttctgcagcagtgttggccaaagcacgaaattcgaactctgttgaaaacctgacaacaacctgttgcttcttagcagaccaggatatgagattagaaccaataa

SEQ ID NO: 63031 - DNA, 1585 bp, Cannabis sativa
  modified_base (27)..(29): a, c, t, g, unknown or other
actaatcagattgtaaagagttttatnnngggcataaaacccaacaggaatcaccactctcctttacaagactagaaatagggacagtagtggtcccaccagcaccaggagtttctcaagtttcttgcaagaacttgactgatccttcagctcaaagagccttgtcacccatttcagcataggttgttgtgtcatttgtagtgataaccagatcatgcttaatcttggcattcaaccccgccaagtacttctcctttttactgaagtccgttggtacaatccttgaggctaatttggccaagcgatcaaacttggtcgtatactcggtcactgtcatgttcacgccctgtaccaactcaacaaactctttctgcttttcactgcggtatcgcctcattgtaatacgtagaattaaataagtcccagaattcttcctaggtcattctagcaacatccttagtgagggacaccatctcctactacactaaggcatcttcctgaaatcggaacgtggcacatgccaccctgtcatttctgaccactcccataaaattcaatatcctctcaatcaccgtcagccactgttctgccttaagcagatcaggaccaccaaagaacactgggggtgcttgcttcctaaatctctcatataaaggctccatacggttaccatcaataggttgctttgctggcaccacaggaattgcaacagcaggaggctgcagaggaggctcaacaagagcatcccgttgtctaagcctttgaatctcatcttcttgttgagtaattctggcttgcatctcagcaaacctctgctcctaatcaaatggagcctgaggtggattctcttgaccacccctaggagcacgaccgcggcctctaccgcgtccacaggggttttgaggatttctacaaccccgaccacctccaatctcaaccctttcgccccgtcctccgacatttcgctgggcatccattacttaggacttagcctgcgaacccacgaggcatgcaggttagacagtggtccaaatattttcaagaccgcatttagggttaaataataattacacatatatgcaatatatcttaaatagtttacaaaggtaaagcttacagaaccgtgagttgagctcgacactagccttgattgtacatatcttactggtcttcagtgaataacctggtggctctgataccaaactgtaacgcccgtgtttgaaaatttactaagcccaaaagctaatttttattatattataactatataagcttataggtcgggatcctgagattaaaacacagttgtaacttacatttaccatataaagttaagtaatatatattttttttacaaaacataaggctactcaaaattttataaaattgaaaacctccaggttgcactgctgcaatatgtacaatcatcgccaagctctaactcactgctcctccagcttagctttccctttacctacacaaggtagcaattgtgagtaaacagactcagtaagatatgcataacttatatgaaagcaatgctctagcagctttatatttgagtcgctctaaactcatcaaccga

SEQ ID NO: 63032 - DNA, 1996 bp, Cannabis sativa
aaggaaaagtttgagcgttggcgaaatgctaacaataagctcaatactttatgttgtctagcttggttgataccttaaaaataaggtttgcaaacactctcacggcaacagaaattatgaaccagttaactgaactgtttgggatagcgttagatcaagctctcattttgaagcaaccaaaaacattatcaatgcacggatgaaacctcatcagaatatgcctgatcacttaaattaatttaaaagctcaaattaaaaatataaaaattatgtctttacagtttacaaaggattgaacttatgagattctagttgatgtaagagaattttacacttacaccataattatattaagattaaatagcttgattattttgtactctattagctatgtttattgttgagtagagaattaaattaatatataaatttaaaattaaaaaatatttaattaaaattataaaatattaagataaataagtaagaaaaattataaatttagagttagttttatttgtaatattattaatgggatctaattattaatatttaaaattaattataaaaaatgattaattatgttatagtttttaggaattaatttaagccacttaagtaagttcatcatcattatttacgtgtttagaaaattttaaaatagcacatcgatctggatctaaatagcatacaagtgcttaaataataattttaataaacacacatacattatacatatattagatataataatgtgtttattattttttattttttatttttttgaataatatattcatttataaatcaatattatagatcgtacatatgcccaattcaatgagtgtttaggtaatggagaaactcatcaacatacttgttctgcactcccatgtctccaaatatgggactcatttccttcgccttctctctataaacctccccttcttcttcaaccatcactgccttcaacgatttggccattgattctctggaaaaggatccgtcgatttcatctcttggaacggaatatccaatcattttctcctccaaaagcctggcgttcaaaccttggtcgtttgtgaaggtcaacagcaaaaggggtatcccaaacttaagagcttccaccaccgaactccacccggagtgagtcaagaatcccccgaccgattcatgacccaaaatcttcagctgaggagcccaactcctccacactattccacgttctcttgttcgatcctcgaaccccgttggaagctccactgaatgcccccttagcacccagaaaaatggaaagccagaaagctctaagcccagagccatctcattgagttcatcttggctcagtacaacctcactcccaaacgctacgtatacaacagagcgtttcggttggaggtcaagccactcctttgctttcttccagctgtcgttgacttctccggcgtatggtgtcggtggaagttgaccgatggggagaactggttttccgagaatatgtgccatgaggtttaaccactctgactccaattcccaacaacttctcacggccaccacgtcgcaacctctgagcgatttagcaatgcggtagacgaccgaaacgtctccgtcgccgccactcaagtcgtcgaagattttggatacctcaaacctccgaagcgcaatttttgagggaaaggggacccactttggcgggacgatgaaatggtcaggctcggtgcgggtatcagggatctctgcaccgataaatgatagagaagcagcgttgaatatactgaagtatgcatttcgaagattgatatctcgggccatatccggtacccaataagccgcaaaatcgaataggagccagtctggtttggaagagcgaagaagatcggtaagggagtctcggagactgtcgtaggctcttttgaggattgggacttgttctctggacatatcagaggttgcttctgcatcgtttgggagattaaactctgatgatgatggtaatgga

SEQ ID NO: 63033 - DNA, 808 bp, Cannabis sativa
tacttagaatgaaaaagttttcattgcagcatgaagtgtacttttaagtaaaacataggtcatagctatgtaacaaaggtgtctttagcaaagattgttaacttcgaaagaacatcctccttagattcccacactaaaaagtagtaatgagttcagtagactaactagtactagtattattatgtcatttttattattccaacacagatccataatgttagattagagcagttatgtatcctaaaggtgttatgttaacacatgaatcaaaacgttgtattttcctgtcttctgttaaagagtgattgacctctttttgaaaacatattttattattattcagtgaagcttgttaagtttgccacgttctgttttataacccatatctaatttcacatgtgctcactatgttcatgttaattctcttatttgaaggatcataatgcattgggtgaagatttaatgaaaactaaagccaacaaattctattctactatatttcgtaaagagggagagatagggggatggagaggggtggggggagagtaatagaaggagagatttagtttatgtttgaaattataactaaaaaaatattttttgtttttgaaaatagaaaataattttttgaaaaacaattaggccttgtttttaaaaacaattttcaaaaaataaaattacaaaaaataaaattttgaaaacaacaaaataatattttttgttttgaaaaacaattcacttttagttaatattatttttagaaaatattaaccaaacgtgacttatgttttaaaaattttaaaaatta

SEQ ID NO: 63034 - DNA, 2240 bp, Cannabis sativa
aaactaagaaaaaaggaatgttgattacattaatggtaataagtaaaagatttggacatccacataattaatactatttataacaaaaacaaatatatatatttttattatgcatgttaatggaaatattattgggacgaaaaatcttacaaatttaaatgataagaacaaagatttctacacttcgaaaaagattaattgttgttattattattatatatatattaaaaaaagaactaaattaccatagaacgtggaatacgctattaaaaaaaataatttctaatttattataaaaaattagatcataatttagactagttataaataaaaataacttctaaattgtaattagttatacattttctaagttattaaaaaagtgtacttctatataagtataattatatttttttttgactaaagaagaagatttcattaatcaaagacaaagcaaagctacaacaaggccacaaccaaccagccccaaaactcccagcagatactgaagaaggcgcgaaaatatgcctttttcagcttgcataattctcctatttttaagctatacaacctgtatttgactatatctttaatttcctttacagtttttgaaatagtataacatctataattatgcacacactgatttctatttttccatagcaaatacacaatggcagcaacaaccaaattaattaatcacacctgaaatctttcttgttatccaacacaaccagttaatgtagtccaaaggccaagtagagcacccacaccagtcaaaaacttgctgcactactgctttagaaaaccagcacctgaaaaacaaatgatgatgactctcctcttcatcacaacaaacaaggcagccactagtctctaattcaatgtgaaacttagagaaattatccctagtgagaagatgaccatgaaccacctgccataggatgaacctatgcttgggcaaagtaaggttgcaccagaccaccttgtaatacctgtctgtgtcttggtgtagcagcccgttgtaaagccgagcagcaatatattttccttttttaacagtaacaacaatattgttcttgctaaacctcgtccttagttggcatatttttttccaataccaactaatatcccccttcaactcatactcccaaaagtcaactcctttgatataaatgttttttatccacttaacccaaaggatatcattcttgttcatgatcgcccaaattaatttttcaagaatagatttatttcaattaggaccacttttaaatccaagaccaccaaaaggtttaggaagacataccttatcccaagaagccaagtggatcttgcttttttctcccttagtcccccattagaagcccctacaaagtctttcaactttcttgataacactttgggggagaatgactatgctcatccaataattgcgaagccccaaaagcaccgaatggataagctgaattcggccagcataagaaagatacctagtagcccaagtaaccagccacattttaatcttcttaatgattgcatcacaattttctcgcctccacttagtaggtttaagaggcagtccaagacacttgagagggaaagaaccctctccaatatgcacatcatccaaaatcataactttatcactagaggaaactcccccaaaaaagaccaaagacttatccttgttaggaaacaaacctgaaacctccgagaagctctccaaagcaaccttaagatggtggacagccgcacgaatgcccttgctaacgaggataaggtcatccgcaaatcaaaaactaatcaattttaggcttttgcacataggatgaaacctgaatgatttcttagaggattccaacatcactcttcttgagagatactccataataagcacaaacaaaagaggtgacatcggatccccttgtcggagcccctttctccccttaaagttaccttggaatcttctattcatcatgatagtgtaagaggtgcctctcaaacacatcataatccacaaaatgaacttagaaggaaagtttaattcaacaagtaagtcctctacaaatccccaacccactgtatcataggctttactaagtctatcttgatagcatacctagaagagacaatcttccttccataattctttatcagatattggaaaatcaagatgttatgggcaataaatctctttaaattacatattttttaaatatgtttatcatttataggta

SEQ ID NO: 63035 - DNA, 601 bp, Cannabis sativa
tatcataagatggctcatttttcccatatttttgaaaatatcccatcgggataagttgaaaaatatctattttttgtatccattaataaaaaaaaaatctcatattgttttttaattaaaatatatacctattttttttagtagattgcctaatatactctcactttctacttaagtctaacatataatttacataacttaagggtctaatgagaacatcatttataaaagtgggtaaatctaaaaaaaaaatgaaaatagagataaaaattaaaataaataaagtaaaataagtatacaatataatttccttagggatttccctaaatgaatagggacgaagcataactttttaagagttttaccaaaatactagatttttggtaataccactttactgtcacatggaatttttatataaaattacatttttttataaaataatcgtaaaataacaaaacaacacagttaaaacaacagtggatcaattaaaaaatataaaccatggaacaatagtaaaaacttatctttttaagtgtaactacaatgcactcccttgaaagagatgtactgatgcatgctctacttgttttgacacccg

SEQ ID NO: 63036 - DNA, 884 bp, Cannabis sativa
tgtcttggaatataatttctgagatagagagttttttcctttgtaattgagattggaaaaaagaacgatcagatatcaggttttttccaagttttagatacacatttcaattgaaacaatgtaattgtaggtaataggtatagttctttgaagaatacatcattattcaagcaccgtatctttctcatttcctaaaacacaaaatcagatttcatcatttaattatatgtataacatgtgtcactacactaaataagtaaaaaattataattgaaagtctttaacaacaaaaactactatgcaccatacaatcaactattgccctactagaaaaactgctatgcagcattctcaataatattaattacattgaaacataacatgctatgcattacaattaagacaaaaaaggaaaattactttacattgaactctcaggattcatcttcaaagacaagttcccattgcttaacaaagatatcaaagctgtcacaaacattcctgttgatgaagaaggctttcaattcaaatagacaatctttgattttctcctgcggatgttgtggtaatttcatcgtgtcagggtctcatttgttgcaggaattgcttctctactcaaggcccaacaatctacatttgcaatccattaaataaggaaatgaccaaactgagttgggattcacacgaaaatgagaacattatatctttagctttagatccatctcagaatcccatagacatttctacagaattcaagttagtgacagttgagccattttagattggagaagaagaagaaaagtacttcacaatcgaaatgtactcttcaagaacaaaatattggtataaatcaagagagattgtcaatgcaacaacaacaatat

SEQ ID NO: 63037 - DNA, 1261 bp, Cannabis sativa
  modified_base (131)..(135): a, c, t, g, unknown or other
atgatttgaaaataaccaaatagatattttcaaattattttctaatcttataatttaataaaataagatcccagtactcacttaagcatcggagggtcgacgacaaatattattttatcaaattaaattannnnnctaataagataaatgatttgaaaacaaccaagaagcctatgcaacaaggctcttacaatcgggtactattggccgacaaagacgatagattcgcatgattttgtcaaaagatgcgacaaatgcagaggttcgctcaagtgtcacacatggcacctgaaaagctccattaaacattaactccttggcctttcatgaaatggggaatggacatcgtcgggaagatgcctacagctccaggacaaagagttttcatgttggcggtaaccgactacttcaccaaatgggtaaaagcagaagcctacgcacaagtcagggatcgagaagtcaaaagctttatttggaagaacgtcatatgcagattcggtgtgccaaaagaaatagtgactgacaacgactcacaattcataagcctagactttcaaaacttttgtaataaatggggaatacaactctcattctcaacacctagatatcggtaatcgaatggacaagcagaattaacaaacaagacagtggtggcatctttaaagaaaagactagacaaggccaaaggaagatgggcagacaaactcccaggggtgttatgggcatacaggacgacgacaaagacttccactggggaaacacctttctccataacttatgggacagaagcagtcattctcgcggaggcagggctcccaaccacaagatttgaacacacaacagaggctgaaaactggcagaatatggctcacacgcttgatacattagatgaacaaagagaacaagcattgataagggtcgcagcgtatcaacataaagtagcgcaacattttaacaagaacatcagagttcgtgagtacaacgttgaaggttgggttctaaggaaagtttaccaaaatacgagagaagcaggagctagaaaattaggtccgacatgggaaggaccttacaagatctcaaggatagtcggacaaggagcctacaaactccaagcatcagatggatgtgataagcaacagttggaacgctgttcacctaagacagtatcatttctaaactttcaaatttagtttaaatttaagctttaatttctatcatattcttttcaccttactagcttaagcatcagagggtcgacggt

SEQ ID NO: 63038 - DNA, 988 bp, Cannabis sativa
ccaatctatcagtcattttgattgatatgtttcgtgtgctgtcactaatgagttttttcatcttacttgtttttatggctcgccggttgattcacttaaaccgcacacttggaaaattttgaataggattggtagagataaccctcgaggcacatggcttatcattggggatttcaatgctttccttttttctcacgacaaaaaaggaggtaaccctgataggggcccctcttccgatttcaggcagctgttggacgcttttaatctttccccgcttgaaccgaagggtcctctgcttacttggaacaacaatgtgtcctctcctaaaaatatccaagagcggttagattgggggatcattaataactcttggactgatactttcccggatgccattcttacccatttgagtttctttggttctgaccatcgggctttggaactagtcacttccacgcccctgggcaataagtcgaataataataacaaacgttttcactttgagaatgtttggttaaaagatcctaattggccccaaatcttcgaacagtcctggactagttccacgattcaccaagaggctatccctaatcttgttgcaacccacactacgtgtgctggaagccttaactcttggaatcacaaaaaggatttcaatttcaaaaagcacattagtaagctcgagaaggacctagagaccgctcgttcccccaccctttgggatgatcaagctattgcaaaaatcaaagatctccaatccaatctggatgcccttctgtacaaagaagaaacttattggaaacagggagctcgcacccaatggttggcccagggggacaaaaacacgaaattcttccatcgcttcgcttcccacagaaagaaaatcaacaaaattcagaagcttctcttggtaaacggaggcactatctctgatgaggaggatatcattcatgaaattgagtctcattttggcctactcttcacctct

SEQ ID NO: 63039 - DNA, 1360 bp, Cannabis sativa
  modified_base (1306)..(1326): a, c, t, g, unknown or other
acaatgccaaaaatggaattaacatatggtaatattgtagtagtaatgactgacacggtaatgttgtttgggccttaagtaatgttgttggtgattccacaaatgtcgtgatctagtacttggtaatgggaccttgcggccattgctggcacaattctattgtaagtcatctatatctatgtaatgtgagaaattatataggcatcttgtatttataattgataaattcctcttatttatatttatttgtagtattttgttgtaatgtttagaaacttatgtaaattatataaattgttaaattatgtaatgattgatcataagaaaattaattaatgttgtttttttaactttatgtgaagtatttatttattaatattaaaccattaaatataattaaaatacatatatatatattaaaataaataatattacaaaatcagattttgaaaaagaaaatacgtaggacttttaattctaatttttatgaagaaaggggattaaaactaatattttatccctttgtttatatgaaaaatggaattaaaagttaaaaatacaaatgaaaaaaataggagaaagcttttaatctcaatttttacaagaaaatcagggtaaaagggtggatttaatcctgggtttcttatataataagtgggattaaaagctaccattttatcctaatttttgtaagaggcttttatccaattagcgaaaattgggaaaaactactcataaaaatcaggataaaattttatttttgtagtaataaatatatgtatatagagttagtagaattaatttatacacattatttttaataaaaatacaatggattagaattttagtccttggtttgaaattgaaatgcatgttgaataattgaagagagtttgatcttttaaaataaattgccattagtctaagatctttagtcaattataaaactataaatgaaattttttctttattttttagttttattctttcattacttgaggacaaacaataatttaagtttgaggatgtgtcaccgagatagatccatacttaatttcggcattttaaaatttatggcgggccttgagttgaccactgagttagagcaaaagaaaatttacatgtggcacctaattttgcatttaatttacaaaaataaccttaagagtgtaattatgtttttgtaccgtgggtcttacatttttacagtttatatgatgatttcatgaattaaacttattttgctgctagtgtgatttatttatttgctgtcataaatgagaatgtttattattattattattannnnnnnnnnnnnnnnnnnnnttattattattattttagttgataataatttttg

SEQ ID NO: 63040 - DNA, 843 bp, Cannabis sativa
ataattttgctcactgcaaatcctattctgcatgctagaactaaacatttgaacttgatctctactttgttagagagaaagttcagaatagaattgtccaagtgaaatacataccaactgaagaccaaatagcagatggcattacaaaggccatttcaagccaaagattttattctttcagagagaaacttaaaattgagaatgcctcaattctaagtttgagggggactattgagatagttaagagttagttggtagtggtttgtatgtctgttaaagtttgttagtgaatttcttccaactgatttagccagctagctatcttccttctttcttgtttcatctttgtataaataagacgatactatttctgtatcaattaatgaagaattcattttcttcttcttctctctttcttaatcttttctctgcctttcttttctttgattcttgattttgttcatcaatggctagaagatttaatagatgataagcccattaactataaatcactaataacacggcaaataactatcaaagcaactcaagtttttataaaaccaataaaaatgataatgtatgcccaaataaaaaatctaatattcaatgcatagagtaatttcaaattcaaggctagcaagctttatcaaagtgagcaagtgagttgtgtcaaggttatttaatgcatgtagattcaatacgcctaagcatagattcattatgtggcaagtagtgaatgaatatttacttattagagataaaattttgacttgccatatctaattgaatttggctttttgccatatttgtgagcaaatagtaattctcacttattcttttatt

SEQ ID NO: 63041 - DNA, 741 bp, Cannabis sativa
  modified_base (30)..(66): a, c, t, g, unknown or other
acattaaatattatttctgatctttattannnnnnnnnnnnnnnnnnnnnnnnnnnnnnnnnnnnnagggcataaaacccaacagaatgaacatgttacaacaacttctattgttgtgtcttctgagcgatagatgaaattaaatataagtgttcttaaggttaactgtgatgttgtaatcttttttatccgatttaattttaatttttttgtcaaataatctagaaattaggcagctaattatttgactcatttttctaattatataatcatggtcgtgtcttcaacgaaagagatatctcgattggactgtagtgtattattttagttgattgctattaataaaatcgttgatttaatcaatatatatataaaataaattatataaatatgagaaaaaataataaaaatattaatggggtttctacaaaaatactgaatttttaacataagtttataattttacttctacacgatttttttttacaaaaatactctttttataaaagaaccgtaaaacaataaaacaaaacaattaaaaacaacagtggaacaattaaaaaataatagtggaacaacagtgaaaacttaatacagtataaaaaaatatacagtatttttgaaaaaaaatttgctccactatgaaaaaagaaaaaaaaatagaaaatttcagtatgtgtaaaaatcccagtattaattgatgagatgtaaaattttgaggtaatatgttttttttaagaa

SEQ ID NO: 63042 - DNA, 782 bp, Cannabis sativa
accccatgacttcggttgctatcctctctgtcatggatccatacaaccaacccatgagaagttggtcatgaactatcaactgctcaaattttgggttaacatcgagtccaaatcctggctgtccatctgcaccagcaggtgcatgaatgaactctgttggccgtggcttggttcctttgagatatccatcgagccgatgtcctctgacaatggcagtcaccattgttttccacagggagaagttattcctgtcaagcttgagggcaaatggttgattaagtgtacttccaaattgtggaacaatcacgctggaagttgtgttctcagagactgttgaagactgattagcaccattgctaccagctggagctgaacgattttggggtgtgcttggtgttgatctattgccagtcgacatcttgccagagctagctctgataccaagtaagaaattatagacaaagggatttgattgaatattcagctcagtgagcttttgccttcattcattcattaaatagtgttacaaagatgattctagaaatattacacctcaccaaacgtaataacagaaagggaaatattcgtacaaaaggtaataacagaaagatatggaaaatcagagattaatggttgagaaataatgagcagtcagatattgaattcaggaccacaatgacagatggcagaggaatgtatagcaagggctgatgcatattttcatttcttaacaaaaactagaaaatataattaggtacatatacaattaatatataacatat

SEQ ID NO: 63043 - DNA, 1107 bp, Cannabis sativa
atatatatattttgtgtattaatttagtattattatattttctttggggtatataattttattactatgttatattaattttcagtgatacgatatatcaaaattttgctatatatttttttttttttttgcagcaatatgaataacttcattgaaaaataaattataatgtcatacaaccttaagtatcatgaatccccaccaaaataaggaatattatcaaacaatacaagttctctatccacccgacaagcatgtcgagctaatttatttgcagccttattggtcgttcaacataatgaattagggacactctagaaaaactggacatcaaacgtgctaatatcgctaccaaagaaccaagttcaatgaggaaagaagagcggttagaaaatgcataaaaaaccgctaaacaaactgctagactaactgtttcagccacataaagtaaatcaatccaatgctatcataagtgcttcacaatcttcttgaagaaccgaaaagaaacctacaaaagaaaatcaatgaaacatcatcaacattagtgaatgaccaataactaaatacaaataactttgtatatgaaaaataaataattacttaataaaagaattataaattattaataagcattattgaataataaaaattatagagtaataactatagtcgttatatgagaaaagaggaaatttatcttctcaaatgcacttgatattataagcagatcttgaacactacttcaaataattaataacttcaataacttaataattaacaattttaataaccaaaaaataaaacaatataataacttaaaataaaaccttaaatatgttatatatctatttatttttgctacgatatattaatatgtaatactaaaaaaattatataacttaatttaattattatatatatttttgaaatttttacacaaaaaatacaaaatgcaatctttattacataaatacccccacacgcttgttcttacttttttactcttcaaatttttttatttacacttataccacttgtacacacattacatgcagcacaagtgttgcttacatatcaggtgatagacttgacccctatcaatcactc

SEQ ID NO: 63044 - DNA, 814 bp, Cannabis sativa
aaaaaatgaattaattaaaactttagaaaattccttaaagtatagcttaaattctttctcaaagtattattggattcaaggattcccttggttacaatttttttttactaaaataccactatactagtttgttacaaaatattgttatacactcaaaataatactaaagatagatcctgacaattgagcacagaggacggcgaggttgatctgtacattcgatgggagacctctgactcaaggttgaaccactttcccttttcccttatatgcaccacaaatgtaatgactgcatgattaaaatatagattagtaaggcaattagcattaattctttttattttatgattttatatggatatatatgttgtgggcccatttttagaagatgagcattagagttataatctttcaattctgataattttattaaactctaagtgtattatttttgctatgtatgaaatttatgattttaatgacttttgctcgataacgatagaaaatgcgttggatggccattagtgtgacatgggtgagtttagaacctttagttaggggaacaatcatatgttagattttgtatattgggattaggtagggttctgatattggactattttacccctaagccattttgttatttaagtactaaagtaaggttaattttgactttttattttagtgataagtggattattacactaagcctatagctggcaatttttggcgataagataagcctaatgttgatattcattcatcaaaaattaattaagtaatttaacataccataagacaaaaatcaaaaaca

SEQ ID NO: 63045 - DNA, 2095 bp, Cannabis sativa
  modified_base (2051)..(2069): a, c, t, g, unknown or other
tcttctccgaatgagtttccttggcgagtcttctgccactagtggtggtgggcgtggggatttccatcgatttatttgagcatttttttgagagaaaactgtggagatggctaaaagtaagaagaagaatggaagaagaaaaaaaattaatattttattttttatttaatttttatatatgtaaaagtactacctaaaactcacacacaaaaattatttcacgtgttaatatttcatttaatcaataactccacggagtctttttaagatgtcttataataaaaaattcttataatatgaccacaatttttaatgatcaatgaccacaatttttgtttcaattcactccaactatatatatactgataatatctatataattaatttaccaaaagaaaatatttatataattaataaggttgaggagagaaaacacgtagtacgtaccaattaacttaacaaagttgatcttcactaaacctaatggtgattgattatagtgtgacttcaataatgacgattgattatagtagcatggtgtgattttatcaaaaacaaaatgcaatttttttcttaaaaaaaaaaacaaaagatggattttcttttatttttttccttatccttttggggattttctctattcattattggtggaaccagtaccaatatttataagaaaatatgtgacaataagtttgtttaattatatatattaagcccaaagggctaagatagacattgaggttgagccaagaacaagtgcaatgaaagaagcctttttcaaccatgaaacagaagtcatcattttgttgtggaagaaatcaagagctatgagatcaacaagagccatgtatattagtattcccgaagagaaagagcctaacaaaccctccataatcaaggcgtttgtgctactgtcatcgtaccccgtcgctgagaacaatatcattcctaatactattcccattggcgtcgtcactgcaaacataaaacacatatatgctgttgttccgaagctaaaccttgcctgcgtaattaacaaactgattaccagttattacctatattttcttcaaagcatataataaacacaaaaatacatattatatgacaatatatacactgatcaattatgtgttcacgcatgcatatatatatttataattatatatattagctaaaattttaatcaatagtttttaatattattattaaattaaaacactttaaggtgttgaacagtgtaatagattatttaagtatcttactagtgatcaacggtatgatatataacaattctatgtagttttaggtatcatactgatattcattatcaactttttttttattaaaatatgtgagattaattaatataaaattatattgtacaaataaatttcatgtaatgagtgtatacccataacaatatatctattaatctatagatgtacgttgattttttttagggcgagtacgttgatttaatatacgtacttggtagtaaatatataaataattattaatttagtcaattaataattatttactatacttataactaggttggcttttatctcaatacaataaaataaataaataaataagtgggcttaatcgtttggcaatagcaggtatttttaaacaagtcgtattattattagagtactcaaatgctctaaagtagagaatctatttgaagaactaaactaaaaacgtgttatgacaaatgttttaaattttttcttattttaaaactcttataaaatttactatttaccttctacatttataaaatattattcattattctaaatatattttattaattgttttagagtttagttttaatttatacgagaatattatgtttgaaatgaataaaatatattagaattattttaaaaaaaataaaattttagttatatatttgaaaaaggctaactaaaatttttatcccaaactttaacctataccaaatcatgcctcctgaacttttaagatagtcaaaaatgctacatgaactattgagattgttggatataaggattttnnnnnnnnnnnnnnnnnnnaaacgtctaacatagatgaaagttca

SEQ ID NO: 63046 - DNA, 1026 bp, Cannabis sativa
cctatgtattttaaatattaattgaaagaactactttctaataaagagaaatattaaagggtatttatggtgtctagtattttggattcatgtgaggtgtaatattgttattcgtgtaatttaatatcgaatttcatttattttaatttaataaaaattataaaaaattactaaccaattatatgacattatcttttaatggtgctaggcactttggtacccataaaagtgcttttttaaaaagtaaaatgactaaaaacctaaatagactgctacaatagtaaacatcacccgtctctctaagaatactaaaattattgagacttagagtaggctgtgtgatttcaaataataactgtgtaaattaccatgtttttcagttttagtcaattctttttcaaagtgttccaaaccactctcacttgattttgaactatttatacactttataaatgaataaatcaagtctccaacaactatatttttaatagtttaatcatccattcacattcataaacaattagtaatatcttttactaatttaagagtgacaatgtggagaggaaagttacacaatttatgatcatcatttctcaagaatttataactccttttttataattattatcaacacatttgtaactcacagtttgacaaaattaataatttgtgacacttaattatttataacaatttttttatattatcagtatatatattagtaaattgttataagtatgacaagtacaattagttttaactataaatctagctaagattatacttgttagcaaaaaaaataaaaataaaaaaactatgttgacaaatactcaatagataattgtcgatctattcttcacgtatcatgtcaacagggacggacccactttgattgatgtgggggctatagcccccactaacaaaaatactgcattttaaaaaaaaaattaaatgcaatttttttattatttcgtaattatagattaaaatagtagaaaaaactccccacaaaattaaataaatcta

SEQ ID NO: 63047 - DNA, 1026 bp, Cannabis sativa
acggtgaacccatcccaaacccattgacggcgccccctgctatcgacggtggacccaatctcaaaccgactgtgacgccccttgctctcgacacaatgtctaaagtgtgtcccttttatttattatttttttttttttgtgagaaagtgttaaagattgatttagtttgtgaaacctaaattttgttagatttacaaaaattttgttgtctgatctgtgggggaaatcgcgatttggacctgtgattttcgtcgggctcaatgcaggtccgatgatcatgctaatgggttggggaaggtgaagacccgatgggtccgatggggtttgatgcttgtgttggaaattaaatatctcattgggtccgatggggcccgatggtgttgagtgttttttcaaaaaaaaattgtgttgggtccgatggttccgatggtgggtccgatggggcccgatgcctatgtgttgttctctttcttttttttttttgtgttgggtccgatgggcccgatggtgggagcggtcggctgcgtggatggtgggggtggtcaggtgtgggcggtcgggtgtgggcggcttgcgtggatgggtgtgggcggtctccgtttgtgtccggtgtgcgtgcggttgagggtatgcgagacagagagagaaagagagaaagagaggggaaagagagaggggagtcagatttgaatgagggggtaatgtgggaattaagtaaatgttgtcccatcttaccaatataagatattttaggtttaaggaaaaaaattccccttaatgtaaggataaaaaatcaaatttcccttttggaattacattatccctgcaaacatactttaaagaaatctgttttaactcaaacttggagagaaaaatacatactttgattctttcaaaaatagcactgatatttggcccttcaatgcctaataacacatagaatttaatctataacttctataaaaatgataatagttttgggctttccactaagtaaattacacaattagcttttactagatatta

SEQ ID NO: 63048 - DNA, 1182 bp, Cannabis sativa
  modified_base (44)..(49): a, c, t, g, unknown or other
  modified_base (698)..(700): a, c, t, g, unknown or other
  modified_base (802)..(803): a, c, t, g, unknown or other
tgattagcaacgagctgctcagtatgtttgaaaatcacgtaatnnnnnnatgctagttagggtgttacatacggtggtaacccaagggagtggaggccggactggaagagagagatggagattgaactctatcggcaccaagagaagagggaggcaagactttgaagatgagagaataagaaggggtagaacgctagggtgaaacttaggataaaacttttaacgttataatcgtaaaattattgtcaaatttttgacaattaggccattttgctaaatatttcaaaaagaagacatttgctaacttaattttgagatttatggtcattttacatctcattcattatatttttcatataaaaatttcttaaaaatatctttttcttctttttttttttttttttgaaaattaatccaaatatgtagaaatattttgttatttttaaatggatttaaaattatgatgtttttttttaatttttaattcttttaaaagaaaatatgatgtaaaaatatgcctactgtacattgaaccatttattttattttacttttgttttgttttctattttgttattttttccttttatgatattaaataattaagtcacacttaatcacaatcaaacccttaagaacatctccaattgtaacatcctttaaagatgttaaaaatttacacatcatctaaaaatatnnnattttattttatctctcttccatattttttttggctctcttacttctaaaaatactcaaatgtgtaacactctttaaaaatactataattatgatctcacannttattatttaatatatatcttaatttttaactacaataattttttaattttaattttttattcaaaaaaataaatagcatcaatactacaacatagcatctacgtaaatttttagaataacatttttttctcttcaatagtataacaactcaatattttaccatataatatatctacttcactacacatcctcaaaatttttaccattaaaaatgttctacgtaaaaatgagagataaaagctagtgtaggacctgaaagtgctggacacacaaatccacgggcacatatgaatatgtacaattataatacaagaatatggtcaaattaattaaaatatatataagattgacgttaattgttttataaaaaaaaaaaaa

SEQ ID NO: 63049 - DNA, 2362 bp, Cannabis sativa
gttcgacctcacttgcgtgagctactacttgactgcgtatacttgcgtagtgatcataattttcgtggcatatacccttgaaaaactcaactaactcgcgtccaattgactcccgatcattaatccacacattgttactattcagaatgctttcaatggcatttcgtcttcctctaatagcagcagaaaggaagaagaacttagaacatttatcacaattcttaatccaatcgattctcgctctttgcttgcaataaatcgccttcctagtcaaagattcgttcaacatccgccgaatatcacattcctcgttccagtcctggattccagctggtaaattctggattctatcaagcttctgttccagatctttgattgtccaatctaatttaccatattgagatctattccactgtagaagagccacacgagtagctccaattttcttgaaaacactagcaggggcccaaggatgttcaaccgtcttccacgcgttggccacaatcagtttactcctctcatctctcgtccatccctcttcaaatctgaagcatctcttaaatttcgggagagtccccccagtatcaagacataatggcctatggtccgaattgctcgtgtgagatgagcaaagaacagctttgggaaacaattggagccagtgtatggggttgaataatgataaaaatacattttagaacttttgtctatgaaaaaacttaattcattcaatacaaaattaaagacgttatttttaaattatagcctcattttcgatcatctctttagataattatgtagagtaaaaatcactttatggttatctcgtaaggtaatttggaaattatatatatttaatggggaagccaaattaagatgctaattattggtagttaatttgtgtatatatataatattaattgagagattatttatttatttttcttttaggtttgtcttattatttttttatacggtcaaaaatagttttaaaagttttgttataattttgtatgagttcacaagttttgttataatttttcatacggtcaaaactggtttcacaaagtttgaaattgatttttacactgatattttatttttagatttttattgtgcattgtgtattgttttaattatatttgtgagtatatttttgtgtgtgttttttttttcttttttcatttggccgactaataaaattggtttctattattatttatgttttgttatgatttttttataggatcgaaactagtttcatagggtttatcagtttgaaaatagtctcacaggattcacagattttgagaattttgtaatggggttttaatttacttgctttacataattagtttttgttgttatatttttaattagttgtttgatataactggttactcatttcagtagtttaatttaattttcttaagaatttttatatggtatgtcttagtattttttttgtttataatttatatttttgttttttaagtttgtcatatatattttatttaatttttataagagggaaactagttttacaatttttgttaggattttgtataagttcacaagtttttttttttatgattttacaggttttgttatgatttttcatagagtcaaaactggtttcacagggttaacaagttcgaaacttgtggttttacatgttttgcgggttctgtaatgggttgttctattttattatgttattgtatatcttttattttaattttatttttattattttgtttctaggttttaaactagttattatattttatttttagattattgatgtgtattgtgtatttcttttattatattgatgatcagtattttttattttttgtatttgttcgtgtattttttttttctcatttggttacagataaaactggtttcagttaacttcattgtttatcatttatgtattattatgatttttatagggtcgaaactggtttcacagtttcaatttatcttttgattgttttaggttgtattggtaactaatttgcctgtttagttattatttttgttgttttatgtaattgactctaacattctagtttttaattcgactgattaaaataattggtttcttagttattgttttaactaattgattattgtaactggttttagcgtgccaaatttcaatgtctaacaccaatgacaattctaatgtctaactccgatgacttttcggtaatgaagacaactctgacgacttttttagaagttttttcaacgataataataacttcggcaaatattctcattctattttctactcttttgccagctaatattttattttagtggatatataatgattgttttgggtagtgta

SEQ ID NO: 63050 - DNA, 554 bp, Cannabis sativa
aatctaatccaatactttgaggtaatttcatgcttttcatattcacaattataaactcactaatagtaacaactactaattagtaattttttgtgtaaagtctattgaaggtgtgaataagattaaagatggttataatccagcaacttggatgttggaggttacttcttcagcacaagaaacagctttgggaattgattttgctcatattttcaagacttcagatctattcaggttagtgtaattgcttaatctcaacttacatttgtaaaagagtaaaatatgttaagaaaaaatgaatacatttcagaaggaacagagagcttatagatgatcttagcgttcctaatcccggctcaaaggatctccatttctcaactcaatacgcgacaacatttcccacacaatgcattgcttgtttatggaaacaacgatggtcttattggcgaaacgcgccttacacttgtgtgagattttttttcacattgtttgtggcattgatgtttggaacattgttttgggacctaggtggtaaaaggtaactctatatcgaa

SEQ ID NO: 63051 - DNA, 687 bp, Cannabis sativa
taaaaaattagaaaacaaaaatgttaccaaacggcaccttaatatatattgtttctttgaaaggagagaaggaactataaatggaagaagaaaataatgtgttagtttgaagaaaaaaaaaagaacaacgaaaagatacgcaaacagcaaattgacataccacctaattattaattcttcctcgtgtgcactacacgtgcacttgatatatgtacttttttgttttttgaaatggcttgaaatatgtacttgactacattctttacataaatgctaatttattatccattaaattctgataccattttaattgaatcataattctgtcctattttaaataacgcggcaccattaatattatctatttctttccagaacacttttcttaacttaaggaaaattgttgcaaaagttcttaaaattttaaagtcgatacaaattagtctccaatcttaaaaattggtagtaataattctataagtttgttggtctctcttctaattaacatatccgttaaactcaaataaaatattacgtgtcaattttttattagttcaaattatatttttaatttaaaatgacaaaaaaaatactaaacaattttttttttcttttatctttttcttcttcttatcgctgcctacaccaccccaaaaagctaatccaaaacccagcaccaactctgac

SEQ ID NO: 63052 - DNA, 618 bp, Cannabis sativa
cgaaaagatggagactctgtctggccatttttgttttgtattccttagttcttcattcgaaattgtttgtgcaccttgtttttacgtttaatgatttgtatgtagttgtattattaagaacattatattctttgtatctctttttaagtgtatgttagtcatgaattgcccaatgataataccgttactcatagtttagttaaatatacacttcaaatagaaaatgaaatttatcaatgagcttggtcaattataaagaaaacacattgtcatatattaattaaagtagatttaaaatttatagaattccatcaattcgatgtcctaattctattttctttctcctcaaaattatgtgtaaagataaagtgactagttatgaagtttgcatatactttatttcattcgcactaatttttatataaaaataaatgtttataattatattattttattcaataccatttgacttttaacaagtttcccaaataaatatgattggttgaacttttatacataccacataaatgtgtatcattgttgtgacactcaaattacacaataatcaaattaagcagagacgagaaaacaatcaataaagaacctcatatttccatt

SEQ ID NO: 63053 - DNA, 2775 bp, Cannabis sativa
ataattttcttaattcaatttctttttaagtactctactcgaacacaaactctcatactaaacaccccattaattaaggtcgacgtacctgatacttgtccttgtaaagcctagccgaggctgcatgagcgagaagttggtggtgcgtgaccaaatatggctcggtgccagaattcccagccgtacaattcatgtgttgccattcggaacaccttcctggtggaaacattcctgttgcataaccagccacactataagctattggctcattgaatgtgatccaatgcttaactctgtcaccaaattccttaaaacatagctctgtatactccttgaaatggtgcctttaaataacattaaaaaaaatgcaattaggtacatgtgaagccaattaaatcaagtatataaatatgttgtttcatattatcaactatatgtacttacactatgttagggcttaagaaacccccatattcatcttctaaggcttggggaagatcccagtggaagagtgtcacaaatggttttaagcctgcattgaattaaatatatatgtatatatattgatattaaattaatatatatgatgttggcaaaaataatttcttactagctaccatctatgttaataattctgttaaattaattggcctaaaattgtactatataaagagaaatatgaaaaccttttttaaccatgcacattagtaacttgagtactaaaaaaattgctaaaaagtatcctctaatattataagaatatgtgaaaatagtttattgggctaagagagatcagacctatatttaaggcctacttagctgcaattttttttgagctttttgggctaaatggaccttaggcacaggcctgacctatcttaacccgaatgggttcatataatatatgagcccaaaaacaattccttttatatatataatttttttttggataattttcaaaaatataacatatctttaagcacaagggtggtgttggacaccttggtagaagaaaaaaaattatacttgaagttcatggtatgtttgtatatataccattggctaggagttcattaattaggttgttgtagtatttgattccttccttgttcactcccccacttagctttccacctattattaattggtacatataatcaattacacaataattaatacaagaaatatatataaacaatatcaaattttaattttctaattcatgcacatatttatataatgttaattataatgtcaaactataacttacttggtagcaatcttggccatgagatagagaatctataagcatccaatcccatttccttcataattttcacatcctcctatacataacacgaaaaaacttaattaataaaatgaatttcccatttacttatgcataaattttaattaattatatatataaatataaatattgaatttcatgatcaataatatatatgtgtgtaagtgtaacgtaccttatagcgatgatatgcatcaacagccacatcgccattgctaccgtcctttatcttatctgcataatatatataaattatacaaatataaaacatgtatatatgcatgcatgcatgataatattgaaatatatttagatatataaaacatgagaattcataaaaatatatattgcaaatatatattagactattaaaaaggaagtaaattaagagatgattatgtatctaataattaaatacctggatgtttgtgtgtgtaagtatcccatatacttggtcccttgccaccttcttgggcaccaccttcgtactaattattaattaattaaaacaaaattaaatcaataaaatgtgtttgattaatatattatattaaagttaattgttaattattacctgataagctgaggaagatgtcccaaagagaaaaccagttggaaaacttgaacgattgagtgaacaagtgttatattgagtaggaatattattaatggttgatattgatgatttaattacaccaattaacaacaccattaccatccacaaatgccctaattcccctctcatcaccaccatcatcactatgtacgtctatactcgtatatatgatcttaattagataattaagatattattaacacataataatattaacgtaaaatgttttatgtatttatacgtacaaagcaggccggtatatatattcatggtcaacttaattgatatgatacctaaaaatataatattatatgtttgtataaagcatcttttctctacttattgcacttaaatattatgcactaatattttagtgtatcatttcattactcataatttatattaaacatgaaaacaataagtatgattcatgcacaaaaagttagaagacataaattcagccggctactatataggctatagcattatagcatatatatatagagagagaattgttaaggagcatttggtgaaaaaatcgtaaaaagtgttaaattgatattgatacaatttaatattgaattttatatattttgatttaataaatactataaaaaatcgttaattattcacaatgcatcacattagtatgatattggacagtttagaacatcttcaataggggtaagcatctctaatgaaaggtaacacacagagttggctctaagttaaaatgggtcatagttaagaaaaaaaatgagtctttactataaaaataaatgatatttttaaaaattattaaaaaaatatgtatattttttaaaagttattttttttatttgggccccta

SEQ ID NO: 63054 - DNA, 2180 bp, Cannabis sativa
  modified_base (1172)..(1174): a, c, t, g, unknown or other
aaatgcacgattataatgaagaagttgcaataatcagatcacttacgtcatgcatcatgatttttgtaccttagttatgattgagatatctctctagtctttgtctagatacttggactggactacgtgaactttgggatacagaaagaaatgccttttttagcatctaataaacaatattacacagatttacctctttttgtgattttacttactaaattaaccctctgaattgaaactatgtagagcatctacaaaggagtgctattaaattttatttttatttatttatttactaactaggaaacaaagagtattatacggtagtattttgtttagtgatcagtaaattataaaattatatcaaatttcaaattttaatacttttaatataattttatataattttttttaataataagagtaattattttactaatttttttaataaaaaatctcttattagaaaaagaaagcaaacaaagagatatctttaaatgttataataataataaaaaaaatattagagattgatgaattttcatacaaaatagagatttaaaaacacaattgatagatttataaaaaattcatcatataatttcaaaattattgtcatcattgtatttcatttatagtcgttgttacattcaaagctgatgttatcactgtagtgtagtcattgttgtatctcactttatttgtcactatcttttctaactatttactttttatatatgaatcagtctcttataaatttattacttgcgcaagtgttttaacatgatgaattactcaatagatctcgattctcaaagtagcttccaagcatagcatctctcgattttacacattaaaacaaaactaaataaagtctcgataaattgcactattggtgctttgatagtggcattatatgaatcatccttgataacaatattaagaattcttgatatacaaacaagaatttataataacaaatatatgatttttaacaaattggtgatatacatgataaataaattaaagtaagaagactcctaacaacttttctactttattctttaaaatatattactaaaacttcattttatttattttatctcaaattttcatattatatcatacatcaatttctctattttttctatatatcatttaaatattatatnnntaatatattttatttattttatattaataattcatataatattacacacatatatagaaaagttaaagaaaataatattaaaatatgtttagctcaatgaatagttatttttacatttaactaagcactattcattaaacaaaaaaatatgtcaaatagttaaggtttacctcacttgatggaagctcaatattgtaattttttccctataatttaaagattgagctattttagctcatctattgggagtgttctaaaaaaaagaaagatggcgtataaatctaacattaggtgataaaaaagtagggtttcgcctactctattatctaaccaaaattaaatacatgacatgattaatatgacaggattaatatttttacgtggcaaaagataatataagtaataaatagttttaaaggatcatttctctattagttttaaaataaagacatttacctatatagtgctctaatttaggattatttattataattttatgtagcaaaagacaatataaataataaataatattttttttacatgataagtaataaataatgttaaaaagtcatttctctacaagttttaaaataaattttaaaataagaacatttacctatatagtgttatataagaagaaattacactttatacttacttttatttcttagtttaatttttaccattagtttattactttttaatttatacttaattttatagctcatattcttattatgtgtattaaggactttaattttaattagttatgtaatattatatctattcggtataaaatgtgtctatataacagaattcttaatttatgagaaattattgtgtgactttttttttaaataaaaaaataacaaattagtaaatgttgacacataaagtgtcagcatttatataaatttgttcatattatttatttttttattaaaaattattttcaaattttgatatttagaattagttaaattttaaatattattttaaattaaat

SEQ ID NO: 63055 - DNA, 1302 bp, Cannabis sativa
  modified_base (494)..(497): a, c, t, g, unknown or other
ttttttcggtatggagaaattttttttagtcaatagtatttacgttgcagttatttaagacatattttaaaaaaattagcatacaaaaataagattcaaacagtttgttgcacgcgtgattcttttattttatatgcgtgtgaaatagatagattgaaccttgttttcaatgtgttaattaaatttttttgaattttttaaaattttacagaatgtgatagttataacatagatcataaaaaaaatttgactaaattttttttctgaatgctgaaacgaatagaggtgcatcaatgcacatttttaaaaggatttatggtagaatttttcataaatatatttgaagaaaaagtagtttacgacataaatacctaaatttaatttttggcggtaagaatacttaagttatatttctagaacttcgtaggtgtacctcgtcgttaaatgtcaaattattatccacgtgtcattttattattggtatatttaaactnnnnttttttaaaaaaaaaaaacgtggactaatcagtcattgccacgtggcaatatttacttcacttaacagtcaggtacttataaaagttttcactacaaaaaatgtcacttttaccagcgcatttcgcaaactgcactagcaaaaaggtcaaagtcttaccagcgcacatttgcagtggctaaaatctaacttttactagcgcatttacgccctgggaaaagttatttttgccagcgcttttcattttgtgctagcaaaagttctaataccaacgttgatttgttaatcccttttgccaacacatcagaagtaaattctattttaccagcgtaattagtgtttaatgttgttatgaatatcaaacttttgacatcacaaatgtgctggtaaaagtgatatttcttgtagtgtttcaaaatataacttaagtattattaccgtcaaaaattaaacttaagtatttatttgtaactagacgttaaatttagatatttataccataaattactgaaactatctaaaatatatttatatatactcacatttggtttttaatgatgaaataagttatgtataaattgtacaatttttgaaataattgttcaattattatatatttaaacatataatgtgtttttaattaactaaatttcaagtaattatctatatacgttaaaaaaagttgtaattatatattaaattgacttatttatatttgtataaatactttttgtatttgtataaatgaataaaaagtgaatattataaaatataaataaaaaaacctttaaattttattataaaaa

SEQ ID NO: 63056 - DNA, 582 bp, Cannabis sativa
acaacaagtattgtgactaaaaatacaattaatcacaataaattgttatttttgcaacaaatacttttattcacgaacctttagtcacaacgtaagaatgatgatttataattagtcacaattattttacttttagtcacaaattttgttgtaaataaaagtaagattttttgtaatatcatatcatattgatagttatcaaaactgtgtcttatttcgtagagaataaaaacacattaaattcttgattatcaattactatctttccatatttagcaagatatgatcttttggccgagatctttatgagttaattattcttggttgtaatgttcccacttcaagcttccattgggcctacacaacgaatttatggctcttatacacgagtgcgtcactctggctgcttcctagactgataatcggtcctacagatcaacacgagtatctctagtgtgctttgtcctcactcaagccaaatacgcttaacagtggagttcttttgtgatgagctatccaaaaataagatgcaccttgttcatataggtagtactgtgacagtcagtagtcccgggatccgta

SEQ ID NO: 63057 - DNA, 1087 bp, Cannabis sativa
  modified_base (387)..(391): a, c, t, g, unknown or other
gtcccatttggtttaggcaccaacaccggattggccaaccattctgggtaatacacatcccggatcatgccactagctagtagcttgtccacctctttctatagagcttccgcctttactggattgagggggcgtcacttctcctgaactggtggcatatctgggttaacatttaggacgtgggttattacatgaggacgtatgccggtcatgtctccttggcaccacgcaaaaacatctgtggctgcccttagtgctttaattattttttctttttcctccggttctaggcttttttccagccagaggatcttggtagggtcgaggtcgcatactggcacttcctcgacgtcttccataggttctacaattttttcggatcctacnnnnngatccaactcatcttcttttgccacttctagctcgataccttcacggaccatcaatactggtaagtgggccgcgacattgtaacattgcctggcctcaccttgattgcccctcacggtccctactccaccctcttgagtagggaattccagacacaagtgccggatagaggtaactgcgccaaagtctactaaggctggtcggacgaggattacgttgtaagcagttgggcagtctaccaccacgaatgtgcagtacttaaaagtactctagggtgagttcgggcacaaggtaaccgacaacctcacttttcccatcgcgatgagcgtggttccgttgaatcccgtaagcttgaaatcgcttggtgacaaatctcggtctgtgaggcctatagccgtgaaggcttccttaaataacaagttcacggaactcccattttcgatcagtattttagccacgatcttattggcgatgggagtctctatgaccagggggtcatggtgaggtaaacgcaccatctttgcatcttcttccgtgaaagtaattggttgatccatgagtcggggcctttgagctggaagctgagtgacttcccacacatcatcatgtttaacggccccagcatagcgctttaattcctttcgagtggtccctccaatatggggcccaccagagatcatggccactcttccgttgg

SEQ ID NO: 63058 - DNA, 2872 bp, Cannabis sativa
  modified_base (165)..(171): a, c, t, g, unknown or other
gttagggtgttacactctctctctctgtcacgcccaccacttctcctctcttcacttgagattttccatctttgattcctatattgtaatcttaagagagttatctcagatcccacctatagcgatctaaatagttttctctcttggtatcaatacaactaaaannnnnnnaggtcattacccgctaactaaaggacataacctctataaaatattgtgttcttttactttcttgtttttattgtgtaacacatggtaagcatcaacattaatatgactccactatcggtagcccaaatttgaggtcatcaatcttttaaaataatgatttttattttaagacattttatctccattgttggtcttacatggttattgtttttcaatgggacctggaggcgctagatttcgtcctccaaccattgaacattagcaacgtaagatctcaaaagataagtattttgtaattttttttctagtagactcatccctacgatgactacttagaattgaatttacaaatatgaaacaatagtagaagctcataaaataagaataagcttgactctcgcctaccgggacaacattggattcttattttgattgaatagaaattgctaaaatgacatctattttggatgagctgacaattctattcaactaatgatatctttgactcttgcctagtgggacactcatatcatctagttgaaaaccttagaaaatatttaatatatgtttattttgtatttttctcatatcttcattacttgctaaatgtttaaaaatttccaaagatgtgtatgaatttttattaaacctaagattgacttctatctattgataattgtagtttccacaaaggactttaaacaatccaattgtgacactattatttgacaacaagctctctagagctaacttcatcaagtggaaagagaacattaatattactctcacaggtgaaaactctttgtttgtgctaactgaagaagagcctgagtaaccacgtgagaatgcaaacaagatagtaagagatagatatgagcattggcagaatcctaacaacaaagctcgtttctttatactttctagcatggttgataccttgaaaacaaggtttgctaacactctcatggctgttgagatcatgaatcagctaactcaaatttttggaaaggcataggatcaagctcattttgatgcaataaagaacttcatcaatgcacggatgaaaccaaatcaaaatgtccgtgatcacctactctagatggctagttatttctaagaagctgagatctatggagctattatagatcaagaaactcaagtgagtttgattctcaatagtttatctctagcttttctaccctttacttcaaactatgttatgaacaagttaacttttgactttcacaagctgataataaccttcagacatttgagagtttgattcaaggcctgtagaaaggaggtaaaaaagctcctaattctcctaatactactaatggtatgaccaaagttgagacaaatattgcttctacttcaaaaaccaacaagaaaaagaagtggaccaacaacaaaaacaagcctcttaaacctgttgacatagctaataagggtaaaaggctgctaattcaaaagcgaagggaaaggaaaatgcttcttttgcaatgaaaaggaccactggacaccctaatgtcctatgtttttggcaaagaatcaaggtatttctaatttaattgttgagaattcatgtattttagagaattattatccctttaggttattaattctagacctactaaccatgtatatgttcttcttattttagatccagctgcttaaacttggattataatcttagagagttcaaatgaatagttggacaaaaaggtggaaaatgtccaagatagaagacaaagctcaaaactttaaatttcattaattgttttattttttagacaatttaattacaatttagtttgaaaattctatttcctttttcaagtcattaaaaacaattattatgacattttttagagaattaatttaatttttttctcttttaaaaggatttcattatgagttacttttatagaattgtgatttatattatctaacatatacacctacgccaataccaaaattatttatcttattattatgtgttttatatttattgtagatacaacatctacggtatacatcttgttaatattttttaacaagataatctctacaaagaggtaataccacataaacacttgaaccataaaaatagtgtatatgcataattgtcaatccttaagcaattataatgattttttttaataacagaccttgcgatctgggtggaaaagtaattgatatatgcattttaaagatcttttataatagactctagattatattcaaaacaccacagaatatctataacacacatattttgattagacatagctataacattctactcaaatccctcaaatattaaaatactttttctgagtagattaagggtggacaatttcatgactaccaaactagcaaaatatatttttgctcttgatcctgtatatattccattatctcctacaatagtaatagataccactaaagtccctggacatagaatcacaataccttattattgacggtgagaactcgtcaacaaccttttggccaaaaaatcaacttatgcttcaaattcagaaatgagatagaaattaagatgaaatataaactcaaaattctctcttaaaatggagaaattctattgattttgatatggttttacaagtatgattttccaaccccctctcacatctgagagaggggtatttccatcttattttaaattaatcaatta

SEQ ID NO: 63059 - DNA, 702 bp, Cannabis sativa
tcccatttttcctagaattaatagcaagaacaacttcttgggcaataagaatattgtcaaaaattactctaccagaaacaaaagtactttgaaaaggagagataattttatccaaaacaacctttaacgattagctaaaaccttagaaataaccttataaaaagtagaacaaaggctaattggcctaaaatccttaagagtgtgggcatgttgcttcttagtgataagagaaatgagagtagtatttacaacagaaaagtcaacccccttattaagacaagaaaggacagccttagcaaagtcaaccccaaaagttgaccaattcttttggtaaaaataagcattcaacccgtcaagaccaggggccttatccccagaaagattaaaaagggctctcctaacttctttaatagaaaagggctcatccaaaaaagcagaatccaaatcctccaaaggaggacccaagcaatcaaggataaggctggtagcatcagcatcactaccattagaactaaataaatcagagaaataagaaactgccaaatttcccataacagtgtgactagagacaatattctcatgatcatccttaagaaacttgatagtgttattcctcttacgctgaaaagcaaagcgatggaaaaatttagtatttttatcaccagccctaagccactgagttcgagccctctgcctccaata

SEQ ID NO: 63060 - DNA, 1188 bp, Cannabis sativa
  modified_base (1148)..(1163): a, c, t, g, unknown or other
actttttcacagaggcgaaacaacattggtggcttcgtggctcaagggtattgggcttcagaactcgacgagaccacccacagcctccatttttgcctacggtgagcggagtagcactgtcatgcattgcaaagagagaacaggaaaaagagttggttaatttcatcatttattaatatatgtaatagtgagattaaaagttgtaggtcagtgttaccaagagaaagattaagactagaaggagttgttaagactgtgaaagagagagagagagaggtcgagagatggtttgatgcggctgctgtgaggctgagagacggtaaagaatgactgtcgctggccattgatgatcctggtgatgcgattgttgtgagggtgagagacgagagagcccataacttgggcaatagggtggagagggagcaacaaggttcatggggttcgccgtcggtctggtgaaaggttggatggtgaagggttggtctggtgaagggttgccgtcggtttggtggagcgcagagagattgttttttcttttttttgaaaggacgcagagagagagattgttgaaagagggaaaaggttgagtttggggctttagggtttcataatgtccattttatacttcaattaatttatttacttttttttttgaaaaaaaaaatagatttgatttatttacttaaataaaaaaattaaagaaattaataaattaaaaagtatttttattaacatatagtgacgcgcgaggcatgactgaatacacatgtcccaacccgtttagcgcgtcactatatcataatattaaatttatttaaaaataattaaatataagactatgatatagtgacacgctatgtaagtcgggacacacttttgcagtcccttatggcatgactctatatgtcaatatttttttaaaaaaaaaatcataaagtaatgagtattactctttagtgacccttcatatttttagtgacacacattataagagactaacaccgaatgtttagagtctcattatgcatgtcactaaaaatcactcctagctctttagtgacatgcacttttacgtgggtcactaaaaagtgtcactaaaaggccaaattgtagtagtgtttggagagactgttggaaatattttaccnnnnnnnnnnnnnnnnaccaagtatgttttattaacatcct

SEQ ID NO: 63061 - DNA, 954 bp, Cannabis sativa
  modified_base (762)..(766): a, c, t, g, unknown or other
tttttttttacatttatatgggctttttcatgtaaaacaaagtggaaatcctatatttgtaaaacaataataagtttcgccagaaaaagcaccgacgatgaaaagtcactggtgccagaaaaagtcacagtgccagaaaaatcaccgtcatcgaaaaaggcactgtcgccggaaaagtaactgaaaaagtcacaagaattaaatgtctcaaatataactaaaaatagaactggttataacataatgaataaaaacaataataactcaaaacagttataattaaaataaaactagttctgtaatatattgaataaaaacaaataactcaaattagttataattaaaatagaaccggttctgttataatgaataaaaataaataacacgaaataactcaaaccagttataattaaaatagaaccggttatataacataatgaatgtgtattttgagggtaaataaatatggtatgtgtgtaattatttagtgggttggagcatgttgaatagatatttttgtttgagttattttatttaactggtttttgtgtgtgaatttttatcttagttgttttacgaaaccagtttttttgtctctcaaattttaaactagttgataaatatagtcggtttctttatattatatttgagttattgtgtgttattctttgtgtgtatttattttgctatggaaccgattcttttcatatttatgtctcaatattttttggaattgattcccatttttttttaaaaaaaaannnnntataatcggttttatgaggtattttgttgtggaactagttttatttttaatttttgtttcagcattttaggaattgatttcatctttgttttttaattgtaatcagattgagttattacgtgttacttgtttgtattcattatgttatataacagttctattttagttataactggtttgagttattt

SEQ ID NO: 63062 - DNA, 1728 bp, Cannabis sativa
  modified_base (269)..(270): a, c, t, g, unknown or other
acccaaaattttatatttgtaagctgcataaatttaatgtttatttttaacggcataagtatctaatgtttgtaaatctataacttttctctaattttgtcagtacatgcagactctgttattttcttaaatatgacacatatatgcccaaattttagatcattgagtctagttagaaatatgtagtaccagttacttccaaatgtttttttaataaattcaaaaacacagtctgtattgacgaaactggaaaaaaattacagttttannaacattgggtacttatgccgctaacaataaatcttgagtttatgtcccttataaacttaaaactttagatatttataccgttatttatccatatctatataatagttctttggggagaaaaggtttacctagagatcatttgtctaagtatactataaaggcagacctgattcatatatatacaatataaaatcacattaataataatgatttgactaaaaaaagtggtctatagtatctaccatgcatgcactcactattgttcagctaaaaatcagtacttctaccaattaataattaggatatttatacgtgtgtacgtgtgaacttgaaaattgatcaatcagctaccaaaatcataaataataatttataatattaatattaatttatttgaaaatataatttattttatatggttgactgagtgagattcatgaattgactttctttacttcttaagttcttatatatatgtgtaatgtaagtaaacaaggtttgatatttatacatataactataagatagacaggaattaggatatcgaagatgaagctattattatggttggctttacgattgttgtgtgttattcttattataattattctctttcaaaatccctcctttgctgcccgccattgtaatacgtatgtttctttttataattaattatgtaaatgtttttattattaattagttaattacttttgctaatattattaatttatgggttgaatttactaatatttattgttgttaataattaattacaggttgtccaacggtgctaaggactgtaccccaaaacattcacctccatcgccagcacaaggtgtgggtgtcaatccttaattaattatatttaacaacatcagatattatatgatgacattcttagtgataacttaccttaatcaagcatattaattattgataatggttggtttagattttaatttaatttttaattatataatgtagtaatcaagtgtaagtctttatttaatatatcgatccatatatatattctgtggaatattctattgaacaaactaaattccctcaatgtataagttgacctttaatttcatggtttggtgtttgtataatatatctaagattattaagtggcatatagcatgcatggactcataatgttcacttattttggacccatatattattctctactctaatttccaacttagatgtgttacacatttatatgtataaactgaaacgcatatgatcatgtataaaatacgaaattaatcaaacatatatgcactatgaataaggatcgaaatatctctagtcattgattttttgagcttttcaatcccacacaaactttgatctaaaaagaaaactgattgatgtgggtaatcgggcttccaagctctctctactctttttagatggatttattgtgtttcacagaatgagtagtgagct

SEQ ID NO: 63063 - DNA, 716 bp, Cannabis sativa
gccaaaagagatgagctcctggccactcttgtctgcgagcacagcactaaatgctttgatgacgacatcttcatggcctggcagaccaacggccaaaatatcaagctcgacttttatcctaaacctgaggaagtccttccttgttctgggagaaaaagaagaggcttgacgccttgcttgaggagcgtagtgggccttgtcttctgcctcgaattgactaagccgttccaccatccatgactacgattgttatctctctcttttttttttttatttacagtctttttcccctatttcagacaattttaattattatctttaaggggagacaattttaaggcctgtccccaagcgcttaatgtttttttaggacctgttattgggcaggacatcttttcacttaaatatataattttttttgaattttgcctaactttctggtctgctttacatttgtccatgtagtataccttacctactaccccttgagtggcataaaaaatgtttttaaggcactcagctttatcattaattcggaggttacatatactttttggtacaaatttactttacagaacataaagtttacattttctggctattgataatactttcgtaggcgatcagcgttccaggccctaggcaccatggttccgtccattctctttagcttgtaggtcccggagccgatctcatcctcgatttcatatggtcct

SEQ ID NO: 63064 - DNA, 1324 bp, Cannabis sativa
gtaaggcattagctgatcagccatgagttgtaggagctgaacgaagaatgtacatgctcgagccatatcaaaccatgcgggttaagggtctactagtgttgaacttttgaaattctattttgccgcttaggtcggctagaaggaaaagacttgtaataaagtttgtaaatatttttgggatcccaactatttaaaagtttaaatttattacaatttttattttcattctgtttaatataaaagttttaattctgcgctattttgattaataatcccgattaggggattagggtttcataaataaattgggtagcgtgcctatttttttagggctttacactaagtgttctaacaataaacatgtctcatcttcatctctttatacgtagcaaagttgatgcctcactttgtatcacagaatagtttctcgtcaacacatgaggcaatagtttgtatatccttatcttgcttaagactttgcagtcagcgagttttaaatatattctattagctccgcatttaatgagttattccattttaatatcctttaatataattgccattatattcgttgattcatattctcccaggttgacacgtgtcctcctctgaagtgacagccaaatttctcttcggagatgtctccttcttggatagagacttagcgagtttgggactttgtcgcctctgtggattgcgtcttctagggcttcatcctctagaatttcttctttcaagaacgcaattgtggcacaggtgactcgcacttttccttccctctctctaactcagccaaagaattctcaattcttttatgtggttcggccattgcgaagaattctaccaatgactaaggccactaagcttgtagttccttccagaagtcgattcttggcaaaacccctgtaatcaacatgcaaaccaacgaagactcgggggccttcttgagtttggttattttagcgttaaaacgtttaaaataatcatgtaaagactcactgacttcctatttaatgtttgccaatgttgtgtacggcggtttgtacatcatcgtggcttggaaatgcatcaagaacaaatccacgaacgtctcccaagttgatatagaagcctcgggcaattggctgaaccaatcatgaacgttctcctccagagttgtcgcgagtatacgacactattctagttgtggtacctagtctacttccataattatattaaattcatctaactaaccaatgaggttagtagtacctttgtatttaagagattcggatagcctgaagccctttaggagtcgagtttgtcgcacttcttcagtaaaagg

SEQ ID NO: 63065 - DNA, 617 bp, Cannabis sativa
atgtcatttttgcaaccgagtcagtagaagaaatcttattttgtcatgtatgattttatagttgatttggctagaactatttcaggaaaatacagttgtttattggagcaaaatgacaacattgataggcttgagaagaagacacatcgccttggatgtgtcaaggaactttattttaagatagctagcggtcattttggagatccatgtgtgcgagcctttttacagacactgaaattagaaaattgtcaccaacttgaagctctgcccaatgatacgcatcttctcattaatttgagacatcttattatcagtggctatagcctagttgagatgccatgtcaaataagaaaatgacgaatctccaaacattgacagcttttgttgtggggaagaatagtggcgctaaaatagaagaattggcagaacttcattgtctacatggagagctttccattgagaagttacaaaatgtggttaatattacaaatgcactgaatcaagtaaatgtactggagaagaatcaacttaagaaattgaggttgaaatggagtgttgatgatgttgttgttgatccaaaacatggagagggcgtgcttgaaatgctttcacctaac

SEQ ID NO: 63066 - DNA, 2094 bp, Cannabis sativa
ctcacaataagcaacatgaatggtttcaacagtagtatgtggaaaactagaagaacatcgaaagccaacgcattgagaaagaacagcagagaggtaacctatcttattggattagagaagcttatcgctcgaatttcaaaaatacttcccatagaggtatttttgagttggtgagagagacaacccgacgaccagatggtcacgtgggaactagtgtctaaggcaaaaccctgaatgcttagaacatcactactacacttggtaacctaataggccctaggcagacaccaggagtggagacctcccagagagaaagtaccttcaattaagaggcatattggacttatgctcgagggtggcaaccaatggaccaggccttgagaccctacaaggggaaagggacctgctattcaacctaaaagaagtagtaggagacactactttgaaatcaaaagctacaaaatctggcaagtaaggaccaatgagccacttcatactcgaaagtacttttgagataaaagatgggagttgtgactttacttcgccagtggccccaatggccaacattatgattacttccctctagtacatggagaggaattaaacttgagcgaccaattcaattctctttgcacttgtgatcctactgaagactactttgagggaagtagccactacaatagtctggttgaacaatctcagagtaggtaatcccgagatgatcttaagttcattctgggggcttttccagagtccccttcatgacctcgtggtcaagagacaactatacgacccaggtcaaccggagtacaagaatgacctagaagacaaagaaacctacgtgatcacttaaacaataaaagaaaagtggatgtgggaacttctatagaagaccctatccgtgtaatagaagatccatctaggatgcagaccaccattcacagggtcaatcggctagagtttggaaccttagcttctttagtgaaggggatcacgacacctaagttttctaaattcgagctcaatagagatgatgctcaccactctccgaatgaatcaaagctcttcccattcctccaaaattcaagaaccctttttggcatcaatacacaaggaaaaaagatccactatctcacatccactagtttgaagtgcggaccgatctacaaggtgtgaaagatgacgtcaggtgtagaattttccatgctacactaacaggcctagcacaatggtggtaccttaagctatcccttggatagatcgactcatggaaagatatagtggatgtttttggtaaccagtttgctccttcccgaaaatgccaaatcgagcccaatgatttgttgggtgttaagcaatagaaaaatgagcccgacaaggactacatacaacggttcttagaggtagctactaagaccaaaactcttaccgaggatgcaagggttgtggcactcataattgggatcaaggagatgagtcctctattgtccaactttcgtcttaaggcggtgtacaccatgaatgacttcttagatagagtagatggcttcatcaaacttaaaaaagttgtcacccgagctaagggctcaaagggtgggaagaagaagttgccagacactgaagcccctactattgaggcgcaaggtaatgggaaaaaatggaggttcgaaaggagtaaagagagccaaaaatggtggcaagcaaggtaactcccccaaaggaaagaagcctaaaactagggagaagcccttaagagattatgagcctcacttcaccacctactcaattctcttagctctaagagatgagatatatacacacacttagtcaacagtgtcgtattgcaaacctcttcgtttcaaagagtcagagataagagaattgatacaaattttatcattaccacaacacttatagtcatgatacaaatgagagtaatagttgttggacgagatataatttctcatcaaatagaaacatgttgctctttagcggtatgtacgacctaaagctctagctagggggaatgctccactccagcctgcacctattaccagtaggttagagattgtgattggaggcgctcccttatct

SEQ ID NO: 63067 - DNA, 611 bp, Cannabis sativa
  modified_base (27)..(48): a, c, t, g, unknown or other
acttttttataacaaattagaggttannnnnnnnnnnnnnnnnnnnnnatagaggttctactgtaattagaattttttaaccgtgaattttgatatttactgtcatatttttaaattttgaagaccattaaattttttttaaaattattgattttgttagattaaatactttaatctaattttagtaagaaaattcatatttgacacatgtcaaaattcgagaaattagatattaaaattcagaaaatataatttaataaataaattattatcgaattagtaaaattaaataaaaaattttaattcaacaatagtacatattaaaattcagtgaacaaaactttaaattaataaaaaaaaattatactaaaaacttaaaatacttacaatcttaaagtaatacatatttatctaataataaaaaaaatctacgttatatattatttggtttaggtggagagaggggattgtggggtctagtgatgatcgactttttgtctgtgatttttgtgcaaagcttgcctttttggactctttgggggtcttttctcttcttattcatattttatcatcaccatgtgagtagtgacccttccttttcatttttattt

SEQ ID NO: 63068 - DNA, 827 bp, Cannabis sativa
gttgtcttttcaggtgtgttctgataggttggcacggtatagtcacaaccgggtatttcgggccaaaccgggttcgggcccaaaatacaaattggattgtttatttggcattattgtttattggtgataatctaaattttatttggaatttattatgcataaatgtcatttttgcccttgtatgcatgcctaagtgtaggttatttggccctaagggcatttttgtaatttggcctttatgtgaatattgagttatgaaatggaatttggggaaatgataaagaaatttctggtgtattctccctcaaacccgaccctctcgccctttttcactctcttgacctttttttcaacttgatttggtgagaaataagcttgaattgaagcttgattgttgagaaaattttgttggaagcttgaagcttgattgtgcaaggaattgaggtagtatttacagttattaattttgaattccttgttaaaattttttatgaaaagagcatgttaatgtgttggtgttcttgagcttgcatgttttgtgatttggggttggttttggtgattttgaatatgagagtgctggttgttgttatgttctatgctattgagcttggattatgattataaggtattttctagcttggaataatgtgttcttaagaggtttttgctgctggaaaattgtttgatttgttggagatgaagctcttgctcaacagcttgaagttgcttagttaagcatgaaatttgtgttgtttgagcaatttgaaattttgagattattgcaggaaattagtgtttggaacatgaattttaattccctagtg

SEQ ID NO: 63069 - DNA, 681 bp, Cannabis sativa
  modified_base (82)..(95): a, c, t, g, unknown or other
  modified_base (155)..(164): a, c, t, g, unknown or other
gcttaaatttctaacttttttacttttttaatgtgggcagaatttttaaaaaaatattgtgttttttttttttcaaaaatannnnnnnnnnnnnntactgtgtactgtgttaagtttcactgttgttccgcgattattttttagttgttccactnnnnnnnnnnttgttctgttttgttgttttacagtagtttaataaaaagatagtatttttgtaaaaaattctgtataatagtaaaattgtaaacgtttattcaaaatctaatattttttgtaaaattccctgtataataatattggaagcccaattttaattaaaataaatcataatataccttgagttggatgtgttatgaacataattacattttttttgtattttttgtgctagaaattggttcatgtaatgtaagatatactttagtcatatatataaaagatgggcacataaaagattggggaatttttatttttatagtttttaaagtataagtttgtaaaaatatgatttttttctcaaaaaaaaaattattttgtggaaattttttaaaaaataggttaaaataatatagaaaaaatagcataaggtatctagttattctggtttttctatatttttttttaattttttttttccaaattttctataaaataatctttatttttgtaaaaaaaaatata

SEQ ID NO: 63070 - DNA, 1604 bp, Cannabis sativa
  modified_base (246)..(250): a, c, t, g, unknown or other
agcaaaataaaaaataaacatcatataagaataataatatatcatacaacaaaacagaaatatactatcaacaaaatttatataccaacaacccacaactcataagagatttaaaataaaaagtcgacaaaacttttaaataaaaaagattttaacaaaattaatatagatatatcataatttttaaataatttgcttctaattctaaaaaaaatataaaaaaaaaattattgatttttttatgtnnnnnaagacaatataaataataaatagtctgaaaaggtaatttctctacaagttttgaaatggggacatttactaacatagtcttatgatttgaagtcatttgctataattttctcaaatgttatttgcaccccacaaaatgataagtacaccttaatatttgaaaacattaaacttaaaataatttttaaaaatcactcttaatattatttttcatattattttgtgttaattttaatttattttaattttattttcataattttgtttagatcatgtttttttttaatttttttctaataaaatgttgcataaattttttattttaatttttttataatatttgaaatataatttatttttatttgataggtatatttttcaagaatatgaattgaaagaaaaaatttaaaaaaaaaaaaactaacgtaattaaaatatatattttatgtaaaataaaaattattataatggagtgtatttataatttttttgggatgcaaatgaaactcctattttaaaaattatctattttgtatttttaagattatgtttatttggaatggaagttagattttggcaatggtgtttaggggtgttcatctgattcaatccacactattttgctcatagtgcatgcgatgtgcactaaatgcggatttcatattttggatttcttgcctagaatttttcctaaaatatgtggtacttcaagagtaagccatgtggcaatgggaccctttctacgggacgtgtatatcaaaccacctctggagcttggtaattggcaagatttctaagagattagtcacctccaaaaggatccaccagaaggataatagttttgtctcttcttctccgtaagtgaacctaattcagagaagagatagaaggacaagcagagcatggcatgctactcaaagttaaattaccatacgcgcatttaatgcgacatggggaagaacatcctacacattacttggaatagacgtgctcgagggtttaaactcatatttctctgatttcacgatgcctcatacatcatttgacgactgcattatgagctatcaaatcattggcaagagaccagtctagtctcaccaaacacctatattaaccctcgacacatcataaagaatagacaatcatgccctataatcaagtataggaaattgtgcaaagcatggtttatacaagcacaaaaattgaggcctttttgtcaccattatgagcctataaaaccctaacgatatatggaagagggaatttgtttggactctctgtaagaaaatactcactaataaaagtgactcgtggactaaggctcattaatgtcctaaccacgtaaaaattctctt

SEQ ID NO: 63071 - DNA, 1007 bp, Cannabis sativa
  modified_base (960)..(970): a, c, t, g, unknown or other
caaactaaactaacacgatgatgtttggcaagactgacatgactcacaatctaatgaagatatcttactatactggggatagagtttcttaagcagagaaagggatggatggcccaaacaataatgagcctcaaaagcgaaagcaacactcagacaagcaatagaggctagtggaagtggatcaagaacatgcagaccgccagattcatgtcctttaccaataatcttcttcgtcataagatcttgaaacaaacaatggtcgagaaagaatgagattgaacaatttagattacgagtgagttgactaacagaaagcaaattaaaagacaaattaggtaaatgtaagactaatgacaaagtgagcaaaggtgtgggagcaatagtgccaaatccaagattagaagatagtgatccatcagctaaagtaacaatagaagtgggactatgagactgaaaagtgaaaaaatagacttaaattacctgtcatatggtcgatggcaccagaatcattgactcattttgaggatgtggaaagaaggcatgcattagagttacctaaattacctatcgcagtattaaaaggagatgaagacttaagtgattcttgataccacaagaacttggcaaattcatcagtagaaataaggacaaattcatcagatgcatcactagtgcttgcaatattagttgagtgtttttgttgatttttgaactgtaacttcctacagtcaaacttggtgtgacttggtttcttacaatagttgcacatgatgctcctagaatctggtattcgattatcaggtccttgtgaattatttcctttgtatccacttggaatagagttttttcctagtgcaaaattgttacaactcattaaggcgctattagaggagctgaagaggtagattctatgcaaagaatacgagtaaacacatcttgtaaagaggagacagtagaacnnnnnnnnnnntgtgactttgaagagtcaaattcagatgagagtcctg

SEQ ID NO: 63072 - DNA, 1043 bp, Cannabis sativa
tattttctataaataaaataaaaattcgtaaaaatatttaaaatttcataaaaccgtatttttgtatttttttttattattatttttgtgtatttgtgaaataatcccttaattaatattaactattttgtaatgcatgtctaagaaaattgccaagaaaaattgcacatatataattaagctttattagtagctttattagtgtttttgtcatttctattacattgtatttttttttttatcaaaaattatttaattaaggagataatgaacggttctcttaaaaattgatttttttcataatgccaaatatctactctttactcctaaatcttacatgacaaatgagttttctataataacttagagatgtgttaccaaattcggtaggaaagttacaagaataaaaaaaattataactttgaactgtaaaattaattattataatttctatatctaattatgcgattactacactccatttcaacgagtcaattctaattatacaattggttcactaaaaatgtactttacataacaagtttgttaaaaatgtactcttttctttgttacgaccttagattttaaggaaaagttcaagccaaccgttcattatcaatggtgcagataattctgttactgtatctaatggattcttcaaagctcatcgtctcaatgtattcaaacacaaaaaagaactataaatcccacaaaactacaatcagcatatgactttgaagtccgacctaaacaatgagcaacacaatcaatcattaaaccaaaaacacactcgaaaaccatattgagcttcctcaaaaaaccatacgagcttcctcagaaaaaactgctgcatcaacatttagtttgatacctaagtcatcaagtgttattagacaaatgagttttgtagaaactaatataatgtcatgcatgaactctaatatataatcccactgtcacataattaatatggttacaatggtgtgagtttgaccaggaccaacaggcttcatttgctaaaaagaccacctttagaattaatg

SEQ ID NO: 63073 - DNA, 1937 bp, Cannabis sativa
tttttatgttatattagttttcagatcaattatgtttaagtcaattatacttattcatactaataacatttaggatactttcacaattcatttttttttttcaaatgcatccctatctgttttggtatttaaaagtaatttttaatttatttatttttttataattatataagacatcttagaaaatttagagaaattcaaaataatttataatataaaaaatattattcaaataatctatttcacacaaataaaagagtcacgcttgcaacatattcatattttcggcgtattaatttttttttaaatttttcaaaagtttatagaatgtcttaaataattacaatgtatatgactatgaaaaaaattgaactaataagttgtctcggatgccaaaacaggtggcaatttgtgttcgtcggtcatgttggtgttgtgtgagacttaggtttacaaacaaatatcaaacctaacccgactcatttattaatcgtgtcaaaaattaaaacccaaactcaaccgttttttaaatggattgacctgacttatcctgtttgtataaaaaatcatgcttaattttagttaacttatcaattcattaacatgtttataaaaaacttaacatgtttacaatcttattataacatatttatgagcaatttaacatatttatatcttatttaactaaaaaaatatgatttacatattataaatttaaaaacatatactcttatatagattattatggtatcatttttaaattaagcgtatcaaactaaaagtaagagcattgttattaggacatcagtgatgcctagcacattctcaatataccgcgttgtgattggctaacgatactccttaaaagctattatattaaattatatgagactcaatacttagtttgaccaatagccctatttacacataaaagaatagtaaacaccactaataccctttacgttttttctttaaaaaataaattaaccttatcaacttaaaaattacccatattcatttaaaacaaactggtttagaggtatataggtatactcttttttttttaagttaaaaattgtagaattctcctaacatttttaattcattaattttgatgtgaaaaatgacggcgcgaaatacagcttctcatttctgaaaaaaatataataatataatggaaaatgtaaaggcacactaaaattcaacccctttcttagttggaccaatacggtgcgtttcgtcctttctctttccagacgcagacagagaaagagagaagagaagagaagagatcccatttccatatgagatctttccccatttctcctttctctctctaaaatcttataccagaagaaaggtgggcttctcttctctcctcctcattgcgaacaacaagctttttctaacagcttaccacagcatcgcagtttggcgggtttgggttccttcctcttttctcttttctctttgtttttttttttttttgcttacttctttcagtgatttcaaaattagggttttgattttcaatcttttcgtacccaccgataaagatttgttctctgataactagtttttttttcgccaacttctttggaattagggtttttggggtttcgtttgatataaaatttgagatgtatgctgatcgagaggacgctgagaataggaggtcgataaaggaccgtcttaatggtagctttagagatgactctaatcgacgccgtcaattcaccggtaaaaggtagggtttctcttcctctcacttgtttctgtccgagcaaatgacacccaattttgacacaaagcatagagaaacctgtaatattatgattatgttgttgatttacactagatttcgggtcaagttggtctattcgagcaataagacaagagaatgtcgaagtactaatttcccttgaaatgctttgttt

SEQ ID NO: 63074 - DNA, 1043 bp, Cannabis sativa
agtccatatggcttcatagtttaccacatttgcctttaatctcaaatagtttgtctttcaccttgctcattcgaagcctcgtgaaatttaacccataacccaaaaatttcaaacttctgggtttcgacttgatttttgtacatttttgtccttttaatctgttgagtactcctggtcagcatatttgcctgtttattgttcgatatcccggccaaacactcatctcgtgtgttgtcttttttagatgaaccctggtgagttttggggaggcaaacaccgaatggaccaagacttgcttcaacttctgtacgaggatcagccttatcttcgtgccagtccatcatcttcgagtgatggactttctaactcgagctttgaagattgggaggtgagtagtgatcgttctcctactccagtacccgtagtgcaacaccattattaccccgaccaaatcccaggagagtggtacggccgcttcatttgggagttgaagcaaggttggaggcgttatcttccatccaactggacatacattgtctggctaggtgttgttgttacccttcctgttggccgtccaagttcgggtaactttggcatcccaattgttgtccctgcccactattgctcggcatacacatcagtttccgtccaggagaagaatgatggcccgcataaaacaaatgatgcagaaagtcaacgcatatgatcctcacgtggcctagctcgccactctaccatgtgccgagcaagattcgcccaccatggaggagggagatcatgagggggagattgaggtccaggagattgaggagcagtacgatgtccgtcctggcagccctttcgaggctgaggaggaaggagaggctgaacctccaaactttgaagggtataatgaggctggggaaccggtgtctgcggagggtgaagtctcggtcgaaagggaggcctacgtcaccgaggagcttactgaagccgttccccacaagaggcaaagtgccttaggagccagatgggtaagccttccgtccaagattacggaggcg

SEQ ID NO: 63075 - DNA, 679 bp, Cannabis sativa
attccatatttgtaatttttataacctttataacataatattatattttttattgcatcacttatttgatatataattttaactgccaaaaaatattataattattatgaaagaccgaagcgcggattagttccctagttacatatataacaaatcttatcatttaatcatacaaatattctctaatataattaatattaattaatacttaatctaattaactatcagaacctctaaacataattgtatttagcaaatatgaataatatgcatatcccatttaatgcaacaataaaatatcaaaacacaataatatactaaaacataatatacttgtactggatattacaagttgaagctcaaggttggaatggtgaattagtatcggtctaagctagaggaaaagctcgcctcaaggttcagaataaaattttgattttagacaatgttttgtttattcaaaattttagtagaaactttattagtgtttcatgtttacaatcacaaagttatcaattgaatttttcgtgttctaattccactatttctcgtaatggcattcaattatgcattgctcacatggaacaagggttttatgttttaagaccaaatataccaattgcgctcatgaacgaactttttaatgttgctaaagctagaaaccataaaaagcaaaaga

SEQ ID NO: 63076 - DNA, 657 bp, Cannabis sativa
aacacatgatcccctacttgaaattctacacttctacgtttcggatctgcataactcttttgcctgctctaagaggcaagcattctgactttaattttctcaatttcttcattagtccattgcacatattctggacctaggtattttctctcccctgtctcatcctagtgaatgagagatctacattttctgccatataacagttcatagggagccatccctatcgtactttggtagctgtttttgtacaaaaattttgtcaatggtaagtacttactctaggagccctcaaaatccataacacaggctcgtaacatatcttccaggtatctgaatcctcctttcggactgtccatcagtttgaggatggaaagttgtactaaattttagcttggtaaccatagctcgttgtaaactctgccaaaatattgaagtaaactttggatctctatccaaaactatggacttcgacacaccatgcaatcttacaatccctttcgcatacaaatctgcatactgatccactgaaaaggttgttttaactggtagaaagtgagcaaactctgtaaaccagtctaccactacccaaattgaatcaaataaacccgtggttctaggtaatccaaccacaaagtccattgtgatatcttcccactt

SEQ ID NO: 63077 - DNA, 1191 bp, Cannabis sativa
  modified_base (220)..(220): a, c, t, g, unknown or other
  modified_base (341)..(363): a, c, t, g, unknown or other
  modified_base (436)..(443): a, c, t, g, unknown or other
  modified_base (799)..(800): a, c, t, g, unknown or other
  modified_base (1141)..(1145): a, c, t, g, unknown or other
aaactttcaacttaaagcaatatttaaagaatctttcaataaataatttcctagaatctctcaacttaattatgaatttcaaaaatattcaaattcaagttgattcaaaattagctataaataactaattttcaacataaaaaaaatatttaatgaaatattaaataattaagcatcagaataatctacttagtgataattctttatttaattaaatacnagaaaaatacatatagtttatgttgaaaagttttattaaactaagtttatttttcttaaattaatttcaaaatattcaaatgaaaaatcaatttcatatattttgaaattaattatgttgnnnnnnnnnnnnnnnnnnnnnnnctagtttaattaacctagtacagtcattcaaatgaggcacatgggagttcgcaattggggttgttcatgtgannnnnnnntgggttcagtatgtcgtacccaaaggagaggaacttaaccttaaatgaacaactattattaattgaataggcccagatactaattggaactaaataaaatatatcaaaagtgattattttatttagcaacctagtctattttaattacaaacattaaatgggctacctatatgcatctaagcctaaagcaaacatataggctcacacagacacactgatttggatgaatcctatcatgttactaggtttataaacagatgaaagaagattgcataatttacatgttacaaattatttatttgacctattgacaattgaacgattggttaaaatcaaatcattggatctgtcaacannttaaccatggcaatttagatcaaacaataataggttttataaaaatagtttaataattaaacaatatataaaacatacaaacatgtaactagttagatagttggaaataggatttattcaattttaaattaattaattaatttattaatttcgaaaaaaataaataaataatttttttcggaataaataaaaaatttaaatttaaattaaaaaattaatttttaaaattaaacctataaatttaaataattaggtttcaactaaccgtaatatctaattaaaattaaactataaatttaaatttcatgttatttaaaataaaattaaatattcaataaaannnnntgataaataaatatcatttttctaattttacaatttaatttaaata

SEQ ID NO: 63078 - DNA, 563 bp, Cannabis sativa
  modified_base (75)..(79): a, c, t, g, unknown or other
atttatgtgcctactaatacttatcggaactctacatgtcactaatttagaaagggataattacaccacatactnnnnnttttaatttttttacttttatattgtgttggggaatttttttcaaaaatattgtatttttttttcaaaaatattgtgtaagtttcatactgtgtactgtgttaagtattcactgttttttacgattattttttagttgttctcctattatttttagttgttctgttttgttgttttaaattgttttataaaaaaaataatatttttgtaagaaattttatatgacaataaaattgtaaaatttgatccaaaatctaaatttttgtaaaaatacatctagaaatgtagataataatttaggatggtggactattaaagaaatttatttaagtcaagtttcatttaatatctaaattgggctttaattattttcttataaaaaattaatttattaataataattatttattttagttaagatttatataaagtgtaattattttttattttgaatattcttctggtgctgaaatggccaatacata

SEQ ID NO: 63079 - DNA, 820 bp, Cannabis sativa
atgaaaaagataattatttttgttaaatattctttactttctagtaatgtttcttatagaactaattaaatattatattttctaactcataatagtattttcaacatgacagcttaatatttcaattaatttcttgccaccggccaatatatctgaaattaataattgtgttttaaataaatttgagtattgaagaatctaagttatgcaagcttttagtgataagactaattaatttcagatattcaaaatcaaaatcaatcacttatatgttagtgtaaccactaacaaaagaagatattacaaaactttctcttaatacatacataaaacaattgaagaatatataataataataataatcatcattaataaatacatctataatcaaacttgtaataataataatagtcaaatatttaaaatacatctaatcaaactttgtagtaataataagtaatacataatctaaatgatataacccttaacaaccatctccaaggccaatcacaaccattggtaatttttatacctctaaatataataatttttatacgagtattgttatttttttttttttttgaaaatatacgagtattgttattagacactaatagtatttaatatttttttataggtgttgtcttacgattagttactaatattttctaaaaattatttttttacgtattgaatggtatcgtggtaatttacaagaaaaaaaaaacaaacgttgttcttaaaaagctatatgtatgacatgcagtcttgtttttaaaagtaaacaactttacttaaagtaagtgtttttttttttttt

SEQ ID NO: 63080 - DNA, 1053 bp, Cannabis sativa
tttttctttttgggatgagattttgaactcttcttagggtagtgaagttaataatattgtttggtgtcagaatgacaaattcaggtcataataatatgacgggaacttagtttggaaagtgccaaacacaccaaaaagagaaatctcagctcaaaatgagactaatcaaggacaattcattatgaaggcaattgccatattacaaagcagagaaattgtagtggtgcgtgcccttgtaccaaagctttaacagaatgattaacaacctaaattatgaggtttaattatttcttaattaacaccatccctcaagcaaaagagtgaggaagtcacaccgagcttgtgaaccgagaattggaatcgagagtgagaaagttattttttaaaacagtctacaacttggtcatgagagggtatgtatttgagatcatctgcttttgaatcaccttgtctcgaacataatgtatgcccagttctatatgcttagtcctagcacgatagactggatttgtgcattcactcatgttatgacaccacactatgggagtagaaggcaaaggaaacttgatttctttgagcaaagattttatccaagaaatttttgtagtgacatgagcaagagctctgtacttagattgtgcttgatctggaaacaacagattgctttttggaagactatgagatgagtgtatctccaaaatacacacagtatccacctatggatttttcgtcatcagggcagcagatctaatatgcatccgagtagcctacaatgccaagtcaatcacagtgtcagatgtgaattccatgatgtatcgttcctttcaaatatcttaacaccctcttagctggactcatgtgaactgttgttggagctttgaggaattgactcaatttgttcactgcaaaggctatatctggccttatatgagtgagatattgcatagctcttttaatgctcctatagtttgaaggattttcaagcacaatgccattagtaaaagataaaggttttcgtccaaccatagaagtaggataggatttgatattctt

SEQ ID NO: 63081 - DNA, 1091 bp, Cannabis sativa
  modified_base (425)..(425): a, c, t, g, unknown or other
  modified_base (455)..(455): a, c, t, g, unknown or other
ttgtatcactttcaaataacatagaaaaaaatttagcataaaatttaatataggtgcatcgcacatagtttttgcctagtttatataaatacccctataaaaataatatatttttaggctaacttagcccatatgggaaccaaaaaggtagtgggcacgagagagaaaagagaggttgcccaaaataagttgattaatatatatttttaaaaaaattattaataaaaaatactgttatattattttattaaaatatatcttattttatgagtgagttgttcaatataccatcattctttacttaagtctaataggggttgtttggtaaatttttttaaaataattttaaaaagttgagttttaaaaaaccaaaaaacagaaaatatcaaaatgttgtttttaattttcaaaaatatatatttttnaaaaatatatatttttttttttgtctaacntattatattttatatttttgctcacatcttagactcagaacaatacccgaacccagacccggataagttcatctcatgatatgatattaaaatattaatttttatagtaagaaaaaatctaaaaatagttttaaaaaatttgtgctaaacaccattaaatttttaaaatgacaaaaaattattttctattctcacttttaaaaatataattttaaaaattaaaaactaaaaacacaatcaaaggctcgttcacttttgttgacacaacttcaaacttagcctaaacatataggtatcttatctaaccttgacagatccaacttggtggttacgcagagttcaatactatatttgattacatctcagctttcttttttttttttttattaggtgcttaacactatactggtacggtataattaatttataatttttcatataatttattaattaaaatatataaaatctaatattgaaataaatcaatcaaaatagttaagtcagtgatcctaagcattttccattttatagtttagttctttcataatcatctgagtcagctcagccactaggcactatcaataatgaacacagcaaagaaagggaaagccgactcaataataataataataatat

SEQ ID NO: 63082 - DNA, 1213 bp, Cannabis sativa
tagatgaaaaatgcatgctccacgaaagagattagggtacactgtttgagcaacttttttgatgctttgatgtctatcagatttgattactacatctgcaaaaacaattttagtgttaggattttactattaataacatgaccaaaataataattttattcaaaaagtaaaagtaacatggtacaacaaaatttaaataggtgacgttttataagaattagaaacaaaaataagatacatacaatagattacctttacgttctccatatgtttctttgaggtctatgaagaaatattcccaagcttcatcattctttgaatcgccaataccaaacgctaatggaaaaatattgttacttgcatttattgttgatctagtgtaggaatgcattgttgaggttatgaatggtatattgcaggttttggaaaaagcttgctaggtatttgtgaaatctgttaactctgatatgtatttgtgaaatcagttaactttgatatgattgccagaccattgctaactcattgctgtaacaactagagcataccaggaggaaattaaccacccaaatctattttctaaaatctaaaatttccacaactttaatcacttttggcttcttaattttagtttatctagcttaaaatattatttctaaactccagaattaagaataagaatttttcttttgatttggttatgttcttttattttgttttattttaagtttttgagttgttcttagttgatattgcatgcattatttagtataaaagttcccgtggatacgaactttgatacttatcattgtattacttgtttgtgattgtgtacacttgcgcaattataaatcaaaataattttcacaacacgtatcttctaattcttgtttgaatgactctcaataacaaaaattggatttagtagctaagcctagacaataaactgtattatatactagattactttataaatcatattacacatactaaattactttttttcttaaatcgagacatcaatttttgtaagtaaaaaattaaaattgtacttgtaacaaaacaaaatctagatataatgaaattttaatggtaccagggtaattaataaaacttaactgaatttcaaaatatagacattaggttactttgtaaagcattacaaacatactaggttactttttttcttcttcattttttattatttttttttttt

SEQ ID NO: 63083 - DNA, 575 bp, Cannabis sativa
taaaaagtcttttaccgaccaagattcccagacaagttttgccggcgcagtattgcgaaggcaaagctttgccggcgcattgagtgtacttttgccggcgcaaaaatgcgccggcaaaagaaggttttcttctccgccgccacattctcttctccgatcaaatctcgaccgataccgatctccagcaacaaacaaacacaccagcagaaaatgccgctcttgttgacttggttgctctacaagctctatgattagtagtgtatattgttcaatattaaactaaatattaactttgaataaaatcaattagaattataattattattaattctaatacaaatcataatattgttcactcatataataatttaaacaaaggataaaataaaattgcaaatagcatgtttcactttagaaaaaaaaatatgttactgcaattttttattttgagataatgtaggtcagagtaacttaacaaaaatatactttgttttgccaatttaatggatttttttttaataaatgatagtacaatagtagctatattgagctgcagggccggccctgaaacaaag

SEQ ID NO: 63084 - DNA, 1066 bp, Cannabis sativa
tatgtgtacaatgtaaatatactagtagttattgcttgatataactaaatatgtatatatataaatatttataggtaaggtcttctatgattgtgttaaaaatctcaacattaggattttttatccaatctagatatgccacgtcatgttgatgttgcatttaaaatttttgttgccacacatgattattcttatttatttaaaaaacctaattaattttttttttttttaaaaaaaaactagctagtacatttttgaatataaaaaatcacataaaaaaagtaaacatgatttctttttatttaccctgaaattgaccctggtgacatggacataaacgtttgacatgtggcaagaaagaaaacatcctagagttgagtagtcccaagtcataacaatcaacctaccaaggggtccctaaccttacgcccaggttgactctaggaactccaaaatgggtgtttggctactgctaagttgtttttaatttaagatctttcagtattatgtaccaagaagaccagaaaaatccaaattcaaggcttagaagctaaaaatacacgaaacaacaccccataagtcaactcgagtgcctaacacccaaggtgactttccaactaggattttagtttctgaatccgccttagtacaaatggctcaaaatttgtattggcacatgaattatacctctcatgagcatctttgaggcaacgtaattagaatgcgatgactttcagttttgagcacccgaggcaccaggtgccttaggcacccagcgcctaggttcacacattgtcaacctggggcatttgcaaaaataatactgaataattattccaacaattttcttggtcttcatccacaataaggaaacaagtgcttttcggaaagaaacggatcgacttggaggccaaaactgggacccagtgcccaggttgacctaggtgctaggcccataacccaggtccatcaactttatagatgaagtcttccaagcgtattctctatttttatcaactattaagatttgagtgcttttaggaaacaaataatgtcgtctaggggt

SEQ ID NO: 63085 - DNA, 847 bp, Cannabis sativa
ctattattgtaattttctatcattttttaactttgaagccagaatttagcattaatagatatataaattataaccaataaagcgaatatttccaaatcaattcattattcaccccaaaaattattacaatgataaaattgtagaaatttcgttttgaatttattaaaaagaatatttgaaagtagttgatactacatgtttctgtcaagattaaatgatctaaaatctgagccttatatgtatcttgttcaagacaataataaagtttgtaatgacaaaattaaagaaaaattacagttttctattattggataattatgccgctaaaaataaatattaaatttatgtcacttacaaacttgaaaatttaagtacttatgttactatttaccttattattaataactaatgtagtcaacgtctctaaaccttccactgacaatgacaaagagactgaatgtgagaagcaacagaaaaatttggactcttaagttgaaaatgactttctttgtaataattttattcttaaaagttttttcgatgatctttatgattattataactcgaataaatcaacaaacgaaatttgagaaggattgcaaaagcaatatgatactcaagatgttggaactaaaaagtaggggtgttcgcggtacgaatggtgcggtttttgacctttttttttaaaaccaactcgcacatacagtttttctaattttctaaactgcacccgcaccctgaaactaaaaaactgcagaaacccgcatcgcaataaatggtgcggcgcggtgcggtttttgcggtttggactatcaccaaataattaaactattacaaatacaacaaa

SEQ ID NO: 63086 - DNA, 781 bp, Cannabis sativa
ggaatgaactcttccttatatgatacatccctccagccatatattcttaaatatgatatgatcttgtttgtccatttttataacattttatgtctttgaaatatttgtatagtattgagtttgccatatttttataacacttatttagaaaatttatattttatagcaataattatataaaatactaatttttataaaatttttactttttacattcaaagttttatttttatattttcatggtattttattaaaacacaaaaaaataacataaaaacaacaacaaaataacataaaaaataatatatacaaaacaaaaaattaataacaaaataacatgagtacaacataaaaaaaaaacataaaagaccgtattgctaactaatcgcaagacgacatgtctagaagtgctagacattcacttatgcccaatagcaatgttcttattgtatttgtcgggtgggaaaatcctctattatttagagatcatgagctatttttcaactagaaacccaaaagaatgggttagactttcactttcttccaataaactttgggcctttggcccaaataataaggttaggccgacaaatttgttcgggcggatatggatctacttgacccgttacaatctcggcccgacaaccagtaagtacatatcgacctaaccaaaaccctgaaaaaacccctctcaaacacaaaaccataaactgatttttgacggaggtgaaggaagaacttactctctccaatggcggccaaggaccaagataagagtaaa

SEQ ID NO: 63087 - DNA, 1464 bp, Cannabis sativa
taaatttggtatacatttaggttaatttttttttttttttatatttttatggtttataaaaataacaccaaaacaacaataaaactacataaaaataacattcaaataacatcgaaataatttataaagaacaaaaaactaataacaaaataacaagaatataatataaaaatatattaaaatatcgtattttatgtaaataaaattttaaaattataaaaatatttaaaatttcataaaattatgtaataattattctcaaatttgaaatgatttataagagtattaatctttcatattacacacgagtaaaatgagatcagttacatatattattatttattttgcttgagaaataaagtgcatactataccctatccactcactagtgttgcaaaatccaaggatttgattttgtatatacaaacttacaaaccggccaatttcttctgcagcgcctaatatgtacaaattttgttttaatagataattaataatataatttttattataaaaaaatgcaacacatctattaaattaatatggtttatttaattgaaggctatcaaaaataaataaataaaataaaataaaacggtttgtatatttgagcttccttacaaagaaagaaaaggtctactaaagtcctaaaatgtttcatatttataggattgcaattttcaatttttcaaggatgtctttctcatgttaatcttaagtttaaaaaccataatttatagattggttaagcacataatctattgattaaataatatgaaatttcttaagtacactccttcaatagatgttttggtaaaaccctctactttttttcagtattaaaaaaaaaattaaataaaaaattcttctaaattaattttaaataaataaaaaacttatcgaaacactgaggtcacttaccctaaacaatatatatacatttctatgttatatattataatgcatacattttttacaaaaatttgatctacatcaatggatcgattatattaaaaatgatagatacatagaggtgcagaactcatatatatatatatatatatatatatttatataacaacaaatatgccaattaattaggtatgatccataaaagataattgatttggaattatacacacgtacacatattaataatgataagtttacatatatatttttatctgaataaggttacatgtatatacactattgcataatacttgtgtccgaacacgaatcggtgaacccgcaattttattttttaaaaaaagtttcaggtgggttgggttcaacccggtatccttcaggcgggttcgcgggttgagattttaagggtaccgaatttcgggttgaacacgagaatccgcccgccaatccggtatattaatttattatatatatttttatttttttattacaatttttttatatatagataaatattttaaattatgaattaaa

SEQ ID NO: 63088 - DNA, 1174 bp, Cannabis sativa
aagggaaactaagaagaagaggaatgttgattacaattaatgataataaataaaaaatttggacatccacataattattaatatttataagaaatgaatcatttttccattactatgcttatttgtatatatttttttttttgaaatgtgcttatttactatattataagtataaaatgtcaacttttttaagtaaaacttggcagtgaactatgatatgcctattaaaatatgtataatattactacgaataatatttactattgatagaatttaagtatgggaaggatcttacatgttttaaatacatatataaaatcagttattcaattgcaacaatcaatatatgacagtatattgtcttaataattattttttctattctcgtgagtcgtgagctgttgtttattgtcgtttctaatatatgtcgttcgttgaatgcgttgtcgtttttctgctttgaatgataacaaagtaagccgattggctttggagttcatttctgttctgttaaagctctccatgaaatgaaaccatagaaaactcaagacaaagacagccatggaagtcctgcctaactcttctacctctctccttttacccaaacatttattggtcaaacctcttaaaatccatactccactcctaaacccctctaaaaaccttaaattccccaactcactcaataagaacaactcttttaatctttcgtcttcttcttcttcttgctccttttcttcgttcacttcttgcattagtttctcttccagaacagctgcaactacaacatcaacatcaacgacaccttccacttctgccacttcagacaaacgacattggatggtgctcatggaggctcctccagaggaagtcacttcgagaacagaggttctagattactacgtcaaaaccctcgaacgagttttgggcaggtggtttcttctccagtttgtgtcccccttgagtaacttagctcactccagttgtttaattactttgtttttaaagtaggtttggactaaattctgatatattacagtgaagaagatgctcaaatgtgtatatatgatgcttcttgggacacccactttgggttttgctgtgacattgatgaagacatttctcttcagctcgctagtatgtttctaatccttaattttgctttagattactg

SEQ ID NO: 63089 - DNA, 859 bp, Cannabis sativa
  modified_base (263)..(264): a, c, t, g, unknown or other
  modified_base (396)..(398): a, c, t, g, unknown or other
agcagaattaaatgactccttccggtcagatctctaacccttcattactagaaaattgggttttagtgacactccacccgtttcactgaacccttttagtggcacttcaacgcgtgtcactaatgaggctgactagaaaggcagtttttagtgacactccacacgtgtcactgaaacctattgcactcgctttttgcgcgtcactatagggatatagtgtcaggctttgtcagactataaaggtaacagccacacacaaaganngtcactatatcctatttttcttttttattaatatatttagagttatagtgacacaccaaaagtgccactatattaagtatttttttttaaaaaataaaataattaattattttaattcaaattttatatatnnnaaataataatttatattaattttttttgagtaaataatttatattaattatatacaaatacaattaaatataacaataataattttaattgactaaagtaaaatttataaattaaaacattataataattcacatcaacaaaattaataaatattacaaattagttcattatactaataaattcataactataaaattatataataactattggtctattaaaacaaaaaacaactaacatcggtaagtttgaataaccgataacatctcacttgccctattaaaataaaaaacaactaacgttgataagtttgaataaccgataacatctcatttgcccaacgctctttcacttcatcaatgtcttcttctgtatactttgcatcacttaactacaaaatttaaagataaataatatattaattaaatttatcatcatatgcattcttaataataataat

SEQ ID NO: 63090 - DNA, 947 bp, Cannabis sativa
aaatgagacatgaacaaattctattgctatcacaacaattacgttcatgatacaaatgagtgtaatcagttgcgagacaagatagagttcctcatcagacagaaacatgctgctctttagcggtatgtacgacctaaagctccaactggggacaatgcacctctccaacctgccctagttgcaggcaagcttgagattgtgattggaggccctcacctagctgggaatttaagaaaggcctaaaaaatatgcaaggtctttgcgatatgaatcgagagtcgaagtactggaggtggtagagcgtcctccaaagtctcaatgctatgagtgtgctcccattacatttaaaaactccaactcgtatcatgttagctaccctcacaatgatcccttggttattgaggtacaaatatccaacatgatagtggcaagggtgatgatcaatgatggagtgtcctcaaacatatcttattcaagcaaaccctaatctagatgggtttgtcactaaaagacctagagccatgtgagcagctaatgtatggtttcactggagctaggatagctccaagtagtaatatcaaactaccattcacaatcggcactgccctaaagcataccaccatcatgaccatgttcgtagtggtggatgtgaagtctccgtacaacttgatgctcggaaggccatgttagggtttataacctgaaaagcctgttaagacatttgtgattattaaaaagagtggaatattttgatatgtatgtatgaatgttaaaatattaatatttaatattaaataatttatatatataaaaaatttcttattcataaatgaggttgtgacttgtagttatatggagaattaagatcactttgctgtgaatgaaacagtcaacaacaaattaaaatttagaaatctttaattaatggttattagtgcagttcactg

SEQ ID NO: 63091 - DNA, 755 bp, Cannabis sativa
gtccactccataccatatgatatagctttttaatgatctccttctcttctcctccatataatacctttcatttgtacatgtatttttacatatatatattaactatacatatatataatccgggccggtcttgaaatttagtggactatagagaaaaaaattatttttgggcctttatttaaaaaaaatggtatttttcaaaattagcaaaacaaattgtgtaattttaaaaggggaaaaaaatttttgggcccctggactaggtgggccctaggcacaggcctagcccgcctatccccagggccggcactgtatataatcctattatatatataataatcttattatctaatcctacaaatatttaataataaattctactctctaatacaattaaaattaactaatatttaatctaattatcaaaatctctaattaccaaaatataattttacttagcaaataccaataatacgtatatttcatttagtgcaaaataaaatattataacacataataatataccaagtaataatatatttatactagatattacaattcaagaaaattagatgaaaaagaattgacttgagtattaataaactccttagagccagtaatctcgtaaagatctaagtgttaattagagacaagtctctagtcaaggccctaggaatatttgagctatattggtcagtgatgccataatacaagttgctacttgttaattgggcatataatttaagatagggatt

SEQ ID NO: 63092 - DNA, 1135 bp, Cannabis sativa
aaataattatagcaaatttaaaggcttattttttttaaaaaaaaaaaaaaagatgaagctcggtttggtcagtttaaactgaccaaatcgtggattaaaataatcgatttttattacatttatatgatagtcggtaagttttcaaattataaccatgaaaattgaaaattaaattcttgatgttttgtgtgtaagaacccgaccaaatcgactgttgctcacccctagttgcaaatagaacaagtagcatttgtaatgatttttcttctgaccaaaatagtagcaacagggagtgcatcattgtaagtacgccagacaaaaattttgattttttgtggtagctggagtgaccaaaagaacttccacactgatttgccgaagatgagcttgagttgttgtcaatatcttcaagagacgctgcataatgataacccatttgaaccgagtagataccagatgagtggtgatgtcagacaagtgtatcattgtacctaaagaaacctagaggtattgtcaaaatacgatcaacatctagcgaagagaactattggttgaggagcgccacatgccattgtctatcatcagttataaggtttgaaacaactccatccaaagaacccgaatagaagactggttgaaaagtgcagtgtcttgaaatccaaagtcaacaccacatttaactcggcaaccttcgccaattttccatcacaaacctgatgagagcaattctttaccccatgtatcccttgtcatgttaaggaaggggagtgtctaagattagcctcaagggaaagagctaaggggaaagtatcgatatttcaatagcttggcaagatgaaagtcaatttgagtaataagtctccaagcttgttttgcgagcaacgcctgattaaaatgtacaaacgagtgaaaccccataccttttctgtcatttcttttgcacagtaggttccatgaatgccaatggattttagagttattttcatttagaccccaccagaagttagccatcatggattcaagttgattacagaagtaaattggaaagcagactcatagcgtaggtagcaattgattggataacaactttgagaagaactttgtgtccaccggctgagaagattttttcactcca

SEQ ID NO: 63093 - DNA, 1243 bp, Cannabis sativa
agcaggtataattatttatatatatttaatatttatcaagcataattaattatttattataattactaaattgttttggttatatataattaggtggtggaaagaatcagattttgtacacaaatttccatttgcaagagataggattgtggaattatacctttggatattaggagtttattatgaaccccaatattgtttggcaagaaatattttactcaaaatcatagctttggcctcaattgctgatgatatttatgatgcatatggtacacttgaagaacttgagctcctaactcatgcaattgaaaggtttgaatttcaaattactcatatatgatacataaatatattttcttccctctctatatagactaattattaataggataatttatataaaaaaccctaaaattaataaaataatgttttatatttttttacaaaagtaaaaaatctataatatttccccccaaaaaaaattcataaaaattgtaagaaaaaaaactataaatctttaaaaacttatttttttgagtatttatgaaataattaagtatatgtttaatttgtaggtgggatataaactgtgtggatacactcaatcaagaatatatgcaaacattttataaggatgttttgaattgttatgaagagtttgagcaagtgctagaaaaagaagaaacataccgagttcattatgcaaaagcagcggtatccgtcaatattatttgaattaaatattttttttattattttgttaattatatcgttaattggttatttatttaaataataaattaattgaattaacagtttaaggaattagtccgatctcatttggatgaagctcgatgtttgcatagaggactcatcccatgttttttgaagagtacttgaaatttgctttggataattgtggttactacatgttgatactaagctctttggttggaatgaaaactaatattgtaacaaaagaagtttttgagtggctctcgaaagatcgaaagattattagagcatctgttactatttgtaggctaatggatgacatagccgaacacaaggtaattaattgaggattcgtttggtatgccgtattgcaccatattgtattgtatagtattatattaaattatattttatgtaatatttttatgtacaactatatgtggtattaacttttataggtacctaaatatataataaattaaagtttagtattatataaaaatatgat

SEQ ID NO: 63094 - DNA, 1050 bp, Cannabis sativa
aatacttttaggaaaagataaaaattacattaaaatttaataatgttaccttaagattatatattatattattcaaataatagtacattaaaaaatagtaatgatcacaaattaaaaataatgatcaatttttttattggtatctgaataattattttaattatttattacatcaagtttggtaacaatattatttttagatatagagataacacaataaataattgcttatttcatgagagagaatcacaacaagatttttgaataaataaaggtataagtacctaatattttaaatttataagtagcataaatctaataatatttttagcagtataagtactaaattttataaaactgtaattttttttcaatttttttagtacatagaatctgttattatcttaaataagatatatataacacccaaattctaatcgttgaatcgagttggcctgaatttacatctaatttctcatattttttaaaaatttatatggaaaatgaataaatttgaaatttaatttaattttattatttagttatcatcaaataaaatacataattaattttatatatataattaaaaaaaaattaacatccgccgtgaagcgcaggttatttactagtacataaatattccaaaaaaaaaatggcaaaacaataagttagaaaacatggatattgttgaatataagtaagaaaagttaactataaaatttgaagaatattatcaatagtaatgctacaaatactattcaaaaaagaaattctacaaataaatcacatgtatagtgtcacgtactggaagagattaaacaaatattaaatttattttttatttttcttttttctttaacgaaacattaaataattataaaggaattggcaagttattagctgtgagaattaaagaacagagtgaatcgtttattctcatttattgaattgaataagagatacagaatatatatagagcaaagctcttgatacaaagggaaaggaaacaaaattctagtataacaaaataacagaattgatgcaaaggaa

SEQ ID NO: 63095 - DNA, 718 bp, Cannabis sativa
gcactattgcatgggcttggcgcacccctccaatcttagttcaatctttgtttgtagttcattgctttaatcgttatcatggttttaatggaaagcaaacaatgcttcttcaagatgcaaaacacctcaaacaatctttttctagcttcaatttgattcatgttgaaagagattgtattggtactttgttgctatcttggcttttatgcctttcagtgaagataaaaaaagttgtttactatgttcacttgtattttcaggattcaagtgctttttttcttacttttttcatcgttaaaaattcaaacttgaagtattccatgagtcctaatgtgtggttaatcctatatatggtatgagaactttgaatagaaagatatacatgctcaattctttatataattcgattccaagattcccacacacgcagttgagctaggctcgagtggttctctaaaaattttgaatttgacaataaaaataagataaagtaccgtcatgacaataagaataagttgaagtatttatatatttagatatgtcccaatctcttttaatttactctactatattataagtgtcgattagagagaaaatagcacataatagagcttccatcagcttaaaaaattcagaaactcaatgactacaacaacaataataatagcaccaaacaagactcatccaagtttttgcaccactgcatggacttggggca

SEQ ID NO: 63096 - DNA, 564 bp, Cannabis sativa
cctacttatttaggacgttacacatcctgtttcaaacagtgttggaagatgagagttttgttcataatgacccaaaatacttaggaagaatatttgtattcttagactaggatgattgagaagttacttttactcagacttttctagaaagagttggagaatcaacaggtccttgatgctccatgttcagtagttgtacctttttgtcttattttattttgttgtactaaccacttttcttttttaatttgcagacaacatgagttttttggcatccatggcatcctattcgaaaatgaaggttcatgggccaaaggagattgacccttctgtcagggaggttatttgggtatccttgctgctccttctgctcgtacaaagaagaaactttggaaggtgagtagacctactgaagtcgttcctcctacccaagaccctggcaaggagaagtttaaagttggtggagcatatgagggatctcccattgagattatgactgaatattttgatcgggtttgacctggacctgcccgtacccgactcgctcaacctgaaaattttaaa

SEQ ID NO: 63097 - DNA, 650 bp, Cannabis sativa
gagtaacttgtctgttaatgaggtacaacttaaagttttttctgatgctgactggggtgcttgccccgatactagacgttctgtcacaggttattgcatcttttcgggagactctctcatttcttggaaatccaagaaacaaaacacgattttccgttcttctgctcaggccgaataccgcgccatgccaatactacttgcgagatactatggttactcgccttgttgaaagactttggaatctctcatccgcatccagccctcatgtattgcgacaactaagtcgctattcatatttctgaaacccggtctttcatgaacgaacaaaacatgtcgacatttactgtcatatcgttcgtgagcgggttcaaagtggccagttgaagcttcttcatgtcaataccaaacacaacattgcctaccttctcaccaagcctcttttttccatctcattttaaggagttattttccaagatgaatgttacaaacttgtacactccatcttgagggggcaaattaaatattaaataaatattttatgttacttaccaataaaaaaaataaatattttatgtttgggtatagggataaggttattattagttaggtttggtgtgtattctagcgttggatatcctccccctatataa

SEQ ID NO: 63098 - DNA, 1918 bp, Cannabis sativa
  modified_base (674)..(674): a, c, t, g, unknown or other
attaataatgggaatgtgttttttttttttaatgtgatggggtgatgtttgaagaagttatagctttgttgtcaaaatttacaggggcaattttgtctcatgtggcttgcgataagaattctgcagctcatggtttggcaaaacatgctctttaattagacgatgaactcacctggttctcacctggttcgaaaagattccattgccaattgtgatttgctgctttgttaaatatgtgtgacgctattcactacgtcaaaaaaaaaatattatgatgagcttcaagagttcaaacgaattaggggtgtaaatcatccaatcaaattacaacccaccgacccaatctcaatcgatctaacagatcggatattcaatcataattggatcagattaaatgcatgtaaattttaaaaatccaatcagatcaaatcggttgttggatgggacatccgatctaatggataactgagccgaaccgaaccgatccaattaacattcaatggtcatctaattatatttatatctttttaaaatacatttataattttatatatttaatatgttttatttaaaaaaaaatatatgaattgattttattcctattattattatgcacatgcacacatgagattatagaaaaacaaaatagatctaaaatattaattctcatattnctaaacactaataaaattatcaatgcgtattgaataagttttattttttggcagaggttatgagaattaggttagaataaacttatgtttattatgtatgttggtttattagattttaaattatattttttatatatatatttctatttttaataaaataagcttaatggatacaaaaaataagtattcactcaacttatctctaaataattagattgaacttgttaggtccaaatttattaaatatgatccaataaacacttctaaataaaaatacatgtataaatagtcaaagccatacctaaataaaaatttaggttgcaaaagaaaaatatatatataattttatataaatttataatataagaatataagatatttaaataataatttcaacaccttaaaaaaataaataaataaaataaaataatagcttcatcacaatttatatatatatatatatatataaattgttaatacttatttttttttccttttaaattatctattttgattgttgaatattaaataaaaatgtgatatactttacttaaataaataatgttatttaataaaaaaatatttaatttaaaactaatatatataaaaataatatatataaaataattttctgaaatgaaaatacttaaatctaagaacaaaaagcttgtttggtatgtcgtattatattagatcgtattatatattatattgtattgtattaatgttatttaatacattagtatgtttggtattaacttgtattaataagttaggtaaagttataatatattgacaataaactcgataccaacaccgacactgagttgggtcgggtccgagtccgagtcaaaagttgggattgatcccaaatttttcgtaaatattataatataagctaatatagaccatttgttatgtattaaataatacaacttacattatattaaaattttagtcgtaataattagtacaatacatttctttatctaaacatagtattatttattatttaatacaatacgactcttatacgacctaataaacgagcccaaaatatttaagcaaatatattattcatagacaattcttatttagttgtaattcatgggaggaagtccacttagtgttaaagtgtttaagaaaactttcataattaattacttggtgttcaacattgaaaatctatataaatataaaggaaaaaacaaaaggattttagatggcatctttttttttttttt

SEQ ID NO: 63099 - DNA, 608 bp, Cannabis sativa
cttcaagaaactcaagcttagggagctttccatctccttcatagagcgggatgctgcctaggtcaacttcccgcacaattagcccctagtcgttattgcgtagatcaggaaaataacagttgctaggtgcatggtggacaatggagcctcctccaacattctttttagatcaacatatgaaaagatgggacttcaactaaaaaacttaggacctaatcaccaagtaatgtttggattctttcgccaaggcattgcacttattgggtacatccaactacccctgacagttggagagaatccaacaacaagaatgctaatggaataatttgtagtaattgacatgccattgaccgttaatgctatgataggttgacaagccctgtacgacctaaaggtagtaacatccatctaccaccttttcctaaagtttccaacaaggcatggggtatgatgtttgaggggagaccaatagtcttcccatcattgctacaacttggccttgtctaaagccaagaaagaaaagatgcccgccaagagctctgatgaagagccttataaagggcaatgaagtctagccaaaagcggggaggtagacatagatccttact

SEQ ID NO: 63100 - DNA, 768 bp, Cannabis sativa
aataattaaacaaagatatattgtcggtattatgcagacactccatatacaaaataaaaaaatgatagtgatccacattttgaatctctaaaaaatatttttactgactcttacattagcgacccacattgaagggtcactaaaaatctttaaagtctcttatagagggtcattgaaacctagttttgtagtagtgtaacctggcaacaaaagttggcgtcatatcattttgtattagagcattgattctggtgaatattaactacaaaaatgaagacgagaacaaaaatgttggaggcaaaagtcacaggtgtaaaggaacacctgaaatcacatgacacaaacttgacagcaatcacttaacaattaaaaaatttaatgaatggtcaagataaaattttcaatgaacttgctaacatctatgaagcctctgcaacatctcaaacccttggtctgaaattttttgaagagaattcatcaaccctaggaccgactgggttaggtatacatgaaaatgaagttagatgaagatgacaagagttacaaccccaaaaaattgaacttctcgtgtattcaggggatgattcggacaattggacatatagggattatccttgttttataaggtgggaaaacctccaataggtaatcaatacctggttgtaattaaagtgcatgatcattaggcaattttgtccaacacatgagtgaacgatttataatatatttctcaacctctaacaagtttcttcaatctaggaataccta

SEQ ID NO: 63101 - DNA, 860 bp, Cannabis sativa
ataccgaaacaaataaaagtacatcgatcaccctttttaagaagtgcattgtagaatttttttaaaaatatatattacaagaaaattaagtgccaacaatgtccctataatttttttaagggaatgtacctataattgtttagatgcataagagaattttttattctaatttttttcaagagaattttttatttaaatattttttttatgattatgtacgtggtaattatttaaaatattttataaaattttggaagcagcttagaataattagtatttttgatttctaaactttttacacttaaattgtgtacctataatatacggacttgttaataatacctttgaaatataacttcatagtaaggtagttattccgtcacattttatttaattttttgttatgaaataaataaagtcgtagataataattgataaattgatataaattaaatatatatatttttatctttttgacattaataaataatagaataaattacgtttttatataataatttatataacaaaaagatatttaatttatatttatttattaattattatttattgagttagtgattcgtttcatgataaaattaaatagaatataacaaaaagaccatattattataaattttattttgggtaaatatcattttagaccctgtattttgcaaaagttaccaattagactctctgttttgttaaatgataaaataaatcctgtatttttttcaaattgcgcaaataaatccataggaaccgacgccatagggtcgacctttgtatataccctatggcttcgtcttcctccttcacttcactcaaaacccagcaaaaaccagagagaaaacacc

SEQ ID NO: 63102 - DNA, 721 bp, Cannabis sativa
tccattcctctttagttatgacattttatataactttggaatcctatgagaaaactcattaggtcttaaacgaatttcttcctcgacatgtttgcttgtgagtcgcgttttccaatttttaaacatctcgcctgcctttttaattgtcatcttcttggcactataatccaaatcaaaagtgctctacaaagtttcatttaaaatcatattattacagccaattatactaaaaaatattagtgtaagttttttgcaagtttgaaataaattcatattattacatgcataccttcattccatcaaaaatttcttcttttttctcagctgaaacatcatcccaagactttttattgatggatatatttgatcgcactatagcaccaagcttcgaagcatactattttcctcctttaccaatggcttgaccatgtacattgtactcaagttctacagtctttccttcacttcttagtttcgtcaattcactcatcgtggttcgtcctcatgtatttttctcactcccattatccatctcaccattatctatctcatcatcactatctccaaaaagatccatcatacctgtgaaatatgtctaaacatagaaattaaaattaataaacatgtcaaataaaaaatatcacatctatacagaaattataaaacatctcaaataaaagaatataaaaatatgtcaatacaaagaattatcaatatcact

SEQ ID NO: 63103 - DNA, 643 bp, Cannabis sativa
ataagaccaataagggagtggtaagtgagactggaagcataaagctctagcaatgtttagaatatgttgatgttttctttccacaactgagttttgttggggtctttcaacacatgaatggtaatgaataatgcctttagaggcataaaggccttgcatatttaattccttggcattgtccaatctaatggctttgataggttttgagtactgtgtgcatgccatattatagaacataggtattatattatgtacatcagatttatttttaagcatgaatgtccatgtgaatcgggatttgtcatcgacaattgtaagaaagtatttataaccttcaatacttattatgttaaatggtccccaaatatccatgtgaataagatcgaatatgttgtcaacaaagtttttattggatataaagggtaaccttttttgttttgcaagataacaaatatgacacaattaattcttggagttattagaaccaaattcatgctttttattgaaattttgacaaatgtacattaagggatggccaaggcgtttatgccaatggtctccattattggtacaaagtaaagaactagtagaactagctagtggaaatgaattttggagcatgacatagagtttcccaagtctt

SEQ ID NO: 63104 - DNA, 699 bp, Cannabis sativa
aaggtacttcgaatgattttctataaatgtaacccccatagaattagcaagccattgaccgtccacttggctaatcttccttccaacacatagacttgatttgttgaagtttatgcattgaccggacatagcagaataattgtgaagaacttcctttagagctgtcccctcctcggtagtggcctctaaaaatatgagactatcatccgcatagagtaaatgagttaatcttctctccatattcccaaaccgaagcccgtgtatcctattagctcggctagcttcattgagtaaacaagacagcccttcagagcaaatgagaaacaaaaaaggtgaaagaggatctccttggcgcagccctctcttcggaactatatgaccccgagcctccccgtttacaagaattgagaaggtcaccgatttaacacatcccatcactttggcaatccattgttcatcatacccaaggcatttcatcatttcttctagaaaatcccattccacccggtcataggcctttgacatatctagcttaagggccattttcctcccatttccaaaacgccccttttttaagcaatgaagactctaaaaaccaaggatggcattatcttggatttgtctccccttgatgaacgcactttgattctccgaaatcaccttgtccatgcttattttcattctattggccaagcattt

SEQ ID NO: 63105 - DNA, 1094 bp, Cannabis sativa
ttacttcatacacaacatttactccgctacttaatgagaaaccgtcaaaggaagcagtagcgcttagcaacccgatatttactccatacatgttagcactatgtaacgtgtcatatcattgttggtacaatatatgtattggttcttatataattttataaaataacttctatagaatattgatgaccaattgtaaagcgctacctttagatggtgttttttttaactgtaaatttcattcaactagaccaactcgcccttaacaatattagcaacatcaaaagagagattatactctgaaaaatactattagcatataaacaagatgttctagccataagatgagcagtctgattagcagattgtttgacagaatgtaaagaaatatccctaaaagaatatgaaagttgtttacaatcctcaacgacattaccaaaagtagatgacaacacatttaaatttttaagagcttgtaccaatacaagacaatcaaatttgataatactaacacccaaaaaatcacgcttcaaccatgatatcacttccttgagacttgagagtcatggcttcagcaatctatgaaaaaacttgcccaatttgcagtcttgtaatcccagccatgaccccacccttgtgatcccgagcaattccaccaaaactatatcttccctctcgtcaaacagtttagctcaatctgaaagataccaagtataaaacgcagaaaataaacttctttcttcagcttttctctactaatcaagagtgatacgagccaaattgacaacaaatttcacccgaattttcctgcccttccacaagagttaattttgtgtgaaccaaattgcgtaaactaacatcatcgcttgaacactttgttcctcaaccaatcgtgagaataaatgaagaaaccagtccccaaatgaccatgcatcaactggaataatagccaaactcgctacccgccaacaattctgtgcaaaatcataggcaaactaaacagtacaaaattgattcacctgccccatgacaaatcggacacaacaaataaatatccacatgtttagtcttcaacttgtgacagtcaatagtcccgt

SEQ ID NO: 63106 - DNA, 1169 bp, Cannabis sativa
cgtccaaggggtgtcctttgagattcctaattgataatttgacatcacttagcacatttataagttctggtgaagttggtcacatgatctcgaagatgttgctattttgcagaaactatagacttgaaacttctgatttctgagtgagtcaatttgccaaaaaatttgaagttgtgaatttgattgatctgacttcatggatcattgcacatgtgaaaaactagacgtgcggtagaaatagcatcagattgggataagcagaacccagcgaaccaggccatttgttgacctggacactgggccctttaaattaagcattcaagattctattttcgatacttccaaggcttctgaacttgaggacggggtgtcctcccttgtttttaaccatgtcggattcaataattgcatcggatttggcatttgagcaattgaaggtagtgtgccaggttcaaccttggggcctagccccagccctaaggttcaacctgggcactgtgccctatttttagggactcaggtttatggttttctcccctagtttacttgaatcttcgttatttctgatgatggtgaaaatacccgaaacactttttgctaaattgaattggaaatagcccatgttaacaaaatgtcaacttgggcgatcggcccagccccaggtgtcaacttgagcactgcgacccaatttttccccttcgaaagttctgtttggtccccaaaaataggtggatctcaatatttcctgaagacggagatgatgctcgaaagaattcttgaaaaactctactttttgtggcccaggttggtaaattgtcaactgagcgtaaggtcagccccaggtgtcaacctaggcgttgggccctattttttatgcccatgaagatgtttttcctctagaagtacctatcacctcatttttgatgaagacagattcaatgaaaaagtcaaatctttgatcggacacttggaaggcgcccagatttagattgtcaacctcgacactaggtgctcgacgcctcgagtgctcaaaaatcaacttgctctgaatctgattctggtgcctcaaatatgttcgtggtatgtctagttgatgttccaataaaagctttggccacttttcactaagacggtcccacaaactgaaaccctagttgaggaatgtcaac

SEQ ID NO: 63107 - DNA, 706 bp, Cannabis sativa
  modified_base (645)..(649): a, c, t, g, unknown or other
tattatattaaactatatgagaattggaaccccatactttaatttgaccacataaaaaaaatactagacactactattactctttaacattttcactaatataaatatattcgttttctttctttatttcatttttgtcactgcttttttattaatttcttttaaaaaaattatcaatatatatatgtagtttctattcaatgtttcttccatcttgttcttatatatgtttctacttgaataattaatttgtactaaattgggaaagtgaaagcttttatggattgtcagtatatatgctcgtgtaataaagaaaatctttgaataatttcatagttgtgattcatagctttgaaatgtgatcttatctttttcagtattctgcagtgcattaattatgtatatatcacttattaattttggacatttgccattgttttgcatgcatgtgatatatcttcatcttttaattatgttttcaagaaactatatatatatatatattatatattggatgttaattataacaaaattaagtcattatataatgatcaatcgatatttcacttaattaatattattacaagtgagtaattaattatttaatcattttccttcacttttgctatatatatatatatatannnnnactaggtgattgttacgtgccaagacacgtagtgttagcactactacaaaaaccccc

SEQ ID NO: 63108 - DNA, 956 bp, Cannabis sativa
atatttacttggcactaacaattattcatttttgaagattttttgttattttttctaattttttatgttctatatttttcagatcgacaatggctattcaatggcatgtgctccaattgttattttgtttcaaagttataaggtaactttttccttgctttgaattttttttgctaaaactatctttatattgcatatgtatttagattcaatttgatttcattatgtttcgtctttatattttatttccatcatatatttcactttttgtactaatcttttttttcttctctattccactctctcttataagcttgattatcacaagtttatatcatctattttgatcatgacaatgatctcaataattttaacttaatcttttaattaggtacatacatatacacacacatacacatacagtatacatagcacatatatatatattatgttttataattttatacagttttagtgaatatttcttatgtgttcatcttaactattttttatgtgagcttgactctataacatgcctcttttgtgttgttatttgtaactctatttatatacatattatattattattgataaccttcacgagagtctcaaacatgtggaggtgacattctcaaaatccttcaaagctatatatttattttatttatgtattttcttttttttttcctctaattttaatattattattatataattatttctaaccattaatatcaatctataattaaataaaaactcgctctttaaaattaattttctgtgtataagctttttgttttctttctttattgttttttcaaattatcacattgatataatttttctatgtattattttttttaatacaactttttatttcttcatactaattttctctattaattagtataacgaatcttttctttctaaacaaaaatataataaatctttattta

SEQ ID NO: 63109 - DNA, 1103 bp, Cannabis sativa
tagagtataaatctcaacaccaagagttatcgttcaggtccgaatgtggggactttacttgttatttgtgttgatatgagaataaggataccatcgtccatgatgataaaagttgttcaggattaagggtttgttctgaattgaaaccttaatctgaatccttgctattcttggatcctcactagtttttggccctaggttgggcctgagcaaagcttgataatatatgagccttctttggtggtgacatgtgtccttagtgaaaaacacgaacgacaagaacttatactaatcttagttaagaaccacaaaaataggatgacaacaaatattatattaattggaagattttccaaatatgaagatattctacaattcggtatccagattgattaaagcatgcagttaaaaattaatattttttattaacaatattatatgtttttttgcaatggttgtatggttgtaagtgattgtttgaattttatttttagcagtgtaaattattcaaaattttttaaaattttattggtggtcctaaaaatttacagtgtacataatcataaaaaaaatagataaaattgtatttttagagtgtccactataaattttttcttttaagttgttatggatttaaattttcttattttatgtaataattttgataaaaaattataattattttttaaaagaaataaattataatcaattggtcaaactctttatacatttattgcttaagtaattagtggtaaaactctcttatatttaattttgtatatttaatttcgtgatttttttttttttgtgataatactccttaattttattttttttgcaaatttgaggcaccagttgaatctcaccgttaaatactaataagactgatactatgtgcacatgtttatatattgcacgttttaattggtgttgagattttactgccacatatatacaaatgtacacaatgacaattccaattaatatttaatagtgtaatttaaatcacgtctcaaaatttttcaaataaaaaataaaaaattgacgtctctgttataaatattaataattatgtggatgtccaaatcttttatttattacca

SEQ ID NO: 63110 - DNA, 3438 bp, Cannabis sativa
aaaacaaaaagtgttgtgtgaagaatgcaaacgactcaaccattcaattgtttgaaaaatgagattattatttggctgaggctatgttgaatttcttctactattgatctcagaggccaaactttttccaatctcggtttggaattttcctgttaaaaaaaaacacccacacacaaaaaaaaaaaatacattataactttttctaatcagcattcaaaataagaaataaataaacttcagtttctacctgctgttgaaaggaagaactcatccagcactttcccatgttctgtaatgcccatttttatgatatcaatgactgaagaccagttttctcatgtgtattcataatagagaaaaacaaaaacgacaattaaaaaataccttcttcatattccaaagcttggaggatcatttcgacctgtacaaacaccatacagagtctttattagaaagggatgccctaagatatagtgtaagaggatcaagtacaatggccaaccacaggaaatgtctcagatagtacgtacttgctatgggacaccatatgatgtctaacaccacttcatacaacacatgtttattagtgcaatttaatattaggtgccacgaattagaatatgtataacccgatgttaaattgcagtaattaccgtatgctacaataattaatgttagccagcatataatttataaaataaaaattcctaaacgatttataaattaaacattccgttcctcaaaaaagagaagtgctaaatagcgccagtggtgcctagcaccctctaacattttatatcgctattggtataattagatatcgagtctcatataatttaatgtaataacttttatacaccatcggtgcctttatagcaatgctcctcggaaaaatcataaagtatatcaatcgtagattaattttgctcgttaataaaaattaagagatttaaaggaaagttacctgcactagccaattatgtttattttttgtgggggcaatgagaaacccattgaaaataatcaaaattaaaaggaatttaaatttaatcctcctgtagtaaaatattaaaggagacattaattttaagggatatttgcggcgaaatctctttaatatttataattgttacacatatgatcctaattaacaaaatggagacaaaagtattttattttatgattttgttacagtcgtactcttttcttgccattaaatgtcaactcagaaacacgtagcgacatattattggattatgtattaaataagctaaagaaatatgtcgacacgtgtttttgagttgacacttaacaagcttaattggcacttaacaactaaaaaaagatacgactgcaataaaatcataagataatgtatttttatcttcacttgttttgattagggtcatatatgtaaaaattgataatgttaaaggggtttcgccacaaatatccctaatttcaatgatttgtgagaaaaaaatagcagataaaaggttcatattcagaagaatcttgtgcagtgacaaagcgtacaaaatatattttaactcttaacaaatattatgcaagaattataccccttagcttttggtacgtagtgatgctttcattatttttaagaaaataatattgagacaaagtgagccgcagaaagtgatatgagagaaaattgatataaaataacaagacagagaaataaaaatgttggtattatatattacaatccgtatcacataaaatcagtaattcaacaattattaattagctatttcagacagtttctggaaaaagaaaaacatataatttcatgtacataaaattagagataacattttaacatgttaaaagatacataccttgtcaaaatctttgacaagattagcctcaatggaagaattatattcatactcttcccataattctttaatctctgcagctgcagtcgacacagactaaatatttaattcaattcatagaatcaatcgttataaaattcattacaatcaactgataccccttaaatcgccaccaagaattttgcacatttcatttaaagctgcctgctccatcctccttttctcttctttaggcacgccgtctgatggtgttatatctccaacaatagctatcaagtttaaatccaattcaaatattaaatataaaacactacagtaaatgcatggacataaggtacaattttaggcgaaccaacaattttttcttttctttggttctttccattttttcttttgtcatgcttttcctaactaatcccatggggtccagaaagttcgaccaggagacctcccatcccagtgatcccaagattttttacattagggggaattgaacctaggaccgtgtgcctacccacacatcccagtattcgcccttactgctaggccaattcttggatttaccagcattttttctgagttaaaaatcatccaacttttaaagtagtgtaccaaataagtgataggtgtcagataaacttcagtcgtttagagatacatttcagtgtttcacacaaatttatttgcaattagtagcttgatatggttctaataatgtacaatgggaagacggccctttaagcatcaatttgaaacagaatcagccacttctgacttcacaatacaacctttattttctccagaaattcttttgcatgaataaacctcactttcagtaaattaagggagtcctatcctagttgatactcagatcataatcacaatcttaaaagcattggattaatgtattccttcaaagtcaaaatacatgtcgggacccacgaacgaagagcataaagtataaggaaataaaatgtaccttccgcaatatcatgcacaatagctatctttatacacctgtttaaacaagtacacaaaaagaagaactaaatgaatcagaacaaaactaaatagttgaatatgtacttcttaatatctaagctatgaaaacaatcatgaaaattataatatagatggtaggtgaagcatgacaatgtccaaaaaaatcataagcttctaaaagcttaatgatagaatgattaagtaaacgaattagtgaaaacaaacagtcacagaataaagaagattatgtgggtatgacaaaattcccacctttctctgtttacaccaggaaggtcacgaacaatcaaagccatcagagccatccggtacatatgatcggaaattgactcgggattctgtattccatggttgatccatccttttctctttgtggactttcgggagaaaaaaaaaaaacaaacattaatactaagcccattttcaacttctcatagataacaagtagattcttcaaattcacatttgtttctatttatttttcttttcccacaaatgtattcaccaccttctcactaaagcttccacaattgcagtatgtaaaaatactgaaaacaat

SEQ ID NO: 63111 - DNA, 717 bp, Cannabis sativa
ctcgagcattcaatcgtctttccctccttgttaagaaccataggcctgctttgctttttttgatggaaactagattgaagcccaattcagttgataagtttagaagggctttaggctatgttaatggttttgaagtccctaggaagcattttgggggaggacttcttcttttgtggggggatgatgttaatgtaaatattcttaattattctactaatcatatagactgtattgtcaatatttctagtaattatatatggcatcttacttttttctacggctcccctgttactcatcaaaagcatattacttggaaacttttgaatgatattttttataatgctgctaatctttcttggttaatcattggtgattttaatagttatctttctcataatgataaggttggaggtagttcccctgatcaagtttctatggactgtttccataatttcctttataagtttaatctggcccctctttcttttattgggaataagttcacttggactaataagactatccgtgaacgccttgactgggcagtagcctctgattcttgggttgatgtttttcctgaacattctttgcatcatttgggtttctacgagtctgatcatagagtccttaagctcgttttaactccgtctaactctcgagccaactccacccctacttgtaatcgatttaggtttgagaacgtgtggctggaggatc

SEQ ID NO: 63112 - DNA, 5603 bp, Cannabis sativa
ggccaattcgtttgacttcattatcgatacagcatctggagatcatccatttgatccatacatggcactgttgaaaacatatggtgtctttgtcttggtggggttcccaagtgaagtcaaactaagtcctgtcaatcttaatttgggtacttgatacatcagtgtccttatgaaattcagtagttttttttgtctgtgtgtgtcccaaatacttatgtgtatgtgtttatgtgtggtcacatgagacaggtgataaaaccctttgtgggagcacagtaggtggcacaagagagatacaagaaatgttggagttttgtgctgctaaaggaatacaacccaatatagaagtgattccaattcagtatgcaaatgaagctctcgagaggctaataaaaagagatgtcaaatatcggtttgtgattgatattaaaaactctctcaaatgagactgctttatgctacaaggatctcaaaccaattcataaacactgtcaagtgtcttaagtgttttggtttagatgaatttaagtatgccatattttgtgtgagttgagttggactgaattagggggtgttgtgttggtgatctcaaagacaacataaacatatagaaagtatactatctatctatctttctttcttatacttttaaatgagtaatactatctaatatctgtctttgataccattgatacaaaatctgatacttgaatcctattcaatcctaatatcaatattcttcgaaactttaatccttttttcatatatttgaagataatatatataaatgcaaaatgaaaatagtagtgtcttggtctcttatttccattatacaagtttacaacgatattagtattaaataattgaaatttaaatactttattgacataaaattattaagaaagatcaactatttttaaatattatggaatttcacattaattggacacaaaattcgacaggtagtgttttacatcattcccttttgatgagccctaagttgaaattgaatcccactaataacccagaaaatggacaaaaaaagaaaagcaaaatctaaagcacaacaatgcttgacagttgagatatacaatacagtgctgctatggatgaagcaagtactatcatcaagtctccctaaacttcatacatattaataaagcaatcaatcctcaaccaggacaatactttcaatacacaatcacaaaaaacaaaccgagtgaaatctccaaacatctaagcaaagccatcttggacataaacaccatcttcctcttcctccatcaacttgtattgaatccactcaagtgactcacccgaaacctccactctccttttaaaggatcatacaatagaaactcggcaccttgatcctccgcctttcttttcagcgtctctttgtaaaccaagagcatcttcaaagtccataaaatccattttcccataccccactttgcaaaccacatctgttaacaatctgcttctagtgatgatgcaatcggagaaatgcaggggaaccagtaccggcgtcttccatctctatgcccatcatcaatcattgcaagaccttcctgtacaatcaattttttccaaggcttgtaagtcacattgttaccatataagggtttttctttttcatttttttatgaagttaggaaaagaaaatggagaatggcaaaacaaagcaaagatagcatagaaagaaaaacttacatctagcaaagtatctagtgcatctgttgcacgaccagatgtccaagagagccgcctttccacttcatcaatggtaacaaaaccttgagcctatgaaaaaataaaaataaagtgaaagtgattgtaataatcattctggctgaaagaatgactggtaattatagactgatcctttgtgctctataagatcatccactccacccttgagctatttaatgcttagagcaaataagttatgtgacattgaaaggaaaataaacacagaagtaacttggacctgggcaagctccaaaatttcattatggtctttgttcaactctgttggaacagaacgaacaagcttttttcttccaacagaaatcacctcaaaaccactccctagaacctgaaaccaacgcactacattttttgtgcatgaaaatcctaaaacaaacacggtaaacaaatccaaggtgtgaaaaaaaacacttatgatattaccttgagtttacttatagctcttaggcagtcatcctcagagacagcttctcgatcagtctttcgcctccgacgaagcaggttgcagagttcttgtaagttgatcaaacctccattgtgaggccttgtcgccagacaaatatcaacaatttgaacacctgtctacccaacagtaccatccaacatattaatctcagctttatgtacagtacagattcttagttaaattaaaatccataaagacattcgtaatcgtaccaagttcgtagtagaaatcaccaatgcccaagagctcagcccagaaacccttatttgaagctaaggggtctactccaacttttgtacacatctcatggaattgtgatctaaacgcaggattcttccgaatatcattctgcacacacatcatcaacccttacttatttgaagttaagattgtaataataactgaatgttgtaattgggattgaggtggtaaccttatgcttgcgagcgaaatcttctaattgggagcgaaaagtggaaagctgctccttcatgagatcagttcgaatcctggccacattttctccaagcactcggtattgatcctaattatcaattccaatttgaaaagagactactctcatctcataatcatatatcatatacaaaaacaaaaacataaaagatgagaattcagaacaaaccctagcagcagctgccgtctgtaagccaccaattccaggtctcctcctcattgctgttctcactatgcgttcagaaccagattaaccacaataatcttatcttaatttgatgatgatcgaagaaagaaacccagttttgaatatcctgaagtgacttattcaaatgttaatgtgttgggattttctttcatgggcagggaagctttaatcagaccagagagatcctgtagcttcttcttcaaccaaattaaagtcaaattattggacacttatataaaatctgtattgagtatgtttgatcaaaaagtcaaaggtaagaagtttcttttctgttaagaaataaataaaacccaacaagtaatttccttaacttcatcaacaaccttaacgttaacattatccatctcattcttattttcttccatgtttcatttttggaccaaagatatcataaatccaaacatcaagtactcttattttaactccactccttaagaacagcccagaatgaaaatgaaaacccatacaatacaatacacactcgtatgaattgaacctaaactctgataaattctaagaaaaagaagaaagtttaaaatatctatgaaaggtaaccaacctcaaggctcaagactcaaggatcctccggcgcggatccaccaaccgatgatggtgactgagtacaagagtgtcgatcgtagatctggggcgtttaggagtgaccaagagaacacagaagaagtgaattttataatttattaattttttttcttttttttagatttttacttattattacatatactatcaataaataacgaattaattagagtgttaatccaatatcatccgtacaattttgctcggtatgtcgtttcccttacaacacaacacaaccgcgttgcgttagaactaagccaaacgctttgtcgtttttccatttatctcatcttttactttcccaaaacgacaacattatatttcattaaattttcaaaaataataaattctcaattgtaatactttattgaaatactttcttttttatttttcatttgttttttttatcatatgaattttaaattatatatatcataatttttaaaatgttaattttatttaacctttttttttctgagaaaataattttgtttaatctttaataaatattacttaacattattttctattaataaaaaattagaaagttataaatcattcttgaaaaatatttatattatactccatcctacaacaaacaaaatataatatatattgaaaaaaaaaacatgctctatgctaaatatattaaggtgtgtaattttgctaaataagtatcaaggttggtatcactgtcattttgaaatgtgaattaatacatcttaaaaattaaataaaaaatcatatgagtttattttaaatttataaaggtacactaatttattatttttattttatataaaatatatatttaatttatagtagaaaaaatatatatatgaaaaaaaaaaattattgaaattaatatgtgaattttttaaataaaaaaataaaagtaattttttaaaattaatttaaatttattttatttgatattagagtgaatgaactatgaagtacaaataaagcttcctttcttttaacaatccctcatattttatcaaaagaaatttataaagaaaataaaaggcaagaaattggtggtatctatcaaaatcatgcacgttgactctcatcaactccaacatacgatataaaaaagaaatgagcaatatgagataaaggggaatatgttctcaaattgaatattattattatgtatacatatataatagggaatatatgcttaataaactaaaaaaccaaagttttaattacttaatttgcaggtcaatattaattatgtgcgtgtgcatgtaatgttacatcaccaatcctaaaatttatgatttttattgtgttggaaatagagcattgttattaaggatcagtgttgtttagcactttctataagttacgttttacatttagttaacgatattccttaaaagttattatcttaagttatatgggacccaatacttaattacatcaataacgatataacactagagagaattttgggcagctttttaacatttctagttggaaataacataaagtaagcacaaaataaataatttatttactattcaaaaataaaataaaataataaaacttcattcaaactagactattactactacaaatatgacttttggggtcgttgagcacaatacaatgaatgttataagttatgtaattttatttttagagcattgctataagacaccaataatatctaagtagtactgattagcgatatttaataaaaattaatatattaaattataggaattcgataattatatcaatagtgatatgacacgttaaaagatgttagacactaggtgtctttctcttattgttattcagagtagtgtatattttaattaatagtgtaggttggtgataggtagaccagtagttccatgcatggtatgatatgatttgataacctatattatacatttatttaataataataataataataataataataagatggcatgcatatatgtatattattgtgcacttgtgctaataatgcagtgtagcatatatacctaagaattcgaaagaatgaaccaaccaatggactgaaattaatttcattaaata

SEQ ID NO: 63113 - DNA, 1035 bp, Cannabis sativa
atccttccaaagctctccgagaacatcgatgcccccctgtattgcagtcaattttccttcttcggttaaccgtgcaaccttcgtttcctccgtcatgaatctgctgatgtaatctcggagaggttctcctagcctttgcttcacttcgaccaggtcttctaaatgcaacgggagttggcgagaagaagagaattatgcatggaattccaaggagaaagccttgcaagagttgaaccttccaggtgtcaacttgaaataccattgttgggcagcttctgagagcgtggcaggaaaaactctgcagcatacatctcctcgtactccttgtaggtccatttgcatttcaaaatacttaagatgtgataagggatcttccttcctagtatacatcttccaggtcggtatcttgaacttgtgaggcaactctaggacattgatctctgcggagaaagcgaatccacatgctcggtccaactcgaggtcattgatcttctaaccgactagaccttggaacatattttttagttcgtccaactgtgcctgcgcggatggattaacttgttcagtctattgaccgaccagagtcacgttaggatctctttgagtaggattttgaacacgggctctgggctgaatggctggtgcgacatactgctcgtctagccctctctttctgtttagatcatccctgagatcatgagctattcccaatctattaaatatagatacaccaggttgtctcagtgaatggttgtttgaccgatcacttagctggaagcgttaacctcggtggagttattaggtatgacctctcctaaaaaattactagataaggtttgtccgcctaccgcttggcccacaggcgaaacatgtgaccagggattaggcggctgactgttcaaggtttaagaagcgttcacagctggatcttcatctgacttgcccagtgggatgatggttgtaggttgttgattagtagcctggtaggctcttcgtaacagtacggtagcctgtctttttcggtcgtcaatggcc

SEQ ID NO: 63114 - DNA, 1100 bp, Cannabis sativa
atagtgacatcggctgcaatggggagagtatagagtctttctgttgaataggtttcggctagtagggagtatatcataacagacacgccaaaggaagtgtttaactttaggaggcaaagggagggtccaaagatttttccaccattcatttgaggacttgtaatccgaggggctaggttcattttaatgaagctgtctatgggcaaggtggtaacctgaattgaccgtgtatgaaccatgaggggtgagggaccaaaagtgtgtgtctggagtggaaattgaaggaaggggaatagccattatagcttgtgtaatgtctgtaggaaagagggattggataatggcatggttccattgtttgttaggtgtgataagatcagccactgtcatattggcatttgaatgatatcttaaatagtgcagtttgccataaccaggaatccaagcatcattgtaaatgttgatggtagtaccctcaccaattgacttcttaaggcctgactgaagaagttctttgccccaagtaatactagaccaaacaagagaaggtctacggcccttgccagaatgaaggaagctagtgtgtgggaagtatcgagctttaaggagtgtggccactagtgaatgaggatattggagtagccgccaagcttgtttggccaacatcgcctgattgaaagctttcatagaacggaagccaaggccaccatggaattttgaaaaacaaagagatgaccatgttttccaatgaattttcctgttgttttcattgccgccccaccaaaacagggccatcagagattcaatcttagaatggaatgatgcaggaagcttgaagcacgccatggcataagaagggatggcttggaccaccgattttaagaggacctctttaccacctttggaaaaaatttagagttcccatttgtttaaatgggcccaaacgtgatcgttaatgtagttgaaggcatcctttttagatcgaccaaaagcttgaggaagacccaaatacttatccatcgtgtcacgaactggaatgccgaggagcgtagctatttcttgcttaatcgcttgggttgtgtttggggagaagtataagg

SEQ ID NO: 63115 - DNA, 945 bp, Cannabis sativa
acttgaaggcacatatcttacttcaatttctttgtttatcaccctgtctcttacaaaatgaacatccaattcgatgtgcttcgtacgagcatgatacaccgggttggcagccaaggcactagctcccatgttgtcacaccaagtgacaggagtacaaggcagtggaaactcgaactctttcagcaatgcttgtatccaagctatttcagcagcgacttgtgcaagcgctctatattcagactccgttcttgagcgagaaacaactgcctgcttctttgatgaccatgacacgagtgtatctccaagataaacacagtgacctgcaatgctttttctgtcatcaggacaacacgcccaatctgcatccgagtatcctgttacagccaatctttctgatggttttatgtgaagaccatggtaggctgtccccttcagatatcgaagcactcttttagctgcactccaatgtgctgtggttggggattgcaagaattggctcaacttgttcactgcgaatgaaaggtctggtctggtgtgcatcaaatattgcaatccacctataatgcttcgatattctgtcaggtttgaaagcagatcaccataagatttggacaaaggcttccctactgtcatcggagtgttgcacggtttaagatgcatcatttcagtcttgattaacaactctttgacatattttccctggtttagatacaaaccggtttcatccctatgaacctcgattccaagaaagaaatggagaggacccaaatctttgagagagaacatttcatttagtttcttgatgaacttttgaagtttaacaccatcgttccctgtgataattatgtcatcgacataaatgagaaccgtgacaatagtaccagaggtcttgtagaaaaacaaagaggagtctgctcttgaattctgaaaattccagctgagaag

SEQ ID NO: 63116 - DNA, 1181 bp, Cannabis sativa
gtcctttaaagaggagtctggtctcgagtttctaggtgagagaaatttcactataacattttccatatataaaatacttgtttgtagctctaaaatcttacaactcatttcacacgttaacgaatacttactcagcacgaatacttgacaagaccatgtatttttggcaatactaaagataaattagatgatatgttacctgtttactttaaccttagggcctaacttgttgtcctttattttgaagtgttcttccacacctttgataagtgaggctcgcaggtttataatttcccctagctacactttaaatctacataacttctctgccaaagcattccacacctttgataagtgaggctcgtaggattataatcttctacttacgctttgcatccataaaacctttttgttgtaatagaattttaataatctgaaccaattctgattgaagatattagggctttataacttaagtcaccagccagattcaacacgtactttcttagcatctcaacatgattacgttacatgcctacccttctcaagagttctaatagcctcaaaactgagggcttacttacccttctttccaaagtgcttcgcctctgcattggggaaccttataggaaaacatggttacctacctataattctatgctcttgcagtttttaagatacctttagtcctctgacttaatcttggacctaaatatttcttttatcagagttattttagtgaattagaaattaactattctgattatacaacatatcttagggaatcatccctaatataccttggtaactattgtagtaagtggattctgttgataataattacttaatccatgaactatcaactcctaacatattctctaatatctaaattttcctttcgaactggtcatatgtttgagggtagaaaattctattgaatttcaacttcatacccatggctcgctgtaaactctcccaaaacttatatccttatccgacataataaacgtggggaattcataaagataaacgattataactcctcatgttaacttactatatacaatattttcatttatagaaaatattccaattagtaaatgacccataattactctgatcaagccataccaacttatagtcctaggtacatcctttaagttagggctgtacatcggtcg

SEQ ID NO: 63117 - DNA, 5261 bp, Cannabis sativa
ctctctctctctctctcaaaacctctaattttttattaaacaaaaatcctcaattttgttttatgcacaaattaattttttgttctttataagtatacccgactcttacattagtttaattgtcgtcacatttggaatgtttatggcatttggtacgagaaatttaaaattatttgattaattgatatattaaaaaggagaatataattatttgaaaacttataattatcattggttatgagaatatgtagtattaaatgaattacattatttggttgtattgtcgaagaaatatagacaacaccaaagactacaagtattcaatctacgtaagaacacttacaagcaaaactgcgagcactaacctagatttgcgaatactaaatataaaataacgattattagaatgtaacagcaagaatgtaaaagatgcaaacaaattatagtagtttagccagagcttgatctacttagtccacttttaaaagatagattgtgattggtcttatatcatatcacctttttatatagaccagttcgtggttgtaccacgaggaagtgaatcaactgtctctgcgcgaggcagttacattaatgcaatagtcttctatgatggtgaggtcgaagaggtggactaggaaattgaattaccttcttgaagtggaaacgacacgaatattgggataggaggagacaaagaagcagaggctttaggtgataaggatgcgcctttagaataaatgttttcctgcgaggatcccgtttctaaaacaaggccatctgatttaataacattcgagaagttaaaacttctttctacaggttgtacgaagctaattacaactcaacgacctcattgcccattaaccaatcctgagatcatcaagaaagacgtcgtggtagctagtctcagtgttgatcctccggtgcgaagtcgtagtttcttttcatcattttgtgaaagatactaaaccattacaacatcccaccttttcaaattactccaaatagctattggaattcttcacatcgtacaaagaatcacctaattttaaaaaatggttctagttgagcaaatatgaattgaatttttgcctgttacatttatcatgattagtaattaatgatttattagatgtgactaatagagattggggactaatcacaaattaatttcaaatcttgaaaaacatttgatgatttaataattctagatatcaatatataatatattattgaatatataaaatataaatatattataaatgaatatgttaattattgaaaaataattaataaatataaaatatttccatattcatgtagaaagtgtatgatcttgtaagagtataagagaattaagatcatgccataaatataaaactagttgacaatgtatatgaaatctttaatttggaattaccaagtatggtttactaagcactaaatagtagtggcatgtgatttttattgggaacacatatgtggatatacatttagcaaatgtactttatataattttattatgtatgactgaattgatagaaataaaaatcttttgtcagtatgtcgtttatcataaaagagctatttatatcacataagtaattattattatatctatctaatcatgagtattcctgaactcttatttgtgttcattaagttatttaatttactcgttaaagtttctcagagaagacgattcttacaacttatgttttggcaacataataacatggatgactgggtatatgttaaacaataagtagaatctaagatttttgataggatcgaattttatttccctcaaagtgttaattctaagagttaatttaattgagccaaaaatctataattagattataaattaaactcttcattatgaattaatagtacttaaagaattcaaaagataattggaagggtaaatgataattgtaacaccctacttatttaggcacgctacagtattttcttctaattattgtgcactcctttaattgtcaaagagtttattaaaaaacatgattaattaaaattttcgtaaataaaataaacatataataaataaacataaacttatacaatttcaggatttggtttttttttttacaattatttcaaaatgctacatataacaatgtcaccccgcaactatcaaaatatgagcccaactatctcgaagacctcaacactctaggtctagcctcctcgatatgtacaatcttcatctagttcatgactcactactgttcaacctttactttgcccttacatacacatgtaaatatacatgtgagtggacatactcaacaagataaacatagatataaacatataaccaaattgtaactaggtgcccatacacctagtcacgattctatatcttgcgtccaatgcgtataagttttgaacgatcttaatgacagtatgattgatcataatatcaacctatattcagtactctagtcatacttatgtgatatcatcaatccatagtataatgctaatcatatatccgtcgatattcagtgtaactctaaatacactaataccactctttttgatatgctaattaataggtaattataaaaacaagtacacgaaacatgtatgcatatatattattatactaatcttatctttattttgaatttaggtgtgtcggtcaacttgactgaaaattgctactcgatgatttaaaggccctaagtcacaatttatattaaaaaattggggtaagtgactcgctaacttagcttcgagaaattaaattcaacactaaaagtctccctattgataaatagcgtgacaataccctaaatatcgataaaatgtaaaaattgagactcctaaaaatgccccaacaagtgaattggattctcaaaatggtaaaccgtttttttggattctgccagggaaaaaggttcaccgttttttgaaaaaaacagtggaccattttttttgcaaaaagcacaaaaaaaaatcactccaagtttaattttaccccatatcgaaccaaaactcgcagaacacctatagacatcataaataaaatataccaaccatagaatgcatcatcaataaactatataaaaacttttcattgttgatcaagcttcgagttcaaaaacttaaactttctcaacacttagcaaagccacaacaagggcctcaaaacaaaaacaaacacccaaatttaactccccaaaatagcaccaaagttccccaagctcgaatagagagccgaacaaaaaattgcatgctcaaccaaacatttttctttaaaaaaaatcaaaatgaaataagagttagggctcaccttagagtataaccttaataccacttgaattcttgcagcaattgctcaagtttttggtctgaattaacaaagaaaaaggatggcttcttggggtttctttgtggtcgaaccaagagagagagagagaaaggatgatattgtgttatttttggttttttcttagataattctaattttagggataatttcaagtatttttcttgtttattcttaatataaaatcaatgtaaaaacttaagaattattaataatctcactaaagacaattgtaaagtaaacttacaaaattgcccattcttacaagttaagcaatcttgatgcctagggtaaaatggtcaccaaccattaccccgcacaatcccgacattcaactgtctaactttttttctctgctaattctaagatactcaaccgtatctaagtgattctaatggccaaatcatcacattctactgttacgggcataaaattgaaattcatacataacatatataatacacctaaaatttaataattatctccataattgagaaattatttttctacggtctatttttgacgataggtcccatttttcctactaaaaagcattaatcataaaataataaataaatctccaattatctaataattctcatttttaaactatgtggtcattacaattatcccccgttaaaaggattttgtcctcaaaatctaacctgaataactttggatatatactgagccctcatatcggactccaactcccaagtggcttcctccaccttgttcttcctttagagtaccttgacaaatgttatgcttttgtttcgaaggactttatctttcctatcgaggatctgtagttgcttctcataagataggtctgactatagctctaaggttttgtaattcaggacatgattaaagtttgaaacatacttccttaacattgaaacatggaaaatattgtgcaatgctgacaatgctggaggaaaggctagacaataagccactagtctaaccttctcgagaatctaaaaaggccttgcaaacctagggcataactttccctttttttttgaagcgctttacccctttcattggtgatacttgtaagaagacacgatctcctattcgaaattctttctttctaagctttgaatctgcataacttttctacctgctctgagaagcaagcattcttgccttgatcttctctatagcctcactagtctgctgaactgactctagacctaaatattttctttctccggtctcatccaagaaaattggagaacgacacttcttaccatacaacatctcatagggagccatccctatggtactatgataactattataggaaaattctatcaaagtcaaatacttactccacaaaccttcgaaatccatcacacaagcccgcaacatatcctctagtatctgaattatcctttaggactcaccatctgtctgggggtggcaagttgtattgaacttcagttttgtacccatggccctttggagactttcccaaaacttagaagtaaacttcaaatctctatatgaaacaacagattttagagccccatggagacataatttttcctctacatacaattttgcataccaatctactgtatatgttgtcttcactggtggaaagtgacctaatttagtaaattgatccacaattacccaaatagaaccatacacactcgtggttctaggtaagccaactacaaaatccatagtgacatccccctatttccactcgggaagtgttaaaggttgtaataaccccgtaggtctttgatgttcagtcttgatttgttgacaagtcaagtgttaattggatttttagccaaccgacgtggagtcgtaataaatgagatttaaacaaaaatcacaataataaatgcagttaataacatcagaattcgcaataaat

SEQ ID NO: 63118 - DNA, 1069 bp, Cannabis sativa
  modified_base (157)..(182): a, c, t, g, unknown or other
  modified_base (236)..(243): a, c, t, g, unknown or other
aggaattttatagaggttcaaccccgagcagttcggtaatagcctaatcctagttatttgtattaattcaagaataaggagaaaggttccttttcttatagctcttacaatggaatctttgaatataaatttttagacaatatctctcaagtaaaannnnnnnnnnnnnnnnnnnnnnnnnntgcatcactatttatagggctatgcgctaggagaggaagtatttcccttctcgnnnnnnnngatataagcagaaagattgcatagtaaatacagaatacactgattgtggaatttggatagcttgccatatctctataacctgatccccaagttatagggatttccttgatgactcatgatgcgaaagttgaattcgctaagtgtttgtcgctctgtgcggattgctgattgctttgcctcgagcatgcatatgaggtatcctattcatactatatctagcgagcgattacccagagttgattccaagtgtcctcatcatgtgatgccacatcagagtgcaaaaattaggataacatttgccccccaagtctgtacgagacttccaaagttgcatgtagacttcattcgagctgtctttgtgtttggataggtgacacgtgtcaagcgtgtttgttcacgactcgatgtgaagctgattgggcgtcccttcggttttcagctaataaatgctctgataattaatattttgaaatccgattttctctcaccatggttgacgactaaacttgatttcttttgatttcccatattcgcttctggggggaaccgaggcgtctgatgttctttttaaatgattaccccttttcgttgtttgcctataaataccagtgagcatttgtccacaaactcattttccccaaccttccttgctaagtaaactcaaagcgaaaatagaggtttttggcttcaagtttgctgaagtgctttcatcaaaactgctcgtttggcttggcgtaacctgaattcacacatttgatccttgactaagttctcgatttccttaatgtttactttgcacatctactttctgaatgcacctttgact

SEQ ID NO: 63119 - DNA, 2204 bp, Cannabis sativa
ggatggtctctaccaacttcaagctccaaacacaaagccaactcctctgttttcaagaaaaatcgagtcaaataagcctaaagagcaactgtttactggtgttgctgtcaagtccaagtctagtgtcaatcggtctaaaaccaatgtgtcttgtgtttctaagagtgatgtgtggcataggaggttaggccacccatcacacaaagtattgagtcaagttttaaattgttgtcaagttaaaattcccaagtatgaaatgaatcatttctgtgatgcatgtcaatttggcaaatcacatgctctcccttttaaaccttcaaataataaagctagcaacatacttggatttaatacattagttgaccctatggggaccttctcctattgtttctaacaatggttataggttctacatacactttattgatgattgcactagattcacttggatttaccctttaaaaaccaaagctgaagcaataaatgcctttcttcagttcaaaacctttgctgaaactcagtttgaaagaaaaataaaaaggcttagaaccgatggaggaggtgaataccaagcactacaagacactgctttagcccatggaattgatttccatcattcatgtcctcatacctcagctcaaaatggtagagctgagagaaaacacagacacattgttgaaatgggtctcactcttttagcacaagcacacatgcccttgaaatattggtgggaggcttttcaaacatctgtgtatttaattaacagattgccaacaccaattcttgaccataaatctccatttgaggctgttcatggtaagaaacctgattatgccttcttaaaagtttttggtgttgcttgttttccttgcataaggccttatcaagcacacaagtttcagtttcactctttaaaatgtgtcaaccttggttatagtgaagttcacaaaggttacaagtgtttaactcccacaggtaaaatctatatctcaaggaatgttgtgtttaatgagttagaatttccatttgaacttggctttctaaacaattaccaagctgaaaaaccagttataattcaaagttccacttggtcagttctgccatcttttcaacctcttgctggtttttctgctcctaaaccagcaacaccctcatcgtcctcaatcatacctgaagaagcactctccacaccaacacaatctcaggtaaatactcacctttttaactctctgcattcctcacctgttgcttcacaagagtctccaatttcagaaaatgagaggggacttgccatcagccctgctgctatttttcaggatgaattcatagttcaatctgctgattcagaacagtcagcaaacacctctccagttccagttcagaccacagtccatcctcaaacaactggccatcccatggttactcgggcaaaagctggaatattcaagcctcgagtattcatgggacacacttactgtaatacagaacctggtagtcactgcaatactgagcctggcagtgttgaggaagccctctctcatcctggttggaacaaagcaatgcaaagtgaaaataatgctcttaaggacaacaatacatgggtacttgtacctcccaaaccagatcagaatttgataggaaacaagtgggtttttcgggaaaaattaaactcagatggctcacatcaaaggttcaaagctcgcttggttgctaagggtttccatcaaaggcctggaatcgattttggagagacttttagtccagttattaaagccactacagtcagaattattttgaccattgctgtcactcgaggatgggaaatcaaacagctggatataaacaatgccttcttgaatggcactcttgaagaagaggtttacatgctccaacctcaaggctttgaagaaccagggaaagagcactttgtgtgcaagctaaataagtcattatatggcttaaaacaagcaccaagagcctggtttgacaagctaagatccaccttggttagctggaacttcaagaattcaaaatcagacacatccttattcttttataaacatggtgctgacataatttttgtattgatatatgtcgatgatattgttgtgacaggcaacaataacaacaagttgaaaggcttcatttcagaattaaatagaaggttcactctcaaagacctcgggtcactgcattacttcctt

SEQ ID NO: 63120 - DNA, 730 bp, Cannabis sativa
aatctgaattatgtaactattattatcatccatttcaaaaaaaaacaaaaactatttactatgttgaatattcatatcccatttcaaccaataatgatatttttaattaattaatcccatattcatataaataaatgctttgaattttattatttagtgtgttaatttttattttttttttggattttttaaaaaaattatagtatatcttaaataactaagttatacaaacaagcagtgtgcatctatacaaaatgcaccatatatttttttaaaaaattatatatatatttgtgatattaaatagttttcttattgtatatataagaaaaaaaaaattagaggttgtttggctttataatttaaaaactgttttttaaaactgaaaacagtttttaaaaactattaggacaaaaatttttaaaaactattttttaaaaattgagttttaaaaaattagaaaacagaaaacatccaaatgttgttttcaattttcaaaaacaatttttgttgtctaacatattatatttttatattttgctcacatactcagatcctagacccgaaatcatacccgaacctagacccggatgagttaatgtcatggtatggtgctaaaatattattttttttgtaagaaaaaaatctaaaagtaatttttaaaaatttgtaccaaacaccattaaatttttaaaatgacaaaaaactgttttctattctcacttttaaa

SEQ ID NO: 63121 - DNA, 803 bp, Cannabis sativa
agagagagagagagagagccttacatttttttattggggaaaatccttaatctcaaaaaaataatttaattaaagtacaagtctaatctatatgtcactccatcaagaggtttacgtcaaggagatccattacttcatacttattcctcatatgttttgaaggattatctcgtttgttacaacatgaggaatcaattggaaacctacaaggtctcaagctcacaagacatgctccttcagtcttgcacttattatttacagacgatagcctcttgttctgtaaagctaacaaagagtctgcaaagggccattaggagagtactgcacatttatcataaagcgtttggtcagtgcctcaataatcacaaatctgtcatgtcattttcacctaacacgcaagattatgcgaatacttatttctctcaaacattaggtatgcctatatgtgaatgtcacgaaacatatttggggttaccggcttatgcaggaagagatagtacagaattattcaacaacattaaagagagaatttgaaaacttcttcacgcttggaatgaaaaacttctctctattggtgagaaggaggtacttctgaaagaagtggttcaatccatacccacttatgctatgagttgctttcgccttacaaagaagttttgtgaccagttagagtctatgatggcaaatttttggtggggatctaatcaaaatgggtcaaaaattcattggaaaaggtggaaacaattttacaaatttaaatttgaagggggtatgggcttcagatcgtttatccatttcaatca

SEQ ID NO: 63122 - DNA, 648 bp, Cannabis sativa
tgtaggtggtggggggggagggtattatttatggggaaaaaaacacaaaaagtgtcatatataactaattatgcatagtattagtttagatgaccaatttatggatttattaagcatggaaattcaaatttcccttaaagaaatgatagtttcattaagggcattagggatcatacatatatggaataaattcagcacaatattagaaatgatagttgtattatagttgtgatgatgtcattttttatttttttttaattattttataatttaagttattgatgttgatttcttattattttcttacttggaaaaagtatatcttagtaattttaaaattttaaaaagtatatttttataaataaaaattttaattggtaatattataaagaaaacaaaatagtatttttgaaaattttccatttaaactatgtagacaataatacgtcacccacccagaatgtctccacgaaaaagaaaagccaatatttaattagtacatactcttaaataattgaatgctactttgaagactaggtcactacatccactataaacgacaaaattttatattttataaatacattgcagtacagctggggagaccgtatattatgacttaatgagaaaaggagtttgaaaactctt

SEQ ID NO: 63123 - DNA, 1376 bp, Cannabis sativa
atatgggacccgatacttagttgtaccaatagcgatattgacacataggaaggtgctaggcaccactggtgccttttagcatttctctattaattttatgtaatgttttaaatgtatctttctataattaattagtgatgtttttaataaaaattattatattaaattatataaaaattaatatttaattgacacttaaattattgctagaatggcctaattagtttggataaaggtgatacaaaactcaaggtagctatgctttagaaacatagaccttcccttgtttaatgaaaatccttttattttattttttttagaaaaaacctatactttaaaaagagaaataaagtaatgccaccagcccaatatctactatttttttttttttttttgtataggtgaaattcaatgttcagactcacataaattaaaaagaaaattgaaaatgggtggttgtggttgtagtaaatttgggtattttcttaaaaaaagaaaagaaaagaaattagagtagagtagggacggtggaagtgcattgaagaagagagagaagttagttaattggttaatagatgggtcccacatcaactgagaagtcaatattaagatggaatattcaaataaataaattaagaaacaccatgtgcctctctgaacacaaccacgtgacctgcaatcacatcttcctctcctaaacttttttttttaaaaaaaatttatttattttatttattctttcttttttagaaatttattgcttcatctttactgggatgttatatttagggcttgttcccgcattgtattgtattatattgaattttattatatattatatttttatataatactgtgttaaattttaatttatagtaaaatattatatatttagttgttcgtaaaatttaataccacatataattttacataaaaatactacataaaatataattcaatataatacaatataatacgacctaatacagcgttccaaacgagccctaacagtcgaaaactcactactcactcgtcttgaaacttaaaaaatctgaaaaaatgaatttaaaaaattagaagccgagttcagattaggtttagttaattactggactgagtttgaatttcattgattcgaaacatgaaaaaactatattacacctaaacccactcgaaactcaaatatatataatttttttatgtattttttaaaaatataaataataatatattatttttattttcttcttcttttttttttgtttttttaatgaaaaattatataaaaataatattttttcaaaaaattaaagggcagcccaatttgaacccggtcaaaaccaacctggacccagtttaactcgaatctgacccac

SEQ ID NO: 63124 - DNA, 1112 bp, Cannabis sativa
ataaaaagacctgaaaacaaaaaataccatataaattggtcaaacttaaatgtgctatatttatcataagaacttttaaaatcccatagtaagtataatttcctctaagaataatgattatttatttaggagaggtctacggtgtagcacacttttgtgctgtatcagtacatcacccttcctaaaaatatattagcagatttttttttttattttcttatgatggtatttattataataatagttagcttcatatttgattttaaaaattttcaagtaatttatagtaacgaaaacaaagttcaaataatttattttattcgtattttttttatatgcgtgtaaaaataattattttgaattttattttgggcatggcaaactattcataattcttgaaaattgacaatgaggatcttgtgaccaatgtgaacatagtcatggaaaatattttcagcataaaaatatgttgtatcggtataattttcaaagaaaatttaggtttccatgcttaaatgagatatatggattaaaattaaccccttcctccattcaaaaaataaataaaaaaaaaacacattgaaaatgtgtattactctttcaccccatacaaaaatagaagaatagagaatctagtcccattaggtatcctccagaaaggtctgccacgaagaaaaatcctacgattgtgcctgaaaagaataagaaggcctaggatccacgtaaagttcgttctaatctcccaaagtggaagggtcttgagggtgtagatttcccaaaagaaaaactagtctccaggaccgtggagatcgaaggagcgtactccatgcatcaaagccaggaaaacaaaaggggtctttcaagaaagatccccctaatgatcttcgacacaatctcaatgccaaacacagggacctaagggcacgtcttgaccaaagaaagaaagcttcgtcagaaatatactagaagctgagctcccaaagaactttaagatgccttaaatgactatgtacacaggtgacatggatcccagtgatcacttatctagattcaacagagtcatgacggtcatgaggttcagtaatggcactaaatgcctgtgtttcccatgg

SEQ ID NO: 63125 - DNA, 925 bp, Cannabis sativa
ttcattctgttgactgacagagtggaatttaaaaggatgtaaagaaaaaaaacttaataaaaggggcaagaagttcaaaataattacaaatatggccactgccaccgaagatgccataaatactaaatatgtttagaccagtcaacaaaataacaatattggtaatagtaagattttaaaaagagtaaattggtcattaactatcacaccaataaattatatttataatagtaagatatagttatctattttttattataattttttaataaaatattaaaaaataataataagagtaatttacggtataaatactaaagtttaactctcaattataaataaatatttaaatttaatttttgacggtaataatactttaagttataattctggtcaaatataccaatatgaaaataacttagatattatcactttcaaaaattaaacttaaatttttatttgtaactagaaattaaacttaagtattcataccacaaattactctaataataatatgctatttccttagtcaacaaagtttgtctctttcaaaaacgaagaacgaaaaactaactaaatattaatcaccgtcagatgagcataattcgtgatcggacggttagggttgttagtaattttactctagatttgtccacactggattgaaactccctaagccttatataaactctcttctctcatcttgtctcttagttactccgccacgaggcagcaaatggtgtgggaccctcatgtccgaaatcatccatactcaaacgtaagactaccacgtggcagattaccattccttaaatacattatatgagccacgtggacacttttgattgatgattgagaccatttgtggaccccactactagatatacgtgtcttgtatagatcgatatttaagatatttgacaca

SEQ ID NO: 63126 - DNA, 1193 bp, Cannabis sativa
  modified_base (917)..(924): a, c, t, g, unknown or other
  modified_base (1134)..(1143): a, c, t, g, unknown or other
tgaactgagttttatttagggcataaaacccaacaataacgtcagaatcaaaccattacacattgttcataaaatgaaatccagatcactactgacatcattcatgaataaccatcaatatacagatatctcgtgatacaaaatcattataccaataataggaatcatatatatgttacctcataaagtaaccatcttcattacatcacattgcctaattaggcaagtcgatgctttaatctgataatcatgtatcgtgttgcctaatcaggcaagcccatgccatagcctgatatcgtatgtcgcataactgcatcatctaatcaagtgagcccgcacctttttttttgtttactattaaattagctgttcttgaaaaaaaaaaaaaaaacactaataatgtggggcataatcttattagtatcaaaatactaatttttttttcttaaaaaaaaaatactatactataacaatgcacccctaaaaggggtttaccgatgcatttcctttttgttttggcatctgagtgaattttttagtctatttttttttattgtcgtctatattataattattttagacatcctacaaaattttgagaaatttaaaaaaaatttaacacgccgaaaataggtttgaacattttgttggacgagggactcttttataaaatttagactatttttaccctatttttaaagtgttgagatttttttaattttacaagatattttaaaatatttctttaaatattataacaagtaataattacataagacacctatttttgtaaaatatttacattcttccgttcaaagaatgtttttttttatatatatttttacggttttctaaaaaataacacgaaactaacataaaatcaataagaaaactacataaaagtaatatgaaaatannnnnnnnataataacaaaaaataacatacatataacaacaaattaaacaacataaaaaaaactgcattttctgtgaataaaataaaaaaaatcgtaaaaatatttaaaattttatgaaagagtatttattattatttttttttattattattgtttttatgtttttatgaaatctttatatattaaaagtgtcaatctaacggcaattcttggtttnnnnnnnnnnggtttaacgattctttttttatttagcgattaacttaacagactgttaac

SEQ ID NO: 63127 - DNA, 2031 bp, Cannabis sativa
atagggccttttaagattctcgagaaggtttgactggtagcatgtcgtctagccttgcctccagcactttcagcaatccataacgtatttcatgtctttgtgttacgaaaatacgtttcagagcctactcatgtgctgagttatgaaaacatagaacttcagccggacttatcatacgaaaagcaaccagttcaaattttagatagtttagataaggtcctttgaaacaagaccatagctttggtcaaggtggtctcgagaaatagtaaggtggaggaagccacctgggaattggagtccgacatgagggctcaatatcaagagttgcttagggtagattttgagtatgaaatccttttaatcggggataattgtaaagaccgcttaattttagtatcagaattactagataattagggcttaattccaaaattataatttgaattatcatttatcaacttatggagatatatttgaattccagatgtgatatttatgttatatataaaattttatatttttcatattttatgcccggcaacattggaacgcgatgtttggccgatagagtcacattttcttatggtttagtattttagtaatggtggggaaatatagatagatgttgtaaattttgggattattcgaggtattaggtttgaccaaaatatccctaggtggtacagatactttttggcttaagcaagggcaaaatggtctttttaccatatgtttcttctatcctttactgacttataattgaattagtaatctaaatcaagttagtagaatgttggataaacattaggtattatcttcttttgtcaaaaatagaaaaattagaaagaaaacccttttcctctctccattactctctctttctctcgatcccttgaggaaccagcagccaaccttgatttttcaagtcctctcttggtgatttagcaaagtttgattgcatctctaagttcccatttaaggtaagcaagctcttctctctttctctttactttttaaggatttaaaacttgtgtttcatgcaatttaagtttaagattagattactataggtgtaatttaagtttggttatgatttctgaggttaattataacttatttaagctggtttggagttgatttgagtgttgtttttgtgtttgagcaaagtttgaatgttagagctcaaactttgctctctcatggtattttgatttatggggtttgtattcagttatatttcttaatttaggtttattatggccatataaggaggtctagaaagtttggagacctttggggtctatttttttttattgagtgtttttgtgtttcctgcactgaatcagtcgaccgattcagttggacttgtaggacctggtcttccgattcgtccccaggcagaccctcacaaaattgactttccagttgggaattggtctaccagttcgggcatttattggcacccaagtttttcatgttttggggatttttagagtattgccatgttatccattgataggaaaacttttacttttgattttaaattcccgaaaagtgatttagagcatcaatcatcaattttacgaatattgtaatttatggacctttaaatcgtccagcagttgttccactcaggttgaccggcacacctgaatttagaaacgaggtaagattagtataatgatatgcatatgtatttacatgtttagagtacatatttattaggcctattagattacatcgataatggtatcaatatacgtagagttgtattggatactgatagatgtatgtttggctcaaatactgatcgacgctatcacatcggtataactagagtatgactagagtactcagtaccgcctagggtgcggggatatgataacagttgggtgtatgggaacctaattataatccgggttatatttataattatgactatacttttcttattgagtctgtcgactcaaagatattgtttacatgtgtaggtaagggcaaagctaaatgtgaagaccgcttagctttaat

SEQ ID NO: 63128 - DNA, 574 bp, Cannabis sativa
gtattgaaacacaggggtaaatgccattgtttgtcattcaaattcctggatgtggcccatttactagttccttaatttaggggagcttttggcaaacatagctacttcctggatggtccagtaccaggctccttaatatgtgatgctagatgggaagctttattgtagggaattatatgtgcaaaacctgaggtgcatattcagaatcgagataagttctatcatacacgagcttcacaggggtttttgtggagaccatacttctgaccaaggctatccaaaaatatcctctgttagagttactttgagcccacaatgaagaaggattgtatagagtatatttagaagtgcgagcagtgtcaaagatacaccaaggttccgcgagtgccaccaacggagatcatcttgatgagcagtccatggccctttgttgtttgggtaattaacttagtaggatcccttctcactaaaaaaggaggagtccaatacgccataggtgttgttgactacttcaccaaaagggtagaggtagagcccatgaatacagtaacatgcaagaaggccttggactttt

SEQ ID NO: 63129 - DNA, 1184 bp, Cannabis sativa
  modified_base (140)..(144): a, c, t, g, unknown or other
agtagctcggcctaatgaatcccagattcaataactcttgtaattgtatcttcaattctttcaattctgctggagccattcgatacagtgcttaagatacaagatccactcccgtaaccaattcaataacaaattcaatnnnnngcataggtggcaatcccggtaaatcctctggaaagacgtcaaggaactcgcacaccaatcttgtattctcaggccctgatgtcataggttggctggtatccactacagtgactataaatcctagacaacttctgctcatcaggtccttagctttcaacaaagttattcttggtatgcgtgccccctgaaccttacccacgaacaccgctgggttagtactagagggctcaaacaccaccatcttccgtttacagtcgatcgttgccccatacttggatagaagatccattcccaggattatgtcaaaatcagatagttgcaattcaattagattggcggtcaattcacaaccgccaatccaaaaggacgaagaccaaatccacatagtggagacaataaggtctcccgagggtaacagggttgcaaaccccgaagcataaatatcacatggcttatggaaactttcaataactctacttgacacataagagtgagtagctcccaaatcaaacaacacagtaagaacagccattaatagacaattgacctgtcacacctgacggactagcatcagcgtcagcctgagtcatggtaaaaagtcgccccgcgttctgtgtagtattcttcttaggctcctctatcttagcctgaggccaatctttgataaagtggcccaccatgccacattgaaaacatgccttggcccgacactcacccggatggtgtttcttgtatttaggatactcgggatatgatcagaattaggacccgcagccctgatggccacctctgtttcctcaaaactttctattaccccctgatgctctgaaagcctcagccttccgtttgttgtcagggttgccactgtcggtccccttactgacattaccactagtaagaggattcgatgccgtgacgacatcctttacagtctgctctttcgcaacatgatgctaagcctcttcagcaatcaaggctagctctaccactttcttgtacaaaatgtcatgtgaagtggtaatcttcaagtcccgactaat

SEQ ID NO: 63130 - DNA, 1557 bp, Cannabis sativa
tggcctcatccatggcagcttaggtttggttattcaaagacttcaacattgcaaattccgatatatctgcacacaagacgacagtacgagtaaacaagaggagcaattgtaagtcatgcaatcataagaaaaaatagcaacagcaagaaggagaatctagtgaagaaacttgtgcgtgggtgcagccattcagtaaagtaccttagggttgtccacgagcaaaagctaaaatgctcctatgaccattgaagctgtcatattccctaaatttaggcagagacataacaatcaaagggtctacttaatgtccaaagtagtccccaagtttctagggctcataaaaaatgtaaagtgaaaattcagatgtaaactatttttgttctcattgcatgatgcctgaggaccattcttacaaaagttaattaatagatttttacacaaaacattccagatattgtcaaagcctggtttcctctgcctgttggtagtatcggcgtaaatgatctgcattctaggcgcgagggaccctcgatccatccatccttttcaactgaaaagtaccttgacccattttctcgagtatctcataggggccttccttgtttgggccaagtacccccgctcccaattcttgtgaagatgggattactcttcttagaacaagatcaccaacatcgaatgtacgacttttcacctttgcgttaaagtatcgggcgatctttccttggtacattttgagttggacttgcgactgttcctggagctcttcaattaagtctagcaactcttagagcagggagtggttgtgggagggtcgtaagtatatcgtcgatggaatgggactgtggtctctaccgggatcactgcttcgcacccataggccattgcatatggcatgtgccccgttgaagttctttctattattctataggctcagagaacttgagagagttcctctaaccaatgggccttccaagcctgaagcttcttattcaacgtggtcttgaggattttattgacgacctccacttttctattggcttgtggccaggctacagctgagaagcttttcacgattccgtgctaattatagaagttagtgaagcgctcactatcgaactgcttcctgttgttcgacccaatcttataggggagtacgtacctacacacaattttttgacaacaaaatccaacgccttcttagaagtaataatattcgtaggttcagcttcgacctgcttggttaagtagtcaactgagacaatttcatacttgactccgcctttacccgtgaggagggatcctaccaaatcaattccccagaatgcaaaaggccatgggctgctcatcaatgcaattttggttggtggtgcacgcgggactttaccatatctctgacactatttgtacttcctcacatatttcgtacaatctttcttcatggtgggccaaaaataccctttccgaaggattttcttggaaaggctaggcccaaaagtgtgatctcaacaaaaaccttcatggagcttatggatcactacgctaatctctgtccca

SEQ ID NO: 63131 - DNA, 1059 bp, Cannabis sativa
cgattgtttgagtactgatcaagtatcttaagtatttgttttcagaatctatagattgacaggcttttaaaagtactatattggatttttgcatttcttgggattcatttagtgtgttcttgatatatgggctcattttaattgcaagtttgtattgatattaatttgatgattttgaatggttaccaaacaaacttctcctcctccattagtggattcatttatttctattggatttttgcatttcttgggattcatttgttaagtttgtttggtattcatttcttgtaattttgctacatctggttgtagtggtctccattagtggaagcaatatcttgagtaatgtctccaatatcccttcatgagagacgttaacttttttcgacatgacatttaaattttacggctcattcatttttattgcagggcattgaattttgatagtttatgtttggttgggggttgaatgagttggaataaaaatggaaaagaattgagttttattaaaattatttaagtttaaatttcaaacatgaaaaaaggattcattgtttatttcattctcttctttggtttcaatttcaaacattgcaatgatattctgatttttctaccatttgactggactgactatattcttctctgaaactacaaaagtctattccaatgaccatatatattttggttttcttttatttgttatatattcatactctatgttacttgtctataccataattgaaatccaagtatttagtaattactaaagttttctttttaaacattatagaggattagtcgaccgagcctagtttctatgagaaaagagaagtaatgatttagtttgacaagtgcaaaatgaagcatcagtgatttaaactattgttgaaatgcaggcaagtaaccattctaatccatcaagggaccaaatgattaatgttgttcagcaacattttacttcatagcaggtctctttcttaccttctaactgtttgaatattttatcaggatctagatttactaccaagtatgtatcattaacatcctaatatgaat

SEQ ID NO: 63132 - DNA, 1432 bp, Cannabis sativa
  modified_base (119)..(131): a, c, t, g, unknown or other
  modified_base (343)..(343): a, c, t, g, unknown or other
agtatgttttatattatgcctttcctgctgagtcagtcgactcacaatgctattttcttgtgtaggtaagggcaaggctaatgctgaggagccgtgagagcgagcaggtgaagattgtnnnnnnnnnnnnngttaggcctggagtgtacgatctttggaacatgaaggcctttttctgtatagtcgctaggcgacaaaattagttttgtatatgtatagcaaacttttgtaaatgtattttgtaacgggatcccgaaattttataatgtaatactttatgttattaattaaataagtaaattttaattaatcatatttttcgttaatctcgttgattagcaangagctgcacaatacgtttaaaatcacgctaacacgcctaaattagttagggtgttacatcactaacaagccctaagcctatataaagatagtgatacgctagggttaaacggatgaaaaccttgctagagacaaatccttaagagattgaaagtcttctttgtgttttaagagtttccaaacttaaagaccattgaacagtattttgcatcttcttctttgtgttctccacaacaccaagcttccattgacaaaaactatcatcccagacacatttctcaaggaagtgagaccattttgttttttcaatcatcatccttatcagatttatgaatgctgggtctcccatgagccttgtgttcataagtcttgatacagatttcacctagagatcttttttttactatcatccacacactcttgagaacataactctggtgcgtcgagtccaaataataaaaataaagtaaacgtagccccattaccatcataaaatgggcagtgaactactaaaaatccctcgtgtctttcttaattattataattttatttagccaaatgaattcatcgcagtcctcttattttttacgatctctttaaattagttgatgaaaaactgtcaataatatatatacataatatatcaaagaaaatatactataagttttttgagagattagttttagggttaaaaaattattttatttttcacacatcctctctctaaaaccctacatgccactctctctctaccccttgcacacaccactctcacctttgagtgcggtgtgagtttttctctatctcaatcacaatgtcgcgtgagttgagaatatgatgtgatcacaaaatttgttcatatatcaaatttatatgctcaatcttattctaagtgttgaagctggtctggaagacgtttcttcaacaagcctatccttagattggatgtttgaatttttatacgaaaagttgcaaggaaacactgataggaaataagaggtattttcctattttaattagttagatttaaattatgtaatattatgttgagattcagggtttaaggttcatattggattcaacaaaataa

SEQ ID NO: 63133 - DNA, 766 bp, Cannabis sativa
attcatttccagtatgcagctacatcgtaaaggaaaaattgattacttgcccagaattcatacaacaatgacaagaacattgctttgttcgtattacttgaaaagattatttctcattgatgaaattctaacacaagacaattgctttgtttgagtagttgaaacacatgaagttgttgcttaaggactcgttcctttgctactgacaatgtcgacatgcatttaccatgtaaatgaatcaactactcagtcatcattacacattatcacaagtttcaataactgtgaaggtgactttttcaccaacctagaggagcaatctagttgataaatgaattaaatatgtagctcaccaccaattacacttttcatttttttttggtatgattaacaaatttggtgcttattaccaaaaataaataaataacaaggaggtccctgatcaaaacataaaacctatcagtattaacgtagttaaaacgagaagtgaaatatgttggagtgaagattttttttttttttagtgatgagtagagtaattcatgttcttactactcaaggatattcttcttcaccaacaattgaagtctttattctttcttagatcagatcactatttttagatcctaattgactttgcactaggtaggccgatttcaatcgaagttgcttgctaaaactatttgactctaatagaacaccctattgagaaatatatttgtggatatcagttcttataatcgctagtaaattgatggaatggaac

SEQ ID NO: 63134 - DNA, 1067 bp, Cannabis sativa
gaataagatctccaaaaatcgagacgtcttccttgttattagatagtgcatcagtaatggctttacagtccgtttcaatttcctgaaccaagaaatgctcgtctatgcaccaccgtaaaatcgaaaggagggattttgcttctagagtagcgacagctcctcccccacaataaggttgagcaagggctgctactaccaaaccatcgctatttctgataatcccaccaaaacccactttcctgctattctttgagattgcagcatccacatttaacttgaggagtcctgacgctggaggggaccaggagaccggattgttccgcactcttgaaatttgcactggagtcgactgggaatcttggtactccgctaggtaagagtgtgccagatcaaggattgcgtgagtctgatcgtgaggttgtccttttagcactttgttcctgttgaaccaaataaaccaagccgtacaaacaaacaattctacttctttcttggttagagaagtgtatatcatatcagctatatcatgaaacataatctcagaagagcaagtaaaaatgtaaggataaaattgcgtacctttccagactcttctaatgctctgacagtagaacaaagcatgagacactgattcttcagggaacccacagcgatcacaccccggaaagtggataattttcctatggactaagttttgggcagtagggagggttgagtttgtggctctaaaggcaaagtgtttaaccttagcagggagattaaggtgccagaggtttttccaccaaggggaaggggaggaagaggaagggatatcagggggggaggtagaggataggctaaggtggtaacccgatttgacagagtacactcctgtttttgaaaattcccaaatctgatcatcaggagagggggtaagagggaggggaatggccagaatttggtcaaccacatgagtcgggtaacttctctgtaaagcaacggtatcccatgtcatagaactagtgatgaaagattcaactctgtcaggggcaggggagatgggtgagatatgacgaaaacccgggatc

SEQ ID NO: 63135 - DNA, 1252 bp, Cannabis sativa
  modified_base (398)..(399): a, c, t, g, unknown or other
tcaatctaagaattcaaaggaataagactgtctgctcctcctctgctacgcatataaaaagttcacctaagataagaaaaaagagtaactaaataggttagaaacaagagaaaaagaaatcaaattagattaaaaattaattagattgatattgataattttcaatttcctgacaacggcaccaaaagcttgttcccaaaaattgatacgcaagtatacacaatcgaatcaagtaataaaatgataaagttaagtatcgtttccactaaccacttgaggctagctcaagtgtagctcaagtggccactcaagtggccataacaagtggccataagtgggtgtatgtgtgttggaggtcctacgttcgcgtcccaggtaaaatatggttgtaatatatnnacgcttaaataaaaaaaaaagtatcgtttccacgaggactaattatcaattacaaatcaattaattctttatttctatttgattaattaaaaagttttagaaaaataaataaaacaaagtaaataattaaaaattaaagaaataaacaatgagaaaaataagaattattatgatccccaataatcttttattttacttcttaatgaaattacccgattcttcttcgttctattcaattgacaagtggaattaagtagttcataatttggttaagacttacagatccaatctatgtgaaaactgcttatattcctatggaaaaatttaatcacaaagaaagcattaaacaaagtaactcataaaatcacaaataatctagacactttcgtcctaaatcactttgtatccataacaatcaaagcatattaaaatctcactttttagaattttaatttgaattcatagataacaaatataggtgatcagccaataattgcaaaatttaattggagtgtattgaattgaaataagagaagaagataaaattgaataactgcattaatccataaaataaattcaatagttcacataataatccttaaagaaaattagctcataaaagtcattctaaaacaacaaagattcaaataaaaaaaataaaagataaagatagatgagaaagaatagtatttgaagtccttcaatggtactaactgttgaacctatgggctattaagtcaatgcaattccaaatataaaaattatattggttgtccttacaatttcactaaggcagtacgctcggtcctaaggatggtaggacaccattcataaaagcaagaagtattacctc

SEQ ID NO: 63136 - DNA, 518 bp, Cannabis sativa
actcatcttttgaagctcaaaagaaacatcatgacacaatatcttgttcttccatatatggattcaaagcaactggaaatcctcaacacattgtatcttttcgggttggccatatgcagttgtagaagatgaaaagccatctaaatgcccacaaaaacaaattgatgttatgatatgataaaataaaaacaagcaaaattgtaatatttgaagacaaattgctactacatgacaaaaatcaaaattgaagattgtaaaaattagatggctaaccttttgacaatcgtatttggtcataacctcataaggtttatagtgccaatcaaattattatctaaatatgcaacactcccgcatagcatcaaatgttctcttagcccggatcacaaagttagaatccaaaacaatgtttttgttgtcgagtgaatttcgcaacaccaaattatattatattgctaataacaagaagaaatttatgtgtaaagacaagtgcgagtattcaaccaagaatggcgagt

SEQ ID NO: 63137 - DNA, 940 bp, Cannabis sativa
aaaatcccaacaaactcccacttacactaacataaaacaagtagtgcatttcaatcaatccattatcttgatatccagatcaaatatagtgtatacgactaaacccaaattccgataactgtatggttgtggtaagcaactagttttccaccattacttccttcgtgttcataaaatattatgcaacatcatttttctatatgcattactcctctagggataatgaattctttaatgtgtattaagttcttccgaatgtttagaagacacatctctgattatatccaaaatggaatagagataaaaatagttaaaaactttcttcagtttgaataactttctagtgtttttgaaacaactaagttatttagcttcactagtggaactaaattattatagatgggttcttacatccttttagaataattcctccaccccaagagtaaccaccatctataatattccgagttggtgaagatataagaattctaatatacaaccctatcatctaacatataggtcactttcacaggttctttcttgattgtctcccaatattccttgttcaattacatcttagatggctcccactcaaaagtaggagtgtggttcatatataagtgtgcatttaacccttactattgatgcttaatgaccttttgttttgacatttatcttagtctaaaataataagttccttctagactaaatcatcaacatagcattctagtattaacattaatgtaaaatacttgcttaagttccttctacagattttgcctaagtcattcgaatagactttacgaaatttcctatcttatccttattcttttgataagttattactatccatatgaatggttagattaactttcttagttttgttccaaaattcctatcacgatcttaacatagcaagctatcattagtgtctttcaaa

SEQ ID NO: 63138 - DNA, 1063 bp, Cannabis sativa
gagatggatatttgttatcccaaaccattcttgttagcaacaatcttaataaagaaaataggtagtgtcaaggacgccagacactatccatctccactctaggtatgatattatccgttttgggcttaagtcctcacagttttgttcttggacacctatctaacaggtctcatactaatggagatatgtccatccttatatactcatgatcctttccattcctagtcaacgtgggactttagttgcacacccaacaatcctcccctcaaacataggatcacatagcctcttctcaaacgatctttcatcttgcaccatcactatcaccaaacagaatacgccgcctgactttcattgttaagaagactttcgacgcaaggcaccaaacaagatctccatcttgtaccggcgtaatcaccaatgggacatgccacctaacttatcaagtagactttcgatacaagacaccatatagatctgcaatcacgaggttacacagaggctcgtcaccttaagaggatttagaggattcattcgcatgactggatttgggatctggctatgataccaatttgtcaaggacgccaaacaccatcaatctccactctaggtatgatattgtccgctttaggcctaagccctcacagttttgttcttggacacattcctaaaggcctcataccaatggagatatatccatgatccttctcattcctaaccaatgtaggactttagttacacacccagcagatagtttacaacaaaatcttcgtgtcgttgattcctagcagtaatgcatcttcctctatgcctcctatttggtactaaacgagtaggtttgactatattgtgttgtcaaaaattgtggtaattgttgatttcaagctaaattggcagattatattagctcattaataacaactttttttcggtgaaaatgctaaaaattttatgcattgtatataggggtgtgtataaatcatccattccaatgataaccgaccgctaaaattggatatcaaattgtgatcggatcagattggatgttatttttgaatattta

SEQ ID NO: 63139 - DNA, 1026 bp, Cannabis sativa
aatcaatttgtgatagttttctgacttttagtttttgttaactcattttttagaaaattattttaaatttttttgccaaatacccttattagttttcaaaagttatttttttgtttttaaaaattgttttcaattttaagttatgaaacagctcctaacgagtaacaagtactttttggattcgtttggtacgtcgtattatatcgtattgtattgtataatattatattgaattatattttatgcaatatttttatgtaaaactatgatattgatttttatggacacataattatataaaatattttaatataaattaaaatttaacataatattatataaaaatatgatacataatccaattcaatataatacaatacaatacaacttaatataacataccaaatgagcccttaaagtctagttcaaagcaaacgagctactctttcagtgcggtccatctattttatcattattatttttttaatattcattagttcatgtagtttgtcttttgtattatttttaattttgatttatcttgtttatttataaatctttattgtttattttttttatatttttagggaatatttttttatgaaagaaaaaataacattattttatgttgacgcaacattatatattctatgttttcataatatgaaaattattgtgaaaacaatgtgtaacaaacgtcttttcttagaaaaatcttaaaacattagtttgtaaaaatgtaaaaataaaaaaaaatctattaaaaaaggttaattttttttttattatttttatgtattttgaaataattcttttttctataaacataattttgacatacaaaatatttatatatatttttggtgaaagaaatacaaaatgttattgtaacattaacatgttatgtaaaacaagccgtcttttgggcttgggctgataaaatggggtctcgattagttttgggtacatgacataagaaatagaaaagactattaggtaatgagtgttaagatattggtttggttt

SEQ ID NO: 63140 - DNA, 3620 bp, Cannabis sativa
gtgttcgggttgtgtattcggtttggtcggtttttctgttacgattttttcttgtatctttaggtgacgtttagttagaggtaataaaataaaatggaatggaaagaaaatgaaataatttttattctattcctttgtttggttgcattttaaagtattagaatgctctttctacattttgatggaatgactattccaatttaaaaaggaaggaatgactattccaatataacaagaaaaaaaatttaatgatttttttattaattttttttatatattttaaattttattacattccattcctatttctattctcattcttattcctatatttttatttctctcaactaaacgtcactttagttcttatggcatgtttactaataagtaatgggaatcaatagtaaggtcctttacatttgtttatttattaatttagaaaagggaaaacttgattaaataagacagattagaaagggagaactccccccactaattttctaagaaatgtcattaagggtaatggattttatttatttttattttattttataatattaaattaataatgacaatttcatctttttaaaatatgtcttacaaaataactaccatatactagtttaattcaaaagggtcatttagtcaatttaaccattctaattactttttctgataaaataaataagataaatcactatcgttctattttcaaaaaaatttagtacacaatatattacagatattgattctaattattttttatttattatgttacatttttctattattttatttcaattgtaaatactacacgataaaggtgccattattgttctctttgttcagttaattgtttcttgtttggtgttttgagatactgcaaatacattatattatttttgttgtcacaattttctttcttatttttagtctgcactagtggtactaatttcttacaatcttgtacaaaataaataacaaaaaatatcagctgtgaactgtggtattatttttgagatactgcaaatacattatataatttatagtttaatgaattttaatcgcgttctttaagtccattaactaacaatgtacaaaataaatagtctttaaaagagtgaactgtggtgttagcagctaactagttccaattttgaaaagcaaaataaatattaaatatataaaatatcataaatattcattaaattcaaacattaattgaagagagaaatatataaaaacaaaaaaaatgtaacaacacatatccatatatatgaatctgaaactcttattcgtaaaataaatgaacattatacaaatattaccattcttcatattatcatatatatatatagtatatattataaaatcccaacaacaccaaccatataaacactcttcaaacagagtgaatacttacaaaatatatatatcaaccccaaatctgcaaatccaatttttctctctctatatatgctatttatttctctcactctcaataccatacaaaaattagaaagaaaaaaaacaactttgccaatttttataatactgtgtatatatatatatatatataataaaatcatatatgataataaatgattttaattaattagagggtgcagctgcaggtgtggctacgagccctgccacaaatggtgctactgggccaggggctgcaccagagctcatcagctccaccatggctctgtgtgggttgtacctttgcttctcacacaggtcaggcaaaaacactcctgcacatatatatatatatatagtcaaataatatgcacatgtattgtgacaaaatggcttaattatattctacaaaaagtaataatcttatgcaccatatagctttgatttatttagaagcaaatccataacaaatttggtataatatcatgatgggtcttatatatggtaatcagaaacagaaatttgacccagaaaacaaagagaaagtcaattaaagagtctttaaggctcatttttttttttttttggtggggccagcaatatttttttttatatttatatttatatttattgaaatggttctggttccagaaggttttaccaattcttatattacaaagtggaaggcctgtttcacaagttgcttaatttgaaaagaataaaataattataaactgaaaaagaaaaatgaaagaattttcttcccaaaacagttacagtcataataaccaataacattaattttcttttcaatcattggtgaaataaataacataagttataattaaataatgattaattaatgattatgatataaaattaccttctccggcagccaaattgaagtaaaggtcaacaatgttggggcagttttggtagcaatcttgagcacaaagcttggcagtgaattgaggttccattaggtaatcagaagaaatcccaacagacttcctatcaaccccacaagccttcacacatttctccgtttcaatgtgttcggccaacctctcaacaaccacttctgatgtccgacattggtactcaactcccccatccttggagaccgtcgtagacgtctccaagagacacctcttccccgaggaggctaccgcgaatgcacaaacgtccaatggcaattcctcacatacaatctcacctaaaagaaaaaaaaaacattgcataataatttagatatgtaccatgcatgcatgcatgcataaattcaaaagctcaaaaaatatataattgaaattatacgtacctagggctgcttggaagaatagggttgacatgaagagagccaatgggagttttgagaaagccatatttgaattttgagtcccaaataaataaaaactcttttaagaaaatatatataaatatatagattgagagagagagagatgaagagaaagagagaaaattagtgtttgttgttggatggtacaaaaacgttggcaaggtttggacttatatatagtaaagaagaaagaggaaagagagaagagtctatattacgtggtggaaatagaaggaggcttaattaagaatctttaacatctaataataataattttagaaattaataaaaaagctttttctctaaatatatttattgccaattaagaatcattaataacgcgtttcatgtatatactccaactctctccaaatttagatctacactacgcgtatttgtgagcaagtttattttttttcaaagtagaagcagattttttaacaagtatatagtatattctaataagtttggtgtgtgtattatatggtccttttctagtaaaaataattgattaattaatgaatataaatattgatttatttttattactatataatgcaagttgagatttaattgcaaatttgaatgagtttgttgaagatttgggtctacgtttcgtcgtttacctttcgttttcgtttcttctattctgaataaggggacctttctcatttaggtgtcatgatcgaaattttctaggaataatgaaaacggaattgatgagagtttagggtttgaaaataaaagtttgaaggaatttcttggctctttcattaattgtcccgtctatataaatatatataattatttttatataccattctctcacaatact

SEQ ID NO: 63141 - DNA, 1304 bp, Cannabis sativa
aatggtgatcgtgggaagctacggtttgaagagtggaagaatcagagaaatgaaaaattcaaaaaaaaaaataaaaaaggagttatgaggtggcgtgcgtgtacatgtgtaaggaatgaagggaaaaggtaattctgtaattatgaaactttgtgaaaagtaaaattgaaaaatgtaaaagttaaaaaagtttgaaaaaccgtgtattgacgaaaatgtaaaaaagatgtcaattttgacatgaggtgtaaaaatctcatatcaatccgttccatcaacttgaattaacccgactaacttgattaagatagttttttttttttttttaaatattttaattatatataatttatatacatatttataaaaaatagaaagttcaaactattatatttgttttatggcggatgatttgaactttaaatttaatttttatatttatctcattatcacaataattaaaatataacaattgaatgtaaaaaaataaaaataaatactagtgttcggtttggacgggttaacccgactaaattgaccaattcattgggcgggttgattttttttttttttttaattggatagattgcacttaaatttttgtaactcgatttttacattaagttaaataaaatgtaacgtaaactgaccaaaccaatcgacgtataccctttaaggaagaaatattgttatttgaggtttaagacttgaacaattcataagttactccattttttattgttagtctgctgaaaactgtacgagtttttaagtcaaaaattggatactttctaaagtataatttcattgctacattgaacggtcttaaatatagtatatacacactcaattgatgattgtagttaaataatcccaccaaatgaaagtagtttatcatgtttcctgtcaagctatcaacctaataataatgagagacattttaagaaaggtaatatcattggtacaattcgatattaagtaattttaataaatattataaaaaaatattaattaattgttagacaatatttttttattgtggtgctagacataacaggtctcatagcaatgtttataatagtaaggattcgactataatccttttatatatatttgtttagttttgaaaccaaatcaataataatccatttatattttatatatttttatatttaggtctaaaacttgaaaacaaaaatttgttggttaaattttatttttatttttgtcttcaaagaatgagaaattaaggtgagagaaatttggtcaggctgactgagttttgggtctgtcttcaaagctgg

SEQ ID NO: 63142 - DNA, 830 bp, Cannabis sativa
aacttctgagggaatccaacacaatccaaagcgtggtcaataaacctccaactaagcctgtcataagctttaacaagatcgatcttaattgcaaaaaaaccttctctgcccttctttcgcttgaaagagtggataatctcttgaacaatcacattattatcttgaatactcctacccgggacaaacgcagcttgagtagggcaaattaaagaaggcaggaccggtttgattctatttgcaagaattttagatataaccttgtaaataacattacagagtgaaatgggtctgaattgactcggtcttttcgggttcaggacctttgggataagtactacattcgtagtatttattcctttgtgcatttggccatgcctgaagaaatcagagactgcatcacagaaatcctctcccacggattcgcaataatgtttgaaaaaaaggactgacataccatccggtcccggagccttatgactattcatagcaaacaaagtacttttaatttcatcccgggatgggtaaagaagggtgtcctcctgccgttcttgggaaatcctctcttgaaacaatcccctacaatctaggctctggtcaagcccggagccctcaaagatacctcgaaaatattcagtaaattcaaggccaatagcatctctgtccgtaagccaaacattattcttgttcaatatactttcaatggcatttctccttcctcttattgctgccgagaggaagaagaatttcgtgcatttatcgccatccttgagccaagagttccgtgctcgttgcttccaataaagcgctttccgggtcaacatttcgttcag

SEQ ID NO: 63143 - DNA, 666 bp, Cannabis sativa
  modified_base (31)..(34): a, c, t, g, unknown or other
ttaatgaaacatacttgtttgtaaatctagnnnntggtaaaatatttccaacagagtcccttctcaaaatgtcttatgttgttgatatttgatttttcttttgggccaaaaggaaaaaacctttttgttcctcatttcatttctccttttttagtgagcattttatcgatttagggttttcagagagttgcactgtttcttctcatatcccgcttccattttcttttgatttctctttatggcttggatgttttgcacccgatgtttgttgattggaatcgtgagattctttttgtcatctatccagaatgggtctcttcccagtagttagggggccctcattcccctttttgattgagggtttgatggggggcttataactgttgtgtttcttatctttcagatgagtgaagttctccaggatcttcacaaatacaacttctttgggttcgacaaaaaaatcctgaaactccactccgcaaatcccatgtcaaactctaaagcgtctagtgctaagtccttttctaccaagacaacgaagaaacttgccaccctagaggacatcatgcaaggtctagttccttataagaagtattcctattgttctattggttgggaggttgacgaactccattcgactttgacatgcgctcatcaattggagaa

SEQ ID NO: 63144 - DNA, 788 bp, Cannabis sativa
tagtataattacatcttatataattattggtattttaaataaagtgcacacacgtggcgtccctgttggacagggcgttacactttgcctctgaactaacaacccaatttgtttcccatctgacccaactcctggccaaaagatacgcagcctgcgcttccacgaactccatctttcagattcaagatattagcattgctatgaccgcggtaagtctttgtaaattttttctggggttttactctgtggcatttgatctctcatacttaactcttttttctcatttttctagatcgctgaagagatcggtcgcctctcaaagactttaattgatcatgggtacgtcatgtccgagtttaggggcatggacgaggccatgaagtgtttgacagatctggaggctgagaggaaggcgttccgggaggaagcccaatagcaggaggctcaggcagagaggaggcatcaggaggtgttgaaggccaaggcagaggggctgaagacccgagatgaggctgtggaaaaggcaagacgcaagctgagggaggccaaggaggcagttaaagatctgactaccaggctgaagtcaatggaggagctgcatcaggctgacttgcagacgacgaccatcttgaccattgaggtgaaggagcttagggatttcaaagatcaggccctgaagaaggcaaaaagggatgagctcctggcccctgttgtctgcaagcactacactaagcgctttgatgatggcatctttattgcctggaagactaatggccaaaacctcaagc

SEQ ID NO: 63145 - DNA, 932 bp, Cannabis sativa
atgtagtaatagctaatttttttttcttaaagatcaaaatttcaaatgccatttaaaaattaaaaaaaaaaatacctaattaaaaaaaattaaacatacatgcacttatataacatcacctaattaaacctaattataaaaaactaattacatgcaatagcacttataattacaccccctcacttttttttaagtttatttttgctcttgatttataaaaaaaaaatgacgcccccttactttaaataatgaattttccactgcatatatatacatactagtatatatatatatatatatatttattttctcacaaaataaacaaaggtgcatattacaatccatatgtcatttttttattgataaatttaaattaattttgaaataaaaatttaatgatctgaattaataagaactattatgcaactattgacttaacacttaacggctagataaagttttataaatataatttatgtattattataataaaaaaattcactttaaatatttatatacaattagaaataaaatagaaaatgctacaaattattcaaatatataataactttgtagtgatttttatactatttctcttatgagttttggattaataatttgttcacgtgctacatacatagtcttcgagtttaagtcgtctattaattttctatcttctctatccaatattataattattaagttagccaaacgcaagataattacagactcgacccaagaactgatgctggttttgcatttcccccatgaacaacattagactcattagtaaaattggatctattaattttattactggacctggagtggtggtctggctcctttagtgggttggcccattgtcttaattgggcctgtaaaaggggcttaattagagagaaatttacagggaaacttacaaaaatattgaa

SEQ ID NO: 63146 - DNA, 1020 bp, Cannabis sativa
  modified_base (47)..(53): a, c, t, g, unknown or other
aaaattgattataaagttattaatttttttttaataaaacattaatnnnnnnntaaattttacatcaaaattttgcaattgtacattgaagcacaaagcaaaatttggtgtaaatttaccacaaaactactttttgtgctaaatatagcacaatttttacatttcacattggagatggtcttaaatcctttcttttgggtcttgtgtgagagttatggggtcattatagtggatacaacatactgaacccagtcctcgctcacatgaacaatcccagtagtgaaggttcatatatttatcttatttaaataattgtattaggctaattatattaatttagcctaattaaaaattgattagcaacataattaatttcaaaatagatgacattaatttttttatcaaattattttgaaattaatttagaaaaatgcacatagtttaataaaataaattctaaataattaaattctagtaaactaatttttttttatatatttaattaaatatataaaattaatttttttaaagtagaattatattcaagatacttaatcaagttttttatatatatttaattaaattgaaaattatatttaagttgaaattttttaattttagaacaacttaaattagagtagtttcagaacatattttattttatttttcaaaaacatttttttaaaatgttagaatttggaaatttaaaatttgaaaattaattcttaattaattttagattcacttaaattaagtaatttttattaatgattaactaaaataaatagattaaatatattataattagaaaaccaacacttagtttgtcaaataaattttagataattaatttctaagtaaactatcttacaatttttctatatatttaattaaatagaaaattaatattttcaagatacttaaatactaaaaaaatttgtgacatttaattaaatgagaaaattatatttatgttgaaattaatttataaattaattttagattaacataaattagaat

SEQ ID NO: 63147 - DNA, 2881 bp, Cannabis sativa
gggagccatccctattatattctgatagctgttgttgtaggaaaattctatgaaaggcaaatatttactccatgaaccctcaaagtccatagcacaggctcgtaacaaatcttatagtatctaaatcatcctctcgaactgtccatcagtctaagtgtgaaaagttatactgaacttcagctttgtacccatggttctctgaagaattttccaaaacttagatgtgaacttcgaatctctatccgaaataatagatttcggagccccatgaaggcaaactatctcttttacatacaactatacatactaatccattgtgtaagttgtaatgccttgatacttaggtgcgccacagtaattttccaattaacgtaccacatttgctaatcaaaggattttcctcaaaaatcgtgctaaattaaaactttaaggaactttaaactttataaatttatatatatttatttacatagaccgggatcccgtcttttaacttttacaaacattttcaaaatacatttttaaacttgtcgcacaacgactacaaaatacaaaccaagatgtcctgagactgaacactctaggtcgggtcgtgacatgtacaatcaccatccaagctcagagctcactcctgttcagcctttgccttttctttacctacacctaaagtggcaattgtaagtcaacagactcagtaagaaaagcatgtaacaaataatatatcaccgacttatatcaaggcgcccatacacctatccaataggcttatcaaataagtaagaatgttctttacacttggtattatcgaccatgatatcatccactgccagtgctatgattgcactgtgggcccagtactatattcgttatgctcgtaccgctatgattgaccataataccactcttaattagtactatactcatacttctgacctagtactatgcttgtaccgctatgatagcgtcaattaatactttctggaattgcatatcagtcgaacccagtactatgctcgtactgttgacccgagactatagttgttctactatgatatcaattcacaacctttaaaaatcacatacacataatagcatatacaacatgttctatgctattcttacctcatttttgaattcaagtgagttggccgacttgaacgagaaatcttgtgctagatggatgccctaaatcacatttacataaacaggtaagtgacatgccaaaacctaatatgggaaatccaaactcactactaacagttctgctattgataattattataacaataccctaattaccaaggaaataaccatctaaggttctgaaaataacacgaatcaacaaatcaaacaattcaggaaacgtgcccctgatctggttaaccggttttacaagacctgtcaaactgttaaccggtttgtaccgggttttctcttatgaatcaagtatgtgtattgctcaaaaactttttgtacaacctaatagcactctccaaataaggagaatctaaataactataaaactttataaggtatgaaaccattctttctcacttctagttgctttatttggccatatacatgtaattctctttttcactatgttttccactttgacaattacaatctctacatttgtattagaattctgccataaaattgtgtttcttgtgcgtcgtatttcatagacaagggctgcaatgacagcagcaaaaattgatctcttcaccttgcttatttttgccctccttatccaccttacaattctttctaaggttgtggcagccattctccaatttagcaatgatttcatcttttccaagcattccaaggagaaataacactcaaaaaataggtgtgccatggtctcatctttaatgttgcaaagaaaacatttagaactctcaagttccctatactgcaacctgtcttttgttttgattctattaagcatagagagccaaaaaaaaaaaggaagctatacttgggtatgtttaacctactccaaacaattgaatcccattcaactttactagcaattaggccaaatagccttatatccctaagccactttgtacctgtcattttgcacctgggatacatcaaaactgcttgctactttatcttttatggttaccatcttgtgccaataccagctcacggttggattggccctatagcaccaccaattttcctccttgatgtacacattatgcatccatttcacccataagttatcttctttttttgcaatggcccaaacatacttaaacatagccactagatttcaatccgtgatgctcttgaaacctaggcttcctgttgatttagggagacaaactgaactccaggcaacaactgctaaacctgagagaaaatgatttgcattccacaaaaaaccacgacagatagattctatttcattcacaactttttttggtaatatcatgatttgacactaataagagtggatggccatcaatactaagttgatgagaactaatctacctgcaaaagatagattacgcatactccaagtttttgtcctagccactatttttttcaattagaatactacaatcagctgctgaaatcctctttggacagattggaattcctaattacttgaagggaagatcatgcttttggaaacccgaagcatcaagtactcttttaatatcattatcactcatgttattgcaatagaaggcagttttggagggattaggaaataaatgtgaggtttgggagaataatttgagcccttgaagtataagacaaatgcttttgaacggtttgcaccaggttactcaaaataaataaaaccttgcccaaatcgtgtccaaaccataccaacccttccaaaacacctgtaacaacc

SEQ ID NO: 63148 - DNA, 1035 bp, Cannabis sativa
  modified_base (29)..(29): a, c, t, g, unknown or other
tatattttctgtgtataaaataacaccangtgcatttttttagcataaaatgtcaaatttctctatatagaaaagtacactagtaatatcttttaacatttctcttaatgaatatatatatatatatatacaaaagtcattattctaacataattactaatgctgtatacaagtcaggctttttataatacagtttgaaattggtacgagtgagcacgatactacagattatcacatgacacgaaaaatataacacacaacactatattaatataatgggtaaatactattttggactctatattttacaaaagttatcaattggatcatctattatgttaaatgataaaatggaccctctgttttgttaaatggtaaaaataaaaccctgagttcaattttcaacaaatcttttttttttttaatataataaactttaaaacaatttctaagagaagcagatacagaaaatgtaactagttttgtcataacatttctagatcggaatattattaagttttattttgacaaaaaatcaattcatggtcctatttgtacaattttgaaaaatacatggtccattttatcatttaacaaaatagatggtccaaataataacttttacagaacacatataattggtgttgtatatatttttggtgccttataatactaggtttctcatttctgtgtagtgactaacatataataatgtccactcattatagaatttcgatattttgtataataactacacataaggattaattaatgttataactaacaaaatctaaattgaagaaaagagtaatgtataaaaatttaacaagtagattgggtaatgtaaaattcttattggcatatttgataaatttgccaaaattaatttatgattatatttttgaaatatccctaattatgtatgatatttttgaaaattggttgttacttattttggggtgaaatgtttataaaaggagaatattttattcatgaaagtaaataaattaatttttctatacaaagtatataata
